United States Patent Application Publication US 2012/0159672 A1 - sequence listing, part 17

SEQ ID NO: 38710 - protein, 446 aa, Zea mays subsp. mays
  peptide (1)..(446): Ceres Seq. ID no. 12383440
  misc_feature (62)..(109): Pfam Name: Pfam Description:  Myb-like DNA-binding domain
  misc_feature (47)..(249): NCBI GI NO: 127580 NR Description: Myb-related protein Zm1
  misc_feature (280)..(428): NCBI GI NO: 127580 NR Description: Myb-related protein Zm1
  misc_feature (47)..(308): NCBI GI NO: 38347068 NR Description: OSJNBa0006A01.9
  misc_feature (47)..(171): NCBI GI NO: 19548405 NR Description: P-type R2R3 Myb protein [Sorghum bicolor]
  misc_feature (50)..(234): NCBI GI NO: 7438336 NR Description: myb protein homolog - rice
  misc_feature (50)..(234): NCBI GI NO: 33087073 NR Description: myb-related protein
  misc_feature (180)..(439): NCBI GI NO: 38347068 NR Description: OSJNBa0006A01.9
  misc_feature (50)..(235): NCBI GI NO: 37535390 NR Description: putative myb factor
  misc_feature (47)..(237): NCBI GI NO: 15219313 NR Description: myb family transcription factor
  misc_feature (51)..(249): NCBI GI NO: 5139814 NR Description: GmMYB29B2 [Glycine max]
AAPHRSLAQGEALSRTESSNRSHRDTGQEQELEVSPRGSSLGLGTAMGKGRAPCCAKVGLNKGSWTPEEDMRLVAYIQKYGHANWRALPKQAGLLRCGKSCRLRWINYLRPDLKRGNFTAEEEEAIIKLHGLLGNKWSKIASCLPGRTDNEIKNVWNTHLKKRVSPSGGEEEHGAAGSNKNKKKKKKAAGGAEEPLPSPTPSPSPSSSTTTTANCSSGDSGEQQSNTSKEADDEQLDLENLEMMPMLDDDPITFGFDMLVDPVPAPYGPAVSASASRPTSPCASSTSPPPPAGCGPLGVDDLLVLPEIDIDQELWSIIDGDGGGDGGGSACAVSAETSAPCCQSNAPEPTTNGACATSHHGAAEEEGKEWWLEDLERELGLWGPVDVEDYQYQYPTGPHGLVADHTDPLPAMVDDPVSCYFQAGPASAVLQEPGYSVTSGSNLMGL

SEQ ID NO: 38711 - protein, 402 aa, Zea mays subsp. mays
  peptide (1)..(402): Ceres Seq. ID no. 12383441
SSAQVPGTGRGTVTHGIEQSITQRHRSGAGARGVAARQQLGTRDSHGEGPGTVLRQGGAQQGLLDAGGGHAPRRLHSEVRPRQLARPAQASRFAAVREELPSAVDQLPAPGPQARQLHRRGGGGHHQAPRLAREQVVQDRVVPAGPDGQRDQERLEHAPEEAGIAVRRGGGARRRRVQQEQEEEEESRWRRRGAAPVTDSVSVAVLVHHHDGQLLQRRLRRAAEQHQQGGGRRAAGPGEPRDDAHAGRRPNNLRLRHAGGPRASAVRPGRVRVRVQTHVALRLVHVPTSARGLRPARRGRPAGAARDRHRPGAVEHHRRRRRRRRRRLRLRRVCRDIGAVLPEQCAGADDERRLRDQPPRSGGGGGKGVVVGGPGEGVGPVGPRGRGGLPVPVPNGPTWSGG

SEQ ID NO: 38712 - protein, 400 aa, Zea mays subsp. mays
  peptide (1)..(400): Ceres Seq. ID no. 12383442
  misc_feature (16)..(63): Pfam Name: Pfam Description:  Myb-like DNA-binding domain
  misc_feature (1)..(203): NCBI GI NO: 127580 NR Description: Myb-related protein Zm1
  misc_feature (234)..(382): NCBI GI NO: 127580 NR Description: Myb-related protein Zm1
  misc_feature (1)..(262): NCBI GI NO: 38347068 NR Description: OSJNBa0006A01.9
  misc_feature (1)..(125): NCBI GI NO: 19548405 NR Description: P-type R2R3 Myb protein [Sorghum bicolor]
  misc_feature (4)..(188): NCBI GI NO: 7438336 NR Description: myb protein homolog - rice
  misc_feature (4)..(188): NCBI GI NO: 33087073 NR Description: myb-related protein
  misc_feature (134)..(393): NCBI GI NO: 38347068 NR Description: OSJNBa0006A01.9
  misc_feature (4)..(189): NCBI GI NO: 37535390 NR Description: putative myb factor
  misc_feature (1)..(191): NCBI GI NO: 15219313 NR Description: myb family transcription factor
  misc_feature (5)..(203): NCBI GI NO: 5139814 NR Description: GmMYB29B2 [Glycine max]
MGKGRAPCCAKVGLNKGSWTPEEDMRLVAYIQKYGHANWRALPKQAGLLRCGKSCRLRWINYLRPDLKRGNFTAEEEEAIIKLHGLLGNKWSKIASCLPGRTDNEIKNVWNTHLKKRVSPSGGEEEHGAAGSNKNKKKKKKAAGGAEEPLPSPTPSPSPSSSTTTTANCSSGDSGEQQSNTSKEADDEQLDLENLEMMPMLDDDPITFGFDMLVDPVPAPYGPAVSASASRPTSPCASSTSPPPPAGCGPLGVDDLLVLPEIDIDQELWSIIDGDGGGDGGGSACAVSAETSAPCCQSNAPEPTTNGACATSHHGAAEEEGKEWWLEDLERELGLWGPVDVEDYQYQYPTGPHGLVADHTDPLPAMVDDPVSCYFQAGPASAVLQEPGYSVTSGSNLMGL

SEQ ID NO: 38713 - DNA, 1213 bp, Zea mays subsp. mays
  misc_feature (1)..(1213): Ceres Seq. ID no. 12435169
atcgagaagccaggaccaggacgacgatggcccggccgcgcctcctcctcaccttcctgctcgccgcggcggccgtgctgaccacggtgcccggcgtcgcgctcgccaagtcgaagctcgccaagaagagcgacgacgtcgtgaacgggcccctcctgaccgagtagatccaggcgaagaagacgctgatcgtggggccggacgaggagttcaagaccgtgcagtccgccatcgacgcggtgcccgccggcaacgccgagtgggtcatcgtccacctccgctctggcctgcacaggggcaaagttgtgataccggagaacaagcccttcatcttcgtgaggggcaacggcaaaggccggacctccatctcccacgagtccgcctcttccgacaacgccgagtccgccgcgttcaccgtgaactcggacaacgtcatcgtcttcggcgtcagcttcaggaacagcgcccgcgtcggcctggtgaacgacccggagatccgttccgtggcggcgatggtggccggcgacaaggtggccttctaccactgcgcgttctacagcccccaccacaccctgttcgacagcgccggccgccactactacgagagctgctacatccagggcaacatcgacttcatcttcggcagcggccagtccatcttccagtgccccgagatcttcgtgaggcctgaccggcggacggagatccgcggctccatcaccgcgcaggtgcggcaggaggaggacagcagcggcttcgtcttcctcaagggcaaggtgtacggcgtcggggaggtgtacctgggccgcgtcaccgcgccggactcgcgcgtcatcttcgccgacacctacctctccaagaccatccacccggccggctggacaaccataggctacagcggcagcaccgacaaggtgacgctcgccgagttcaactgcactgggccgggcgctgacgtgacgaaccgcgtgccatggtcgcggaggttctctcccgacgacgcggccaagtacctcaccatcgacttcatcaacggcaaggactggctgccggcgtactactactgatccgacgatcgactgctggatcgatcaagcatgcatgcatgtatacacatcttgtaacgctgaattttgattcatggcacactgtactggacgaggatcattttttcttgcctaagtactgacacgcgtttccattgttgatcccg

SEQ ID NO: 38714 - protein, 229 aa, Zea mays subsp. mays
  peptide (1)..(229): Ceres Seq. ID no. 12435170
SRSQDQDDDGPAAPPPHLPARRGGRADHGARRRARQVEARQEERRRRERAPPDRVDPGEEDADRGAGRGVQDRAVRHRRGARRQRRVGHRPPPLWPAQGQSCDTGEQALHLREGQRQRPDLHLPRVRLFRQRRVRRVHRELGQRHRLRRQLQEQRPRRPGERPGDPFRGGDGGRRQGGLLPLRVLQPPPHPVRQRRPPLLRELLHPGQHRLHLRQRPVHLPVPRDLREA

SEQ ID NO: 38715 - protein, 184 aa, Zea mays subsp. mays
  peptide (1)..(184): Ceres Seq. ID no. 12435171
  misc_feature (1)..(175): Pfam Name: Pfam Description:  Pectinesterase
  misc_feature (1)..(184): NCBI GI NO: 39653369 NR Description: putative pectinesterase
  misc_feature (1)..(182): NCBI GI NO: 15228955 NR Description: pectinesterase family; protein id: At3g17060
  misc_feature (1)..(179): NCBI GI NO: 15224725 NR Description: pectinesterase family; protein id: At2g19150.1
  misc_feature (1)..(179): NCBI GI NO: 15228023 NR Description: pectinesterase family; protein id: At2g36710.1
  misc_feature (1)..(179): NCBI GI NO: 27754550 NR Description: putative pectinesterase family protein
  misc_feature (1)..(179): NCBI GI NO: 15239623 NR Description: pectinesterase family; protein id: At5g18990.1
  misc_feature (1)..(179): NCBI GI NO: 15229583 NR Description: pectinesterase family; protein id: At3g24130.1
  misc_feature (1)..(179): NCBI GI NO: 11994232 NR Description: pectin methylesterase-like protein
  misc_feature (1)..(181): NCBI GI NO: 34905460 NR Description: putative pectin methylesterase
  misc_feature (1)..(182): NCBI GI NO: 30690639 NR Description: pectinesterase family [Arabidopsis thaliana]
MVAGDKVAFYHCAFYSPHHTLFDSAGRHYYESCYIQGNIDFIFGSGQSIFQCPEIFVRPDRRTEIRGSITAQVRQEEDSSGFVFLKGKVYGVGEVYLGRVTAPDSRVIFADTYLSKTIHPAGWTTIGYSGSTDKVTLAEFNCTGPGADVTNRVPWSRRFSPDDAAKYLTIDFINGKDWLPAYYY

SEQ ID NO: 38716 - DNA, 1400 bp, Zea mays subsp. mays
  misc_feature (1)..(1400): Ceres Seq. ID no. 12383804
gcacgagaccattacctagaacatcctaatcaaaagcggatgcgctcgggcgacgctcctctctctctttctctttctctcgctacatattcttcctctctctatctttgttctcctccgcccagctttcggacgcgacactcatcgcacattcccgtcaggccggtatccgcctcgggcttcgccgaaatcctacgctacctctctgatctctctccccccggccccgagcgcaccagattcacaccgcgcccgcataggtgcgtgtgcctgcggaagctggttgctgctcgcgctactagctgtttcgcgcggtgatcaacaatccggccgcgggagcggagctaggaggccgagagacacaatgaacatgttcgatgggatggagagtgctgggtacggcggcggcgctgggccgatgggcggggtggtgctgtcgcgggaccccaagccgcggctgcggtggacgcccgacctgcacgagcgcttcgtcgaggccgtcaccaagctcggcggggccgacaaggcgacgcccaagtcagtgctgcggctgatgggaatgaaagggctcaccttgtaccacttgaagagtcacctccagaaatacaggcttggaaagcagaccaagaaagacacgggtttggacgccggcagaggggcattcgcggcgcagggcatcaatttctccacaccagtacctcctcctagcattccatctacggccagtgataatacgggagaaacgccacttgcagatgcgctgaagtaccagattgaagtccaaaggaaactgcacgaacagctcgaggttcagaagaagctgcagatgcggatcgaggcgcaaggcaaatacttacagacgatactcgagaaggcccagagcaacctctcgtaccacgcgactggagccgcaaacctagaagcaaccaggtcgcagctgacggacttcaacctcgcgctctcaggcttcatggacaacgtgacccaggcgtgcgagcagaacaacggcgagctggtgaaagccatgtccgaggacggtctcagagcgaacaatctagactttcagccgtaccatggagttcatgacggggacgacgtcaagtgcgctacggacgaagggttgctacttctggacctaaacatcagaggcgggtacggtcatcggatttcgacagatctgaagatgaatcaacacatgcggtgaaaagttcagtagaaagaaaggcgaggacagtagtttaatcttgggtaacccatcaatctaagagaagaggtgcccttgtgtttgtgagaaattctttcggccatcttgattcctaacgatgcttctttacggtgatggtcagcgtattgcttatgtaaaatttggtgagaggctccgaataagggtaactaatctt

SEQ ID NO: 38717 - protein, 279 aa, Zea mays subsp. mays
  peptide (1)..(279): Ceres Seq. ID no. 12383805
  misc_feature (31)..(82): Pfam Name: Pfam Description:  Myb-like DNA-binding domain
  misc_feature (5)..(264): NCBI GI NO: 32470629 NR Description: putative phosphate starvation response regulator
  misc_feature (124)..(264): NCBI GI NO: 15242435 NR Description: putative protein; protein id: At5g45580.1
  misc_feature (7)..(89): NCBI GI NO: 15242435 NR Description: putative protein; protein id: At5g45580.1
  misc_feature (13)..(194): NCBI GI NO: 14596181 NR Description: transfactor-like protein [Arabidopsis thaliana]
  misc_feature (13)..(194): NCBI GI NO: 28059694 NR Description: transfactor-like protein [Arabidopsis thaliana]
  misc_feature (13)..(194): NCBI GI NO: 15238770 NR Description: transfactor-like protein; protein id: At5g18240
  misc_feature (5)..(211): NCBI GI NO: 18414049 NR Description: putative protein; protein id: At4g13640
  misc_feature (13)..(194): NCBI GI NO: 6223653 NR Description: transfactor-like [Arabidopsis thaliana]
  misc_feature (131)..(279): NCBI GI NO: 38345771 NR Description: OSJNBa0083N12.9
  misc_feature (11)..(200): NCBI GI NO: 18404044 NR Description: transfactor, putative; protein id: At3g24120
MNMFDGMESAGYGGGAGPMGGVVLSRDPKPRLRWTPDLHERFVEAVTKLGGADKATPKSVLRLMGMKGLTLYHLKSHLQKYRLGKQTKKDTGLDAGRGAFAAQGINFSTPVPPPSIPSTASDNTGETPLADALKYQIEVQRKLHEQLEVQKKLQMRIEAQGKYLQTILEKAQSNLSYHATGAANLEATRSQLTDFNLALSGFMDNVTQACEQNNGELVKAMSEDGLRANNLDFQPYHGVHDGDDVKCATDEGLLLLDLNIRGGYGHRISTDLKMNQHMR

SEQ ID NO: 38718 - protein, 277 aa, Zea mays subsp. mays
  peptide (1)..(277): Ceres Seq. ID no. 12383806
  misc_feature (29)..(80): Pfam Name: Pfam Description:  Myb-like DNA-binding domain
  misc_feature (3)..(262): NCBI GI NO: 32470629 NR Description: putative phosphate starvation response regulator
  misc_feature (122)..(262): NCBI GI NO: 15242435 NR Description: putative protein; protein id: At5g45580.1
  misc_feature (5)..(87): NCBI GI NO: 15242435 NR Description: putative protein; protein id: At5g45580.1
  misc_feature (11)..(192): NCBI GI NO: 14596181 NR Description: transfactor-like protein [Arabidopsis thaliana]
  misc_feature (11)..(192): NCBI GI NO: 28059694 NR Description: transfactor-like protein [Arabidopsis thaliana]
  misc_feature (11)..(192): NCBI GI NO: 15238770 NR Description: transfactor-like protein; protein id: At5g18240
  misc_feature (3)..(209): NCBI GI NO: 18414049 NR Description: putative protein; protein id: At4g13640
  misc_feature (11)..(192): NCBI GI NO: 6223653 NR Description: transfactor-like [Arabidopsis thaliana]
  misc_feature (129)..(277): NCBI GI NO: 38345771 NR Description: OSJNBa0083N12.9
  misc_feature (9)..(198): NCBI GI NO: 18404044 NR Description: transfactor, putative; protein id: At3g24120
MFDGMESAGYGGGAGPMGGVVLSRDPKPRLRWTPDLHERFVEAVTKLGGADKATPKSVLRLMGMKGLTLYHLKSHLQKYRLGKQTKKDTGLDAGRGAFAAQGINFSTPVPPPSIPSTASDNTGETPLADALKYQIEVQRKLHEQLEVQKKLQMRIEAQGKYLQTILEKAQSNLSYHATGAANLEATRSQLTDFNLALSGFMDNVTQACEQNNGELVKAMSEDGLRANNLDFQPYHGVHDGDDVKCATDEGLLLLDLNIRGGYGHRISTDLKMNQHMR

SEQ ID NO: 38719 - protein, 273 aa, Zea mays subsp. mays
  peptide (1)..(273): Ceres Seq. ID no. 12383807
  misc_feature (25)..(76): Pfam Name: Pfam Description:  Myb-like DNA-binding domain
  misc_feature (1)..(258): NCBI GI NO: 32470629 NR Description: putative phosphate starvation response regulator
  misc_feature (118)..(258): NCBI GI NO: 15242435 NR Description: putative protein; protein id: At5g45580.1
  misc_feature (1)..(83): NCBI GI NO: 15242435 NR Description: putative protein; protein id: At5g45580.1
  misc_feature (7)..(188): NCBI GI NO: 14596181 NR Description: transfactor-like protein [Arabidopsis thaliana]
  misc_feature (7)..(188): NCBI GI NO: 15238770 NR Description: transfactor-like protein; protein id: At5g18240
  misc_feature (7)..(188): NCBI GI NO: 28059694 NR Description: transfactor-like protein [Arabidopsis thaliana]
  misc_feature (1)..(205): NCBI GI NO: 18414049 NR Description: putative protein; protein id: At4g13640
  misc_feature (7)..(188): NCBI GI NO: 6223653 NR Description: transfactor-like [Arabidopsis thaliana]
  misc_feature (125)..(273): NCBI GI NO: 38345771 NR Description: OSJNBa0083N12.9
  misc_feature (5)..(194): NCBI GI NO: 18404044 NR Description: transfactor, putative; protein id: At3g24120
MESAGYGGGAGPMGGVVLSRDPKPRLRWTPDLHERFVEAVTKLGGADKATPKSVLRLMGMKGLTLYHLKSHLQKYRLGKQTKKDTGLDAGRGAFAAQGINFSTPVPPPSIPSTASDNTGETPLADALKYQIEVQRKLHEQLEVQKKLQMRIEAQGKYLQTILEKAQSNLSYHATGAANLEATRSQLTDFNLALSGFMDNVTQACEQNNGELVKAMSEDGLRANNLDFQPYHGVHDGDDVKCATDEGLLLLDLNIRGGYGHRISTDLKMNQHMR

SEQ ID NO: 38720 - DNA, 1651 bp, Zea mays subsp. mays
  misc_feature (1)..(1651): Ceres Seq. ID no. 12424033
  misc_feature (1228)..(1228): n is a, c, t, g, unknown, or other
gcacgagaccattacctagaacatcctaatcgaaaaacagttattacacacagacagcagtccactcgcgattactactgtaatccccaccacaccacctcccgtcgagtggagtgcttcttggcgacctttctttgcatgtcaacgcagacaaaaagaacagcgccgccgcctccacgaccacgccggtcgccgagcctccgtctcctcccgagagatctcgcagccagccagccagttagccgccgtacgtggccacatggaggcgccgcgggcaaacaacggcaggaagcgcaagcccacgcctcccgccggcctgggggccctccacgacgacttgctcgagcgggtcctcgcgcgcctcccgccggccacctacttccgcctgcgcgccgtctgcagccgctggcgcgccgccgcggcgtccccgaccttcctccacgcctgcgcccgcgtcccctcccgggacccgtggttcctcatgctctccgactccgactccgggccccgcccgcccgtcgccttcgacgccgccggccgcagctggaaccgctgccacgccgcgccgggggccgccgtgcccgtggccgcgtcggccggcctcgtcctctaccgcgcgccggccacgggcgcgctcaccgtcgccaacccgctcacgggcgcgtcccgcgcgctcccctcgccgccgcaggccgcgcgccagctgcaggccatcgccatgtacggcgccggcggtccctaccgcgtggccctcttcgcgggcgacctccccgacgacctctccatggcggtctacgactcctccagcgactcgtgggaggggcccctgccgctcgcccgcaagcccggggacgactcctgccccgacgcgccggcgcccgacgacacggtctacttcctcagcaagtccggggacgtcgtggccaccaacatgcagcgcagcgcgtctaagcagtactcctcctcagtggtcgtgcgccgcgacggcgacggcgacgccgcctttgcctacttcctcagctactcgggcacagtcgtcgcctgcgacacggcgcgccgcaccttcgcggagctgccccgcatcctccccgtctacttcgagtactccatcgacgtcgtcgcgtgcggcgcagcggcctacgccgtcgtgctttcggaatacctcggcacggccagcctgcgcgtctgggagttcgccgggggcgcgtggcggcaggtggccgccatnccgcccgccatgtcgcacggattccacggcacgcggcccgatatcaactgcgtcggccacggcgaccgcctcatggtttgcgtcacctccgccgaggccaacgcctgcttcatgtgcgacgtggccagcaaccagtgggaggagctgcccaagtacgtcaatgccgacggcgaggccagcgagttcctggccgccttctccttcgagcccagagtggaggtcaccgtataagcgcttatggttatagtgttactacgattaattgctttcttcattaaggcgccttagttttggttcggctcctactccgtgtgattgatttcttcgtgtttgtgtgtgtgcatgtacttaacttacggtaccgaattgtaatgtcatttttcattgacattatttgtcttcaataaaattgcagattcgtgt

SEQ ID NO: 38721 - protein, 399 aa, Zea mays subsp. mays
  peptide (1)..(399): Ceres Seq. ID no. 12424034
  misc_feature (20)..(65): Pfam Name: Pfam Description:  F-box domain
  misc_feature (1)..(399): NCBI GI NO: 34896284 NR Description: unknown protein [Oryza sativa]
  misc_feature (5)..(399): NCBI GI NO: 34906730 NR Description: contains EST AU091365
  misc_feature (23)..(399): NCBI GI NO: 7486453 NR Description: hypothetical protein F4I10
  misc_feature (23)..(399): NCBI GI NO: 18418160 NR Description: F-box protein family, AtFBX13
  misc_feature (323)..(323): Xaa is any aa, unknown or other
MEAPRANNGRKRKPTPPAGLGALHDDLLERVLARLPPATYFRLRAVCSRWRAAAASPTFLHACARVPSRDPWFLMLSDSDSGPRPPVAFDAAGRSWNRCHAAPGAAVPVAASAGLVLYRAPATGALTVANPLTGASRALPSPPQAARQLQAIAMYGAGGPYRVALFAGDLPDDLSMAVYDSSSDSWEGPLPLARKPGDDSCPDAPAPDDTVYFLSKSGDVVATNMQRSASKQYSSSVVVRRDGDGDAAFAYFLSYSGTVVACDTARRTFAELPRILPVYFEYSIDVVACGAAAYAVVLSEYLGTASLRVWEFAGGAWRQVAAXPPAMSHGFHGTRPDINCVGHGDRLMVCVTSAEANACFMCDVASNQWEELPKYVNADGEASEFLAAFSFEPRVEVTV

SEQ ID NO: 38722 - protein, 325 aa, Zea mays subsp. mays
  peptide (1)..(325): Ceres Seq. ID no. 12424035
  misc_feature (1)..(325): NCBI GI NO: 34896284 NR Description: unknown protein [Oryza sativa]
  misc_feature (1)..(325): NCBI GI NO: 34906730 NR Description: contains EST AU091365
  misc_feature (1)..(325): NCBI GI NO: 7486453 NR Description: hypothetical protein F4I10
  misc_feature (1)..(325): NCBI GI NO: 18418160 NR Description: F-box protein family, AtFBX13
  misc_feature (249)..(249): Xaa is any aa, unknown or other
MLSDSDSGPRPPVAFDAAGRSWNRCHAAPGAAVPVAASAGLVLYRAPATGALTVANPLTGASRALPSPPQAARQLQAIAMYGAGGPYRVALFAGDLPDDLSMAVYDSSSDSWEGPLPLARKPGDDSCPDAPAPDDTVYFLSKSGDVVATNMQRSASKQYSSSVVVRRDGDGDAAFAYFLSYSGTVVACDTARRTFAELPRILPVYFEYSIDVVACGAAAYAVVLSEYLGTASLRVWEFAGGAWRQVAAXPPAMSHGFHGTRPDINCVGHGDRLMVCVTSAEANACFMCDVASNQWEELPKYVNADGEASEFLAAFSFEPRVEVTV

SEQ ID NO: 38723 - protein, 316 aa, Zea mays subsp. mays
  peptide (1)..(316): Ceres Seq. ID no. 12424036
ARDHYLEHPNRKTVITHRQQSTRDYYCNPHHTTSRRVECFLATFLCMSTQTKRTAPPPPRPRRSPSLRLLPRDLAASQPVSRRTWPHGGAAGKQRQEAQAHASRRPGGPPRRLARAGPRAPPAGHLLPPARRLQPLARRRGVPDLPPRLRPRPLPGPVVPHALRLRLRAPPARRLRRRRPQLEPLPRRAGGRRARGRVGRPRPLPRAGHGRAHRRQPAHGRVPRAPLAAAGRAPAAGHRHVRRRRSLPRGPLRGRPPRRPLHGGLRLLQRLVGGAPAARPQARGRLLPRRAGARRHGLLPQQVRGRRGHQHAAQRV

SEQ ID NO: 38724 - DNA, 1762 bp, Zea mays subsp. mays
  misc_feature (1)..(1762): Ceres Seq. ID no. 13493688
tagaacatcctaatcgaaaaaagcccaagaccaagtgaaacatcaacacttccacgttccacccatggctaattctcatcaccggtgcaccagcgtcgcctccgagctggaaggcacgctgctcatctccggcagcctcttcccatacttcttcctcgtcgccctcgaggccggcggccctctcagggccctgctcttgctcgccgtgtaccctcttcgcgctgctcggcgccgccttctcgtgggacgacctacccctgctcgccatgaccttcctgtccaccgccggcctcgacgtcggcgacgtgaccgcggcggcgcgggccacgctgcccaggttcttcctggccgacctgcggggcagcgcgttccgggccttgtcgcgccacgccggcggcggcgagaggtacgtcgtcacgcacctgcccaggctcgtcgcggagccgttcgtgagggagtacctcggcgccgacgtccgcgtcgtcggcacggagctgcgggtggtcgcgggtaagaggttctcaggcacggtggtggtggcctctcccggcgtcgcggcggcagcggctggcgccgaccgcagcctgggtgctctggtggccgtccttgggagcgaccgggtcgtcggcgtggggctctactgccccggcgccggcggggaccagcagccggcgtttctgcaggcttgccaggagcgccgcatggtgtccgcgccggagaaggcggcggcggtgcccctgccgaggagcgagtacccgcggccgctggtgttccacgacggccgcctcgtgcgccggcccgacccgcttgtgtgcctggccatcttgctgtggctcccgctcggcgtgctcctgtccgtgacgcgcctcctcttcggcttcctcccgcacggcgccgggctcctgctgtccgcggccacgggcttccggatgcgcggcagcctcgggggagcggcggcggcgggcccgcggcgaggcacattgttcgcgtgcaaccaccagacgctgatggacccggtgatcctcgcgacggtgctgcgccggaaggtgaccgccgtgacgtacagcctgtccagcttctcggagctgatcgcgccgatcccgaccgtccggctgacgcgcgaccgcggcagggacagccggatcatgcagcgcgagctcgcgcgcggcgacctggtggtctgcccggagggcaccacctgccgcgagccctacctgctgcgcttcagcccgctgttcgcggagatcgccgacgaggtcacgccgacggccgtgcgggccggcggcgccatgttccacggctccaccgtgcggggccacaagtggctcgactccgtcttcttcctcatgaacccggcgccgtggtacgagatccggatcctggccacctgcagtggcagtggcggcgcgtccagcctcgacgtggcgaacggcgtccagcgcatgatcggcgatgagcttgggttcgagtgcaccggggctcacgcgcagggacaagtaccggatgatcgccggccacgacggcgtcgacgcgaggtcgtcgccgtcgtcatagctgaagagcaaatgtgccagcgtacgcttgtggggactcatgcacagaaatgcaaaacgttcaactggttctccttctccatcaccgccctgctcttaaacacagacattcagtgttgcagcgactaggctccattcttcaggaaatgaccggtttagacggttttggaacaagcccaaccaaattttagtgattttttatgttcctt

SEQ ID NO: 38725 - protein, 471 aa, Zea mays subsp. mays
  peptide (1)..(471): Ceres Seq. ID no. 13493689
  misc_feature (219)..(337): Pfam Name: Pfam Description:  Acyltransferase
  misc_feature (1)..(404): NCBI GI NO: 18481713 NR Description: hypothetical protein [Sorghum bicolor]
  misc_feature (1)..(403): NCBI GI NO: 15224445 NR Description: phospholipid/glycerol acyltransferase family
  misc_feature (1)..(403): NCBI GI NO: 38000002 NR Description: unknown protein
  misc_feature (1)..(404): NCBI GI NO: 34902820 NR Description: unnamed protein product
  misc_feature (1)..(403): NCBI GI NO: 15223437 NR Description: expressed protein [Arabidopsis thaliana]
  misc_feature (1)..(403): NCBI GI NO: 15239924 NR Description: phospholipid/glycerol acyltransferase family
  misc_feature (1)..(403): NCBI GI NO: 17064780 NR Description: Unknown protein [Arabidopsis thaliana]
  misc_feature (1)..(403): NCBI GI NO: 15229747 NR Description: expressed protein [Arabidopsis thaliana]
  misc_feature (1)..(403): NCBI GI NO: 18378959 NR Description: phospholipid/glycerol acyltransferase family
  misc_feature (1)..(403): NCBI GI NO: 29788867 NR Description: hypothetical protein
MTFLSTAGLDVGDVTAAARATLPRFFLADLRGSAFRALSRHAGGGERYVVTHLPRLVAEPFVREYLGADVRVVGTELRVVAGKRFSGTVVVASPGVAAAAAGADRSLGALVAVLGSDRVVGVGLYCPGAGGDQQPAFLQACQERRMVSAPEKAAAVPLPRSEYPRPLVFHDGRLVRRPDPLVCLAILLWLPLGVLLSVTRLLFGFLPHGAGLLLSAATGFRMRGSLGGAAAAGPRRGTLFACNHQTLMDPVILATVLRRKVTAVTYSLSSFSELIAPIPTVRLTRDRGRDSRIMQRELARGDLVVCPEGTTCREPYLLRFSPLFAEIADEVTPTAVRAGGAMFHGSTVRGHKWLDSVFFLMNPAPWYEIRILATCSGSGGASSLDVANGVQRMIGDELGFECTGAHAQGQVPDDRRPRRRRREVVAVVIAEEQMCQRTLVGTHAQKCKTFNWFSFSITALLLNTDIQCCSD

SEQ ID NO: 38726 - protein, 326 aa, Zea mays subsp. mays
  peptide (1)..(326): Ceres Seq. ID no. 13493690
  misc_feature (74)..(192): Pfam Name: Pfam Description:  Acyltransferase
  misc_feature (1)..(259): NCBI GI NO: 18481713 NR Description: hypothetical protein [Sorghum bicolor]
  misc_feature (1)..(258): NCBI GI NO: 15224445 NR Description: phospholipid/glycerol acyltransferase family
  misc_feature (1)..(258): NCBI GI NO: 38000002 NR Description: unknown protein
  misc_feature (1)..(259): NCBI GI NO: 34902820 NR Description: unnamed protein product
  misc_feature (1)..(258): NCBI GI NO: 15223437 NR Description: expressed protein [Arabidopsis thaliana]
  misc_feature (1)..(258): NCBI GI NO: 15239924 NR Description: phospholipid/glycerol acyltransferase family
  misc_feature (1)..(258): NCBI GI NO: 17064780 NR Description: Unknown protein [Arabidopsis thaliana]
  misc_feature (1)..(258): NCBI GI NO: 15229747 NR Description: expressed protein [Arabidopsis thaliana]
  misc_feature (1)..(258): NCBI GI NO: 18378959 NR Description: phospholipid/glycerol acyltransferase family
  misc_feature (1)..(258): NCBI GI NO: 29788867 NR Description: hypothetical protein
MVSAPEKAAAVPLPRSEYPRPLVFHDGRLVRRPDPLVCLAILLWLPLGVLLSVTRLLFGFLPHGAGLLLSAATGFRMRGSLGGAAAAGPRRGTLFACNHQTLMDPVILATVLRRKVTAVTYSLSSFSELIAPIPTVRLTRDRGRDSRIMQRELARGDLVVCPEGTTCREPYLLRFSPLFAEIADEVTPTAVRAGGAMFHGSTVRGHKWLDSVFFLMNPAPWYEIRILATCSGSGGASSLDVANGVQRMIGDELGFECTGAHAQGQVPDDRRPRRRRREVVAVVIAEEQMCQRTLVGTHAQKCKTFNWFSFSITALLLNTDIQCCSD

SEQ ID NO: 38727 - protein, 250 aa, Zea mays subsp. mays
  peptide (1)..(250): Ceres Seq. ID no. 13493691
  misc_feature (1)..(116): Pfam Name: Pfam Description:  Acyltransferase
  misc_feature (1)..(183): NCBI GI NO: 18481713 NR Description: hypothetical protein [Sorghum bicolor]
  misc_feature (1)..(182): NCBI GI NO: 15224445 NR Description: phospholipid/glycerol acyltransferase family
  misc_feature (1)..(182): NCBI GI NO: 38000002 NR Description: unknown protein
  misc_feature (1)..(183): NCBI GI NO: 34902820 NR Description: unnamed protein product
  misc_feature (1)..(182): NCBI GI NO: 15223437 NR Description: expressed protein [Arabidopsis thaliana]
  misc_feature (1)..(182): NCBI GI NO: 15239924 NR Description: phospholipid/glycerol acyltransferase family
  misc_feature (1)..(182): NCBI GI NO: 17064780 NR Description: Unknown protein [Arabidopsis thaliana]
  misc_feature (1)..(182): NCBI GI NO: 15229747 NR Description: expressed protein [Arabidopsis thaliana]
  misc_feature (1)..(182): NCBI GI NO: 18378959 NR Description: phospholipid/glycerol acyltransferase family
  misc_feature (1)..(182): NCBI GI NO: 29788867 NR Description: hypothetical protein
MRGSLGGAAAAGPRRGTLFACNHQTLMDPVILATVLRRKVTAVTYSLSSFSELIAPIPTVRLTRDRGRDSRIMQRELARGDLVVCPEGTTCREPYLLRFSPLFAEIADEVTPTAVRAGGAMFHGSTVRGHKWLDSVFFLMNPAPWYEIRILATCSGSGGASSLDVANGVQRMIGDELGFECTGAHAQGQVPDDRRPRRRRREVVAVVIAEEQMCQRTLVGTHAQKCKTFNWFSFSITALLLNTDIQCCSD

SEQ ID NO: 38728 - DNA, 1529 bp, Zea mays subsp. mays
  misc_feature (1)..(1529): Ceres Seq. ID no. 12362523
  misc_feature (1404)..(1404): n is a, c, t, g, unknown, or other
gcacgagaccattacctagaacatcctaatcgaaaaaggagcagtgagaactgcatgcaagaggcacaaagcagcagctagcagttcattcaggttagtcatcagaggtgacatcgctctggaactggaagacaagcagcaggaagacagagagatcaatggcagcgcaaggtgctggagcatcagcttctcccctgtccggcttccacgtggcgctgctcctcctcctcactatcttggcttccatccttgcaagggcggcgtcggtgggcgtgtgctacggcacgagcggcgacaacctgccgccggcgagcgcggtggtgggcatgctgcgcgacaacggcttcacggtggtgcggctctactggcccgacggcgacgcgctggcggcgctgggcgggagcgggatccgggtggtggtgggcgcgcccaacgaggccctgccggcgctggcgtccggcgcggccgcggccgcggcgtgggtccgcgacaacgtgcaggcgcacccggcggtggcgttccgctacgtggtggtgggcaacgaggtccccctggagcaggcgccgctgctcgtgccggccatggagaacgtgcacgcggcgctggcggccgccgggctgggccacgtgaaggtcaccacggccgtctcgcagggcgccatcgccgtgcacctgcctccgtcggtgggcgagttcacggaggaggcccgctcgttcatgggctacgtggtgacgttcctggcgcggacccgcgcgccgctgctcgccaacctgtacccctacttcgtctacacgctggggctgggccacctgggcatggacttcgcgctgttcacggcgcccgggacggtggtgcaggacggggagtacgggtaccagaacctgttcgacgccacggtggacgcgctgtacgcggcggtggggaggctcggcgtcgccggcggggacggcgtcagggtggtggtgtcggagaccgggtggccgacggcgggcggcgccgcagcgtcgctggagaacgccaggacgtacaaccagaacctggtgaggcacgtgtggaagggcacgccgcggaggcccaggagggtggaggcatacgtgttcgccatgttcaacgaggacaagaaggacgccggagtggagcagaactggggcctcttctacccgaacatggagagggtttaccccatcacctttggagccggacggcgacactgacgacattatagaaggagcttggtggacgacgaccggtgcattgcatgcaatgatcgaatttgcactcgaccgatccaagaaatgaatacgtactggggtcatggtgtgtgtgttttatttgcgtgtacacagcattcaatgtacaatatatagaggaattgttgcgaccgctgagcgtttgtttgctcanacgtgtacgcggagaggggtcgatgcgtagctgggtctgggtgtacgtaaacgtcatgcgtagcagtatgcacaagcgtatgtacattccgtgactcttgtgagctatatacttgtgaatttgtg

SEQ ID NO: 38729 - protein, 351 aa, Zea mays subsp. mays
  peptide (1)..(351): Ceres Seq. ID no. 12362524
  misc_feature (37)..(345): Pfam Name: Pfam Description:  Glycosyl hydrolases family 17
  misc_feature (35)..(347): NCBI GI NO: 34906536 NR Description: similar to glucanase
  misc_feature (19)..(345): NCBI GI NO: 13249140 NR Description: glucanase [Oryza sativa]
  misc_feature (19)..(345): NCBI GI NO: 100664 NR Description: beta-glucanase - rice
  misc_feature (19)..(345): NCBI GI NO: 854361 NR Description: beta-glucanase
  misc_feature (19)..(345): NCBI GI NO: 288654 NR Description: (1-3, 1-4)-beta-glucanase [Avena sativa]
  misc_feature (18)..(345): NCBI GI NO: 100591 NR Description: licheninase (EC 3
  misc_feature (19)..(345): NCBI GI NO: 486849 NR Description: licheninase (EC 3.2.1.73) precursor - wheat
  misc_feature (20)..(345): NCBI GI NO: 228411 NR Description: beta glucanase:ISOTYPE=II
  misc_feature (28)..(345): NCBI GI NO: 100592 NR Description: licheninase (EC 3
  misc_feature (36)..(345): NCBI GI NO: 840908 NR Description: beta glucanase [Triticum aestivum]
MAAQGAGASASPLSGFHVALLLLLTILASILARAASVGVCYGTSGDNLPPASAVVGMLRDNGFTVVRLYWPDGDALAALGGSGIRVVVGAPNEALPALASGAAAAAAWVRDNVQAHPAVAFRYVVVGNEVPLEQAPLLVPAMENVHAALAAAGLGHVKVTTAVSQGAIAVHLPPSVGEFTEEARSFMGYVVTFLARTRAPLLANLYPYFVYTLGLGHLGMDFALFTAPGTVVQDGEYGYQNLFDATVDALYAAVGRLGVAGGDGVRVVVSETGWPTAGGAAASLENARTYNQNLVRHVWKGTPRRPRRVEAYVFAMFNEDKKDAGVEQNWGLFYPNMERVYPITFGAGRRH

SEQ ID NO: 38730 - protein, 295 aa, Zea mays subsp. mays
  peptide (1)..(295): Ceres Seq. ID no. 12362525
  misc_feature (1)..(289): Pfam Name: Pfam Description:  Glycosyl hydrolases family 17
  misc_feature (1)..(291): NCBI GI NO: 34906536 NR Description: similar to glucanase
  misc_feature (1)..(289): NCBI GI NO: 13249140 NR Description: glucanase [Oryza sativa]
  misc_feature (1)..(289): NCBI GI NO: 100664 NR Description: beta-glucanase - rice
  misc_feature (1)..(289): NCBI GI NO: 854361 NR Description: beta-glucanase
  misc_feature (1)..(289): NCBI GI NO: 288654 NR Description: (1-3, 1-4)-beta-glucanase [Avena sativa]
  misc_feature (1)..(289): NCBI GI NO: 100591 NR Description: licheninase (EC 3
  misc_feature (1)..(289): NCBI GI NO: 486849 NR Description: licheninase (EC 3.2.1.73) precursor - wheat
  misc_feature (1)..(289): NCBI GI NO: 228411 NR Description: beta glucanase:ISOTYPE=II
  misc_feature (1)..(289): NCBI GI NO: 100592 NR Description: licheninase (EC 3
  misc_feature (1)..(289): NCBI GI NO: 840908 NR Description: beta glucanase [Triticum aestivum]
MLRDNGFTVVRLYWPDGDALAALGGSGIRVVVGAPNEALPALASGAAAAAAWVRDNVQAHPAVAFRYVVVGNEVPLEQAPLLVPAMENVHAALAAAGLGHVKVTTAVSQGAIAVHLPPSVGEFTEEARSFMGYVVTFLARTRAPLLANLYPYFVYTLGLGHLGMDFALFTAPGTVVQDGEYGYQNLFDATVDALYAAVGRLGVAGGDGVRVVVSETGWPTAGGAAASLENARTYNQNLVRHVWKGTPRRPRRVEAYVFAMFNEDKKDAGVEQNWGLFYPNMERVYPITFGAGRRH

SEQ ID NO: 38731 - protein, 210 aa, Zea mays subsp. mays
  peptide (1)..(210): Ceres Seq. ID no. 12362526
  misc_feature (1)..(204): Pfam Name: Pfam Description:  Glycosyl hydrolases family 17
  misc_feature (1)..(206): NCBI GI NO: 34906536 NR Description: similar to glucanase
  misc_feature (1)..(204): NCBI GI NO: 13249140 NR Description: glucanase [Oryza sativa]
  misc_feature (1)..(204): NCBI GI NO: 100664 NR Description: beta-glucanase - rice
  misc_feature (1)..(204): NCBI GI NO: 854361 NR Description: beta-glucanase
  misc_feature (1)..(204): NCBI GI NO: 288654 NR Description: (1-3, 1-4)-beta-glucanase [Avena sativa]
  misc_feature (1)..(204): NCBI GI NO: 100591 NR Description: licheninase (EC 3
  misc_feature (1)..(204): NCBI GI NO: 486849 NR Description: licheninase (EC 3.2.1.73) precursor - wheat
  misc_feature (1)..(204): NCBI GI NO: 228411 NR Description: beta glucanase:ISOTYPE=II
  misc_feature (1)..(204): NCBI GI NO: 100592 NR Description: licheninase (EC 3
  misc_feature (1)..(204): NCBI GI NO: 840908 NR Description: beta glucanase [Triticum aestivum]
MENVHAALAAAGLGHVKVTTAVSQGAIAVHLPPSVGEFTEEARSFMGYVVTFLARTRAPLLANLYPYFVYTLGLGHLGMDFALFTAPGTVVQDGEYGYQNLFDATVDALYAAVGRLGVAGGDGVRVVVSETGWPTAGGAAASLENARTYNQNLVRHVWKGTPRRPRRVEAYVFAMFNEDKKDAGVEQNWGLFYPNMERVYPITFGAGRRH

SEQ ID NO: 38732 - DNA, 832 bp, Zea mays subsp. mays
  misc_feature (1)..(832): Ceres Seq. ID no. 12355032
gtgattagcaagcacgggcacggtaaagcagagagcctcttgctgttagtgaactaaggcgacggagaccgcgagggcggcgaactaggctgggcagcgatgatggcgacctcggccagcggcgtctccctcctcctcctcctcgcccatccggcgccgccaccgcaccccgccaacggcgccagcagcctgtggcgcggcggtggcgccgcgctagctcctcatcctgctcgcttcgcggccaagaggaggacgctccggttggttaacgtcagcgtcagctgcagcgccgaggcgctgcgctccgacggcgctggcgcggagccggcggtgccgcggtctgtgccggtgcgcgtcgcctacgagctgcaacaggccggccaccgctacctcgacgtcagaacggagggcgagtttagcgccggccaccctgaaggagctgtgaacatcccatacatgaacaaaaccggctcaggaatgacgaaaaacgctcactttctcgagcaagtgtcgagggctttcgggaaggacgacgagatcatcgtgggctgccaaagcggcaagaggtctctcatggcggcgaccgagctctgctccgctggcttcaccgctgtcaccgacatcgccggcggattctcgacctggagggagaacgagctgcctaccgtccagtgacggtgatttcagcctgcctcgccggcgtcgtaagtgtggttggagcttgcccagcgttttctgtccaagcctgtacatatgtcttcctgccttctgctatagttctggaataaagagtgctggggaatggaatggagcatgttgtaaagtaaagctc

SEQ ID NO: 38733 - protein, 191 aa, Zea mays subsp. mays
  peptide (1)..(191): Ceres Seq. ID no. 12355033
  misc_feature (82)..(185): Pfam Name: Pfam Description:  Rhodanese-like domain
  misc_feature (49)..(189): NCBI GI NO: 7594903 NR Description: Ntdin [Nicotiana tabacum]
  misc_feature (68)..(188): NCBI GI NO: 7488606 NR Description: senescence-associated protein din1
  misc_feature (72)..(188): NCBI GI NO: 118636 NR Description: Senescence-associated protein DIN1
  misc_feature (68)..(188): NCBI GI NO: 15233328 NR Description: senescence-associated protein sen1
  misc_feature (68)..(188): NCBI GI NO: 21537402 NR Description: senescence-associated protein sen1
  misc_feature (68)..(188): NCBI GI NO: 1046268 NR Description: senescence-associated protein
  misc_feature (77)..(188): NCBI GI NO: 7340289 NR Description: OP1 [Cucumis sativus]
  misc_feature (75)..(189): NCBI GI NO: 30698182 NR Description: senescence-associated protein
  misc_feature (75)..(185): NCBI GI NO: 2129628 NR Description: ketoconazole resistance protein
  misc_feature (69)..(188): NCBI GI NO: 18425042 NR Description: senescence-associated protein
MMATSASGVSLLLLLAHPAPPPHPANGASSLWRGGGAALAPHPARFAAKRRTLRLVNVSVSCSAEALRSDGAGAEPAVPRSVPVRVAYELQQAGHRYLDVRTEGEFSAGHPEGAVNIPYMNKTGSGMTKNAHFLEQVSRAFGKDDEIIVGCQSGKRSLMAATELCSAGFTAVTDIAGGFSTWRENELPTVQ

SEQ ID NO: 38734 - protein, 190 aa, Zea mays subsp. mays
  peptide (1)..(190): Ceres Seq. ID no. 12355034
  misc_feature (81)..(184): Pfam Name: Pfam Description:  Rhodanese-like domain
  misc_feature (48)..(188): NCBI GI NO: 7594903 NR Description: Ntdin [Nicotiana tabacum]
  misc_feature (67)..(187): NCBI GI NO: 7488606 NR Description: senescence-associated protein din1
  misc_feature (71)..(187): NCBI GI NO: 118636 NR Description: Senescence-associated protein DIN1
  misc_feature (67)..(187): NCBI GI NO: 15233328 NR Description: senescence-associated protein sen1
  misc_feature (67)..(187): NCBI GI NO: 21537402 NR Description: senescence-associated protein sen1
  misc_feature (67)..(187): NCBI GI NO: 1046268 NR Description: senescence-associated protein
  misc_feature (76)..(187): NCBI GI NO: 7340289 NR Description: OP1 [Cucumis sativus]
  misc_feature (74)..(188): NCBI GI NO: 30698182 NR Description: senescence-associated protein
  misc_feature (74)..(184): NCBI GI NO: 2129628 NR Description: ketoconazole resistance protein
  misc_feature (68)..(187): NCBI GI NO: 18425042 NR Description: senescence-associated protein
MATSASGVSLLLLLAHPAPPPHPANGASSLWRGGGAALAPHPARFAAKRRTLRLVNVSVSCSAEALRSDGAGAEPAVPRSVPVRVAYELQQAGHRYLDVRTEGEFSAGHPEGAVNIPYMNKTGSGMTKNAHFLEQVSRAFGKDDEIIVGCQSGKRSLMAATELCSAGFTAVTDIAGGFSTWRENELPTVQ

SEQ ID NO: 38735 - DNA, 1781 bp, Zea mays subsp. mays
  misc_feature (1)..(1781): Ceres Seq. ID no. 15175813
acaacactcgtttgcctctcatctcgcttcgcttccattccatcgcgccagtcgccagactcacctgggagagtggggggaaatatcaattagaaacaacgaggaattagcaaagaaagaagaataactcccataagaaaaatcgccaaatacgccattcatcttcttcgcccgggtttcagaacgtacggcagtttagccaggatggtggcgatcgagaaccagagccaggccgcggtggcggcggaggcggtggcggcgccggcgtcgcggatccccagggaggcgcggcgcctgctgcacgagctggcggcggcgtgggcggacgtggccgactgccgcgcgctggaggtcgtgccgctcaagggggccatgaccaacgaggtctaccaggcgcgctggctcactgcaggccctgccggccagaaggaggagcccagggcggagagggaggtgaggaaggtgctcgtgcggatttacggcgacggcgtcgacctcttcttcgaccgcgaggacgaggtgcgcaccttcgagtgcatgtcacgccatggccagggtccccgcctcctcggccgctttccgaacggccgcgtcgaggagttcatccacgcaaggacattgtcagctgccgaccttcgcgatcctgaaatttcagctctggtggcttccaagctgagggagttccacaaccttgacatgcctggtcccaaatctgtgctcatttgggacagacttaggaactggctcagaactgccaagagcttgtgtccacctgaagaagccaaggaatttcggttggacagtctggagaaccagattactgcattggagaacgagtgttcaggtgattaccagtggattggtttctgtcacaatgatcttcagtatggcaatatcatgattgatgaagagaccaacgtgctgaccatcattgattatgagtatgcaagcttcaacccagttgcatatgacattgctaaccatttctgtgagatggcagcagactatcattcatcaaagcctcatatactggactacagcagatatccagatgttgatgagcagaagcgttttgttaagacctacctgaacatttctggtgaggaacctgatgcggaagttgtggagaacctgctccaaagcattgagaagcacacgctcgccagccatctagtatggggcctctggggaataatttcggaccatgttaacgacattgacttcgactacaaggagtatgcgaggcagagattcgagcagtactggcacaagtctgcgatcttaacatcttgaacatgtgtataaacacccgtacgtggtctcaggaactccctgagggcctgtggctgcacacacgaaattgtgcagtgccactgacacatagataagctgtgaaagaagaaatactgacgacgacgacgaataatcccgttttgggctcgggaggttatttctccgcaactcgatgagcttcaggcttcagcttcaggaaggaaggaaggagctatggggatttggctgcccgcttatgctgtaccaatgcaattaaaagataaagatccggtccggtgttgcgtgtgctatgtttagttttggctagcaccgccgagagccgtggtcctgttgtggtgtttctagtttctgtatgcttgatgttgttagtgtgctggataatttggttttgtgcttggggagtccttagctttgggacaacgcatacattgtatactgggtagatgtataaacataaaacagctatgggaatttggttctctaccttg

SEQ ID NO: 38736 - protein, 362 aa, Zea mays subsp. mays
  peptide (1)..(362): Ceres Seq. ID no. 15175814
  misc_feature (83)..(344): Pfam Name: Pfam Description:  Choline/ethanolamine kinase
  misc_feature (1)..(362): NCBI GI NO: 33149685 NR Description: choline kinase
  misc_feature (1)..(344): NCBI GI NO: 34910612 NR Description: putative choline kinase
  misc_feature (1)..(360): NCBI GI NO: 7488654 NR Description: choline kinase (EC 2
  misc_feature (23)..(354): NCBI GI NO: 22330627 NR Description: choline kinase -related [Arabidopsis thaliana]
  misc_feature (23)..(354): NCBI GI NO: 25348157 NR Description: protein choline kinase F1O17.1
  misc_feature (27)..(362): NCBI GI NO: 7488653 NR Description: choline kinase (EC 2.7.1.32) CK2 - soybean
  misc_feature (11)..(360): NCBI GI NO: 15217543 NR Description: choline kinase -related [Arabidopsis thaliana]
  misc_feature (27)..(360): NCBI GI NO: 12311795 NR Description: choline kinase [Pisum sativum]
  misc_feature (20)..(362): NCBI GI NO: 15234032 NR Description: choline kinase GmCK2p -related protein
  misc_feature (97)..(354): NCBI GI NO: 15218502 NR Description: choline kinase (GmCK2p) -related
MVAIENQSQAAVAAEAVAAPASRIPREARRLLHELAAAWADVADCRALEVVPLKGAMTNEVYQARWLTAGPAGQKEEPRAEREVRKVLVRIYGDGVDLFFDREDEVRTFECMSRHGQGPRLLGRFPNGRVEEFIHARTLSAADLRDPEISALVASKLREFHNLDMPGPKSVLIWDRLRNWLRTAKSLCPPEEAKEFRLDSLENQITALENECSGDYQWIGFCHNDLQYGNIMIDEETNVLTIIDYEYASFNPVAYDIANHFCEMAADYHSSKPHILDYSRYPDVDEQKRFVKTYLNISGEEPDAEVVENLLQSIEKHTLASHLVWGLWGIISDHVNDIDFDYKEYARQRFEQYWHKSAILTS

SEQ ID NO: 38737 - protein, 306 aa, Zea mays subsp. mays; identical to SEQ ID NO: 30942
  peptide (1)..(306): Ceres Seq. ID no. 15175815
  misc_feature (27)..(288): Pfam Name: Pfam Description:  Choline/ethanolamine kinase
  misc_feature (1)..(306): NCBI GI NO: 33149685 NR Description: choline kinase
  misc_feature (1)..(288): NCBI GI NO: 34910612 NR Description: putative choline kinase
  misc_feature (1)..(304): NCBI GI NO: 7488654 NR Description: choline kinase (EC 2
  misc_feature (1)..(298): NCBI GI NO: 22330627 NR Description: choline kinase -related [Arabidopsis thaliana]
  misc_feature (1)..(298): NCBI GI NO: 25348157 NR Description: protein choline kinase F1O17.1
  misc_feature (1)..(306): NCBI GI NO: 7488653 NR Description: choline kinase (EC 2.7.1.32) CK2 - soybean
  misc_feature (1)..(304): NCBI GI NO: 15217543 NR Description: choline kinase -related [Arabidopsis thaliana]
  misc_feature (1)..(304): NCBI GI NO: 12311795 NR Description: choline kinase [Pisum sativum]
  misc_feature (1)..(306): NCBI GI NO: 15234032 NR Description: choline kinase GmCK2p -related protein
  misc_feature (41)..(298): NCBI GI NO: 15218502 NR Description: choline kinase (GmCK2p) -related

SEQ ID NO: 38738 - protein, 251 aa, Zea mays subsp. mays
  peptide (1)..(251): Ceres Seq. ID no. 15175816
  misc_feature (1)..(233): Pfam Name: Pfam Description:  Choline/ethanolamine kinase
  misc_feature (1)..(251): NCBI GI NO: 33149685 NR Description: choline kinase
  misc_feature (1)..(233): NCBI GI NO: 34910612 NR Description: putative choline kinase
  misc_feature (1)..(249): NCBI GI NO: 7488654 NR Description: choline kinase (EC 2
  misc_feature (1)..(243): NCBI GI NO: 22330627 NR Description: choline kinase -related [Arabidopsis thaliana]
  misc_feature (1)..(243): NCBI GI NO: 25348157 NR Description: protein choline kinase F1O17.1
  misc_feature (1)..(251): NCBI GI NO: 7488653 NR Description: choline kinase (EC 2.7.1.32) CK2 - soybean
  misc_feature (1)..(249): NCBI GI NO: 15217543 NR Description: choline kinase -related [Arabidopsis thaliana]
  misc_feature (1)..(249): NCBI GI NO: 12311795 NR Description: choline kinase [Pisum sativum]
  misc_feature (1)..(251): NCBI GI NO: 15234032 NR Description: choline kinase GmCK2p -related protein
  misc_feature (1)..(243): NCBI GI NO: 15218502 NR Description: choline kinase (GmCK2p) -related
MSRHGQGPRLLGRFPNGRVEEFIHARTLSAADLRDPEISALVASKLREFHNLDMPGPKSVLIWDRLRNWLRTAKSLCPPEEAKEFRLDSLENQITALENECSGDYQWIGFCHNDLQYGNIMIDEETNVLTIIDYEYASFNPVAYDIANHFCEMAADYHSSKPHILDYSRYPDVDEQKRFVKTYLNISGEEPDAEVVENLLQSIEKHTLASHLVWGLWGIISDHVNDIDFDYKEYARQRFEQYWHKSAILTS

SEQ ID NO: 38739 - DNA, 1649 bp, Zea mays subsp. mays
  misc_feature (1)..(1649): Ceres Seq. ID no. 15180302
tagttcatttatgatttcctgcgagcacaaagctagcgaagataccaaacaatggggagcacgagcgccacaggcaccacgtcgtcttcctcatcggctgcccacgggggcggtgccgcacacgtactgctcctgccgtacccgggcgcgcagggccatacaaacccgctgctccagttcggccgctgcctcgcctaccacggcctccgccccacgctcgtcacctcgcggtacgtgctctccaccaccccgcctcccggggagcccttcagggtggccgccatttccgatggcttcgacgacggcggggcggccgcgtgccccgacctcgacgtgtactggcgccagctcgaggccgtcggctcggagacgctggcggagctgatccgctccgaggccgccgatgggcggcctgtgcgcgtgctggtttacgacccgcacctgccgtgggcgcgacgggtggcacaggcggccgggctggcggcagcggcgttcctatcgcagccatgcgccgtcgacgtcgtctacggggaggtgtgtgcaggacggctgccactgccggtggtggacgggatagagctgtttgcacgcgggctgctgggtgtcgagctcggtcccgacgacgttccgccgttcgcagcaaagccagactggtgccctgtgttccttcgggcatcattgcggcaatttgaggggctggaggacgccgacgacgtgctcgtcaactcattccacgagatcgaacccaaggaggcagattatatggccctaacatggcatgcaaagacaataggcccaactttgccatcattttatcttgatgatgaccgtttgcccttgaacaagacttacggtttcaacctcttcaacagcagcgagtcatgtctggcttggcttgacaaacagcttccgtgttctgttgttcttgtatcctatggtactgtctctgattatgatgaagcacagttagaggagcttggcaatggattgtacaattctggcaaaccattcatttgggttgtgaggtcaaacgaagaacacaagttgtccaatgaacttcgtgacaagtgcaaggaacgtggccttattgtttcttggtgcccccagctggaagttctagcacataaagctacaggttgtttcttcacacattgcggatggaactcgacattggaagcaattgttaatggtgtgccaatggtggcaataccacactgggcagaccagccgaccatatcaaaatatatggagagcatgttgggcttgggtgtccgagtgcgcaaggatgagaaaggcttggtaacgagggacgaggtggaaaggtgcatcaaggatgtcatggatggtgatagtaaggataagtataggaagagtgccactatgtggatgcaaaaggccaaggcagctatgcagaatggagggagctcggccaagaatattacagaattcgccgcgaagtattctttaagttaatttttcaaatatttcgtaaaaaaagttaattttcaaagatataatgatagtgttataattacttcctataccttcatggattgtatgccttcctgcatgttatatttttgtctcgggattgtgcgtattacgttttgacttgatgatgtacatgctacagcagcaacctccacgtc

SEQ ID NO: 38740 - protein, 473 aa, Zea mays subsp. mays
  peptide (1)..(473): Ceres Seq. ID no. 15180303
  misc_feature (23)..(469): Pfam Name: Pfam Description:  UDP-glucoronosyl and UDP-glucosyl transferase
  misc_feature (8)..(471): NCBI GI NO: 38345012 NR Description: OSJNBa0052O21.15
  misc_feature (5)..(471): NCBI GI NO: 38345013 NR Description: OSJNBa0052O21.16
  misc_feature (12)..(470): NCBI GI NO: 38345011 NR Description: OSJNBa0052O21.14
  misc_feature (1)..(369): NCBI GI NO: 38345000 NR Description: OSJNBa0052O21.3
  misc_feature (24)..(472): NCBI GI NO: 15224372 NR Description: glycosyltransferase family [Arabidopsis thaliana]
  misc_feature (23)..(433): NCBI GI NO: 15221232 NR Description: indole-3-acetate beta-glucosyltransferase -related
  misc_feature (24)..(473): NCBI GI NO: 14192682 NR Description: cold-induced glucosyl transferase
  misc_feature (24)..(466): NCBI GI NO: 28628183 NR Description: UDP-glucosyl transferase [Fragaria x ananassa]
  misc_feature (74)..(469): NCBI GI NO: 34906162 NR Description: putative anthocyanin 5-O-glucosyltransferase
  misc_feature (106)..(469): NCBI GI NO: 27530877 NR Description: anthocyanin 5-glucosyltransferase
MGSTSATGTTSSSSSAAHGGGAAHVLLLPYPGAQGHTNPLLQFGRCLAYHGLRPTLVTSRYVLSTTPPPGEPFRVAAISDGFDDGGAAACPDLDVYWRQLEAVGSETLAELIRSEAADGRPVRVLVYDPHLPWARRVAQAAGLAAAAFLSQPCAVDVVYGEVCAGRLPLPVVDGIELFARGLLGVELGPDDVPPFAAKPDWCPVFLRASLRQFEGLEDADDVLVNSFHEIEPKEADYMALTWHAKTIGPTLPSFYLDDDRLPLNKTYGFNLFNSSESCLAWLDKQLPCSVVLVSYGTVSDYDEAQLEELGNGLYNSGKPFIWVVRSNEEHKLSNELRDKCKERGLIVSWCPQLEVLAHKATGCFFTHCGWNSTLEAIVNGVPMVAIPHWADQPTISKYMESMLGLGVRVRKDEKGLVTRDEVERCIKDVMDGDSKDKYRKSATMWMQKAKAAMQNGGSSAKNITEFAAKYSLS

SEQ ID NO: 38741 - protein, 236 aa, Zea mays subsp. mays
  peptide (1)..(236): Ceres Seq. ID no. 15180304
  misc_feature (1)..(232): Pfam Name: Pfam Description:  UDP-glucoronosyl and UDP-glucosyl transferase
  misc_feature (1)..(234): NCBI GI NO: 38345012 NR Description: OSJNBa0052O21.15
  misc_feature (1)..(234): NCBI GI NO: 38345013 NR Description: OSJNBa0052O21.16
  misc_feature (1)..(233): NCBI GI NO: 38345011 NR Description: OSJNBa0052O21.14
  misc_feature (1)..(132): NCBI GI NO: 38345000 NR Description: OSJNBa0052O21.3
  misc_feature (1)..(235): NCBI GI NO: 15224372 NR Description: glycosyltransferase family [Arabidopsis thaliana]
  misc_feature (1)..(196): NCBI GI NO: 15221232 NR Description: indole-3-acetate beta-glucosyltransferase -related
  misc_feature (1)..(236): NCBI GI NO: 14192682 NR Description: cold-induced glucosyl transferase
  misc_feature (1)..(229): NCBI GI NO: 28628183 NR Description: UDP-glucosyl transferase [Fragaria x ananassa]
  misc_feature (1)..(232): NCBI GI NO: 34906162 NR Description: putative anthocyanin 5-O-glucosyltransferase
  misc_feature (1)..(232): NCBI GI NO: 27530877 NR Description: anthocyanin 5-glucosyltransferase
MALTWHAKTIGPTLPSFYLDDDRLPLNKTYGFNLFNSSESCLAWLDKQLPCSVVLVSYGTVSDYDEAQLEELGNGLYNSGKPFIWVVRSNEEHKLSNELRDKCKERGLIVSWCPQLEVLAHKATGCFFTHCGWNSTLEAIVNGVPMVAIPHWADQPTISKYMESMLGLGVRVRKDEKGLVTRDEVERCIKDVMDGDSKDKYRKSATMWMQKAKAAMQNGGSSAKNITEFAAKYSLS

SEQ ID NO: 38742 - DNA, 733 bp, Zea mays subsp. mays; identical to SEQ ID NO: 35544
  misc_feature (1)..(733): Ceres Seq. ID no. 12551453

SEQ ID NO: 38743 - protein, 173 aa, Zea mays subsp. mays; identical to SEQ ID NO: 35545
  peptide (1)..(173): Ceres Seq. ID no. 12551454

SEQ ID NO: 38744 - protein, 161 aa, Zea mays subsp. mays; identical to SEQ ID NO: 35546
  peptide (1)..(161): Ceres Seq. ID no. 12551455
  misc_feature (2)..(161): NCBI GI NO: 34907616 NR Description: contains EST C27797(C52876)~unknown protein
  misc_feature (1)..(142): NCBI GI NO: 38345379 NR Description: OSJNBa0067K08.8
  misc_feature (4)..(156): NCBI GI NO: 15239379 NR Description: putative protein; protein id: At5g36710.1
  misc_feature (4)..(156): NCBI GI NO: 15239407 NR Description: putative protein; protein id: At5g36800.1
  misc_feature (1)..(142): NCBI GI NO: 21703131 NR Description: AT5g16250/T21H19_170 [Arabidopsis thaliana]
  misc_feature (1)..(142): NCBI GI NO: 15237310 NR Description: putative protein; protein id: At5g16250
  misc_feature (1)..(142): NCBI GI NO: 21553926 NR Description: unknown [Arabidopsis thaliana]
  misc_feature (6)..(142): NCBI GI NO: 18396262 NR Description: expressed protein; protein id: At3g02640

SEQ ID NO: 38745 - protein, 143 aa, Zea mays subsp. mays; identical to SEQ ID NO: 35547
  peptide (1)..(143): Ceres Seq. ID no. 12551456
  misc_feature (1)..(143): NCBI GI NO: 34907616 NR Description: contains EST C27797(C52876)~unknown protein
  misc_feature (1)..(124): NCBI GI NO: 38345379 NR Description: OSJNBa0067K08.8
  misc_feature (1)..(138): NCBI GI NO: 15239379 NR Description: putative protein; protein id: At5g36710.1
  misc_feature (1)..(138): NCBI GI NO: 15239407 NR Description: putative protein; protein id: At5g36800.1
  misc_feature (1)..(124): NCBI GI NO: 21703131 NR Description: AT5g16250/T21H19_170 [Arabidopsis thaliana]
  misc_feature (1)..(124): NCBI GI NO: 15237310 NR Description: putative protein; protein id: At5g16250
  misc_feature (1)..(124): NCBI GI NO: 21553926 NR Description: unknown [Arabidopsis thaliana]
  misc_feature (1)..(124): NCBI GI NO: 18396262 NR Description: expressed protein; protein id: At3g02640

SEQ ID NO: 38746 - DNA, 1835 bp, Zea mays subsp. mays
  misc_feature (1)..(1835): Ceres Seq. ID no. 12415689
gcacgagaccattacctagaacatcctaatcgaaaaaaaataatgctgcgcgcgcacgagcacgacacgagctttcttccatcaagacatggcgacgccggagctttggtggtactggtggctatgggtgacgacgatgctggccgtcgtcgtctcgaccgtcgtctgctacctgaccaaccagcaccgccgctgggggggctggggctcctcctcagggcgtcgctcggccgccgggcccgcgtcctctcccgctcatcggcaacctgctggacctgcggcgcgcgcccggcagcctccaccacacgctggcgcgcctggcccgcgcgcacggcgcccccgtcatgcgcctcgacctgggcctggtcccggccgtggtcgtctcctcccgcgacgctgcacgggaggcgttcgcggcgcacgaccgccgcatcgcggcacgccccgtcccggacagcaagcgcgcgctcggcttctgcgaccgctccatgctctcgctgcccagctcggccccgctctggcggaccctgcgcggcgtcatggccgcgcacgtcctgtcgccgcgcagcctcgcggcgtcgcgcgccgcgcgggagcgcaaggtcgccgacctgatcgggtacctccgcgcgcgggccgggaccgtggtggatcttaaagaggccgtctatggcggcgtcgccaacctcgtctcgactgccatgttctccatcgacgtcgtcgacgtgggcgccgccgagtcgtcgtcatcgtcgtcggcggcggcccacgggttgcaggagctcctggaggagctcatgcagtgcatggcccagcctaacgtctccgacttcttcccgttcctcagcgcactcgacctccaggggtgtcgtcgccgggtggccgtgcaactgggccaggtcctacaggtcttggacgacatcactgaccgccgtttggcctcctcctcctcctcctccacgtccagcaagggcggggacaggcgcggcgacttcctcgacatcctcctaggacctccagtccacgggcaagatcacgcgcgacaacgtgacgctgacgctcttcgacatcttcgcggccgggagcgacaccatggcgctgaccgtggtgtgggcgatggccgagctgctccgcaacccgggcgtgatggccaggctgcgcgcggaggtcagggacgcgctgggcggcagggacgccgtcgaggaggccgacgcggcgggcctgccgttcctgcaggccgtcgtgagggaggccatgcggctgcacccggcggcgcccgtgctgctgccgcacaaggccgtggaggacggggtacagataggcggctacgcggtgcccaggggttgcaccgtgatcttcaactcgtgggcgatcatgcgcgacccggcggcgtgggagaggcccgacgagttcctgccggagcggttcctggccagggacctggacttccgcgggaagcagctggagttcgtcccgttcggctccggccgtaggctgtgcccaggcgtgcccatggcggagcgggtggtgccgctggttctagcgtcgctggtgcacgcgttccagtggcagctgccggccggcatgtcggcggaccaggtcgacgtcagcgacaagttcaccaccaccagtgttttagccttccctcctatcaaagctgtgcctctgctctgatcaccacctagcaacccagcttgagtgtccagtcgattttggccagcaaaatcggaaaagaaatccctgcagccggctgcacacaagcaccacgcaggcttcgttcgtgacacgtatccacgcccaacaattttaaagcaatataacatcaatcttaaagc

SEQ ID NO: 38747 - protein, 382 aa, Zea mays subsp. mays
  peptide (1)..(382): Ceres Seq. ID no. 12415690
  misc_feature (1)..(229): Pfam Name: Pfam Description:  Cytochrome P450
  misc_feature (1)..(229): NCBI GI NO: 19849281 NR Description: Cyt-P450 monooxygenase [Oryza sativa]
  misc_feature (1)..(222): NCBI GI NO: 19849279 NR Description: Cyt-P450 monooxygenase [Oryza sativa]
  misc_feature (1)..(229): NCBI GI NO: 34914136 NR Description: putative Cyt-P450 monooxygenase
  misc_feature (1)..(222): NCBI GI NO: 15225512 NR Description: cytochrome p450 family; protein id: At2g45570
  misc_feature (1)..(243): NCBI GI NO: 37531412 NR Description: putative cytochrome P450
  misc_feature (1)..(243): NCBI GI NO: 37531380 NR Description: putative Cytochrome P450
  misc_feature (1)..(243): NCBI GI NO: 15225510 NR Description: cytochrome p450 family; protein id: At2g45550.1
  misc_feature (1)..(243): NCBI GI NO: 7406712 NR Description: putative ripening-related P-450 enzyme
  misc_feature (1)..(222): NCBI GI NO: 30690062 NR Description: cytochrome P450 family [Arabidopsis thaliana]
  misc_feature (1)..(243): NCBI GI NO: 15217636 NR Description: cytochrome P450 monooxygenase
MRLDLGLVPAVVVSSRDAAREAFAAHDRRIAARPVPDSKRALGFCDRSMLSLPSSAPLWRTLRGVMAAHVLSPRSLAASRAARERKVADLIGYLRARAGTVVDLKEAVYGGVANLVSTAMFSIDVVDVGAAESSSSSSAAAHGLQELLEELMQCMAQPNVSDFFPFLSALDLQGCRRRVAVQLGQVLQVLDDITDRRLASSSSSSTSSKGGDRRGDFLDILLGPPVHGQDHARQRDADALRHLRGRERHHGADRGVGDGRAAPQPGRDGQAARGGQGRAGRQGRRRGGRRGGPAVPAGRREGGHAAAPGGARAAAAQGRGGRGTDRRLRGAQGLHRDLQLVGDHARPGGVGEARRVPAGAVPGQGPGLPREAAGVRPVRLRP

SEQ ID NO: 38748 - protein, 334 aa, Zea mays subsp. mays
  peptide (1)..(334): Ceres Seq. ID no. 12415691
  misc_feature (1)..(181): Pfam Name: Pfam Description:  Cytochrome P450
  misc_feature (1)..(181): NCBI GI NO: 19849281 NR Description: Cyt-P450 monooxygenase [Oryza sativa]
  misc_feature (1)..(174): NCBI GI NO: 19849279 NR Description: Cyt-P450 monooxygenase [Oryza sativa]
  misc_feature (1)..(181): NCBI GI NO: 34914136 NR Description: putative Cyt-P450 monooxygenase
  misc_feature (1)..(174): NCBI GI NO: 15225512 NR Description: cytochrome p450 family; protein id: At2g45570
  misc_feature (1)..(195): NCBI GI NO: 37531412 NR Description: putative cytochrome P450
  misc_feature (1)..(195): NCBI GI NO: 37531380 NR Description: putative Cytochrome P450
  misc_feature (1)..(195): NCBI GI NO: 15225510 NR Description: cytochrome p450 family; protein id: At2g45550.1
  misc_feature (1)..(195): NCBI GI NO: 7406712 NR Description: putative ripening-related P-450 enzyme
  misc_feature (1)..(174): NCBI GI NO: 30690062 NR Description: cytochrome P450 family [Arabidopsis thaliana]
  misc_feature (1)..(195): NCBI GI NO: 15217636 NR Description: cytochrome P450 monooxygenase
MLSLPSSAPLWRTLRGVMAAHVLSPRSLAASRAARERKVADLIGYLRARAGTVVDLKEAVYGGVANLVSTAMFSIDVVDVGAAESSSSSSAAAHGLQELLEELMQCMAQPNVSDFFPFLSALDLQGCRRRVAVQLGQVLQVLDDITDRRLASSSSSSTSSKGGDRRGDFLDILLGPPVHGQDHARQRDADALRHLRGRERHHGADRGVGDGRAAPQPGRDGQAARGGQGRAGRQGRRRGGRRGGPAVPAGRREGGHAAAPGGARAAAAQGRGGRGTDRRLRGAQGLHRDLQLVGDHARPGGVGEARRVPAGAVPGQGPGLPREAAGVRPVRLRP

SEQ ID NO: 38749 - protein, 317 aa, Zea mays subsp. mays
  peptide (1)..(317): Ceres Seq. ID no. 12415692
  misc_feature (1)..(164): Pfam Name: Pfam Description:  Cytochrome P450
  misc_feature (1)..(164): NCBI GI NO: 19849281 NR Description: Cyt-P450 monooxygenase [Oryza sativa]
  misc_feature (1)..(157): NCBI GI NO: 19849279 NR Description: Cyt-P450 monooxygenase [Oryza sativa]
  misc_feature (1)..(164): NCBI GI NO: 34914136 NR Description: putative Cyt-P450 monooxygenase
  misc_feature (1)..(157): NCBI GI NO: 15225512 NR Description: cytochrome p450 family; protein id: At2g45570
  misc_feature (1)..(178): NCBI GI NO: 37531412 NR Description: putative cytochrome P450
  misc_feature (1)..(178): NCBI GI NO: 37531380 NR Description: putative Cytochrome P450
  misc_feature (1)..(178): NCBI GI NO: 15225510 NR Description: cytochrome p450 family; protein id: At2g45550.1
  misc_feature (1)..(178): NCBI GI NO: 7406712 NR Description: putative ripening-related P-450 enzyme
  misc_feature (1)..(157): NCBI GI NO: 30690062 NR Description: cytochrome P450 family [Arabidopsis thaliana]
  misc_feature (1)..(178): NCBI GI NO: 15217636 NR Description: cytochrome P450 monooxygenase
MAAHVLSPRSLAASRAARERKVADLIGYLRARAGTVVDLKEAVYGGVANLVSTAMFSIDVVDVGAAESSSSSSAAAHGLQELLEELMQCMAQPNVSDFFPFLSALDLQGCRRRVAVQLGQVLQVLDDITDRRLASSSSSSTSSKGGDRRGDFLDILLGPPVHGQDHARQRDADALRHLRGRERHHGADRGVGDGRAAPQPGRDGQAARGGQGRAGRQGRRRGGRRGGPAVPAGRREGGHAAAPGGARAAAAQGRGGRGTDRRLRGAQGLHRDLQLVGDHARPGGVGEARRVPAGAVPGQGPGLPREAAGVRPVRLRP

SEQ ID NO: 38750 - DNA, 1731 bp, Zea mays subsp. mays
  misc_feature (1)..(1731): Ceres Seq. ID no. 12376833
gcacgagaccattacctagaacatcctaatcaaaagcccgattccccattcgctcctcacctctctgaacgccgatccacgctagaacgcgccatgccggccgatgccgctgccgctgccgccgcgcccgcccccgcaccgcatccacctccggcgatcctggacgctcgcacgggcggccgcatcctacgccgcgcggcggggcatctcgtccacccagcctctctcccgccgctcctcctcgcggcgctcctcctcctcctcttccgctccgctctcctggctggcacgctccgtctcgcctcctttgctgaccacgacccggccctccgctcccttctcgcccgcctctcctctcccaatccgccatcgccgccgcctcccccacaccacctcccgcgacgccgctcgccgttcacctccccctcgtcctctctctccgacgatgatatcctggtcagccccctcgatcccaccgcctcaactccctcccgccgccgcaactcctcctaccaccatgtccaattcacctcctactccaccgtgcccaaaccctatacgttgccgctcccggcctccgcttcccccttcttcatcgccgtctataatgagacggcgcctccgaagcccgcctcgcggcggggcagcgagcttggcctgcttgacttgaccaggcgggacgcagcggccatcgtcaacctcctcgcgctgctgtcggtccgcacatatcttcgcgatcctcgggtacatcgccgtgcactccattgcgctgggcgcagtgtttgcgtccgtggcggggcaccacagacctgggcagcgtctagtgttcctcctcaccggtgctgccaagggcgctaagagactcacagggttcgcgttcctccggtgggccacgagggacgccgttgtgcagatgctctgcctctggttctttgccgatgtgcacgaccaggcccagctgttcaggctctttgtggtcgccaaactcatgccattctccgcgtctgttaatccgtggcttggtgcagcggttgcaggcccagagctcggtggtttctttgttgcctgggctgtttttgatgcagttgtatcggttttgttcactgtggtgccttgggtggttgtcatggaccgtgatccacggccgcctgggcgcaatgctgtgaaggaagggtgctatcttgtatctctgatggcaactgatgccacaatgctcaagtgctgggaaacagttgtttgtggcagcatggggcggctcatcatggtgacatttggtggaaaggtttttggtggatttctgcattcaattgcgcaggtctacttcatggtggtatggctgctgttctactttgcagcaaggtgtaaggaggtgaggctgggtggtcgtcaatttggactggaggatgttgcagctgctcttgatggatttaggtagtgtctagttgccgcttgccgcctggatcatacatgaagagaggtatatttcatggcccatagtgcttattgatgaaacgctgctggtcttggctaagtagaggtttttgtagttatcttgatcttctaaatcttgctgagatggtaaatgatttggatgagagagagaacttgacaatgttgtatgtacagttttgccacagagtggtaatctgcttatagttccaccacatggcatacaaagaaaggatgtttggtccccttttccatggaaggttagaagcaagatacttggtg

SEQ ID NO: 38751 - protein, 285 aa, Zea mays subsp. mays
  peptide (1)..(285): Ceres Seq. ID no. 12376834
  misc_feature (32)..(239): NCBI GI NO: 37535392 NR Description: hypothetical protein
  misc_feature (57)..(158): NCBI GI NO: 30687010 NR Description: expressed protein [Arabidopsis thaliana]
ARDHYLEHPNQKPDSPFAPHLSERRSTLERAMPADAAAAAAAPAPAPHPPPAILDARTGGRILRRAAGHLVHPASLPPLLLAALLLLLFRSALLAGTLRLASFADHDPALRSLLARLSSPNPPSPPPPPHHLPRRRSPFTSPSSSLSDDDILVSPLDPTASTPSRRRNSSYHHVQFTSYSTVPKPYTLPLPASASPFFIAVYNETAPPKPASRRGSELGLLDLTRRDAAAIVNLLALLSVRTYLRDPRVHRRALHCAGRSVCVRGGAPQTWAASSVPPHRCCQGR

SEQ ID NO: 38752 - protein, 254 aa, Zea mays subsp. mays
  peptide (1)..(254): Ceres Seq. ID no. 12376835
  misc_feature (1)..(208): NCBI GI NO: 37535392 NR Description: hypothetical protein
  misc_feature (26)..(127): NCBI GI NO: 30687010 NR Description: expressed protein [Arabidopsis thaliana]
MPADAAAAAAAPAPAPHPPPAILDARTGGRILRRAAGHLVHPASLPPLLLAALLLLLFRSALLAGTLRLASFADHDPALRSLLARLSSPNPPSPPPPPHHLPRRRSPFTSPSSSLSDDDILVSPLDPTASTPSRRRNSSYHHVQFTSYSTVPKPYTLPLPASASPFFIAVYNETAPPKPASRRGSELGLLDLTRRDAAAIVNLLALLSVRTYLRDPRVHRRALHCAGRSVCVRGGAPQTWAASSVPPHRCCQGR

SEQ ID NO: 38753 - protein, 188 aa, Zea mays subsp. mays
  peptide (1)..(188): Ceres Seq. ID no. 12376836
  misc_feature (1)..(177): Pfam Name: Pfam Description:  Formin Homology 2 Domain
  misc_feature (1)..(188): NCBI GI NO: 37535392 NR Description: hypothetical protein
  misc_feature (36)..(166): NCBI GI NO: 38345019 NR Description: OSJNBa0029H02.3
  misc_feature (26)..(178): NCBI GI NO: 38345019 NR Description: OSJNBa0029H02.3
  misc_feature (1)..(180): NCBI GI NO: 17933494 NR Description: Wiskott-Aldrich syndrome protein interactingprotein
  misc_feature (64)..(167): NCBI GI NO: 7441828 NR Description: extensin-like cell wall protein
  misc_feature (64)..(167): NCBI GI NO: 7441829 NR Description: proline-rich cell wall protein - upland cotton
  misc_feature (106)..(178): NCBI GI NO: 15145797 NR Description: basic proline-rich protein [Sus scrofa]
  misc_feature (66)..(183): NCBI GI NO: 7441829 NR Description: proline-rich cell wall protein - upland cotton
  misc_feature (53)..(167): NCBI GI NO: 13265426 NR Description: At2g14890 [Arabidopsis thaliana]
  misc_feature (53)..(167): NCBI GI NO: 15226024 NR Description: arabinogalactan-protein
MPLPLPPRPPPHRIHLRRSWTLARAAASYAARRGISSTQPLSRRSSSRRSSSSSSAPLSWLARSVSPPLLTTTRPSAPFSPASPLPIRHRRRLPHTTSRDAARRSPPPRPLSPTMISWSAPSIPPPQLPPAAATPPTTMSNSPPTPPCPNPIRCRSRPPLPPSSSPSIMRRRLRSPPRGGAASLACLT

SEQ ID NO: 38754 - DNA, 1480 bp, Zea mays subsp. mays
  misc_feature (1)..(1480): Ceres Seq. ID no. 12374638
gcacgagaccattacctagaacatcctaatcgaaaactcgagacgactcgtctccctctttcaataagttcggcagggtaggacggcttcttcctctgcgccttcaccttcgcctgcgctgccggggctcgtcgcatggtttttaaatcgggtttgtaagttttagatctttatgtcaactaccaatctgaggcggcgactccatcatggagacgttgatggaaggaaaaacgagcatgttgacatatccagtgctgattccctcaatgaacctctattagggaagtccaatgatgacaactttggatcagaggtgtatgatcctagaaaacaggatctgtgggatgatgatatgaagaaagaacaactacactggtcatttcttttctcaaacttgattacacaatgggcacaatggttagcaagcattattgtgagctcaggatctatctttggtagattatcccccttctcttcagagaaccaaataaatccagtatatcttagccctttacaggaacaaaggttggatactttaagacacagattgcaaatctcttttgatggctcccgtattgaacatcaagtgtgtattactgatgtagattggttttctaggttgacatcatctcatgaagtaaattaattaataatttatgggctttatcattattaggatgccttgaggcaactctggcgtttagcttatcccgctcgtgagattccaccactcaaatctgaattatggaaggagatgggttggcaaggcaacgatccatctactgatttcaggggtggtggactcatatcgttggagaacctcatcttttttgctaggaactaccctaattcatttcagatgcttctgaacaaagtacaagggcagagatcagattgggagtacccttttgcagttgctggtatcaacgtttcattcatgctggtccagatgttggatctgaagtcaagtgttccatcttctaagtatggaattcgtttccttgaattgcttggacgtgatgagaacgcctttgaccacctgtactgtgtggcctttcggttgcttgatgctcagtggcttgtgaaacgtgcctcctatatggaattcaatgaggtcttgaaatcaacaagaactcagctggagcgggaactggttctagatgatgtgctggaggtgaaggacctgccgtcctacactatgctggatgagtaagctaaagccgagctgttgaacttggacgctggagaattgactaagctggtctgatggctaatagttatctagcgtatgctgatgtctgatcctaaatgcttaggcggcccacatgccattttacattgccgcatattttttttcttgttgtatactgaggtcttatgaggtgtttatatatgattcctttgtaaatattgtgtttgttatatgttatccttttggacatgctggttccaaggaaataaagcaatcgatctcgtattc

SEQ ID NO: 38755 - protein, 157 aa, Zea mays subsp. mays
  peptide (1)..(157): Ceres Seq. ID no. 12374639
  misc_feature (1)..(146): NCBI GI NO: 18396599 NR Description: expressed protein; protein id: At3g03610
  misc_feature (1)..(146): NCBI GI NO: 21555509 NR Description: unknown [Arabidopsis thaliana]
  misc_feature (111)..(146): NCBI GI NO: 14140119 NR Description: putative protein [Oryza sativa]
  misc_feature (111)..(138): NCBI GI NO: 18408759 NR Description: hypothetical protein; protein id: At1g67400.1
  misc_feature (84)..(138): NCBI GI NO: 15218859 NR Description: hypothetical protein; protein id: At1g03620.1
  misc_feature (82)..(138): NCBI GI NO: 38344760 NR Description: OSJNBa0068L06.3
  misc_feature (84)..(138): NCBI GI NO: 25363286 NR Description: protein F21B7.23 [imported] - Arabidopsis thaliana
  misc_feature (146)..(157): NCBI GI NO: 38567695 NR Description: B1160F02.16
  misc_feature (140)..(157): NCBI GI NO: 21358221 NR Description: CG10068-PA [Drosophila melanogaster]
  misc_feature (84)..(138): NCBI GI NO: 7485905 NR Description: hypothetical protein F21B7
MSTTNLRRRLHHGDVDGRKNEHVDISSADSLNEPLLGKSNDDNFGSEVYDPRKQDLWDDDMKKEQLHWSFLFSNLITQWAQWLASIIVSSGSIFGRLSPFSSENQINPVYLSPLQEQRLDTLRHRLQISFDGSRIEHQVCITDVDWFSRLTSSHEVN

SEQ ID NO: 38756 - protein, 152 aa, Zea mays subsp. mays
  peptide (1)..(152): Ceres Seq. ID no. 12374640
  misc_feature (1)..(132): Pfam Name: Pfam Description:  Protein of unknown function, DUF609
  misc_feature (1)..(150): NCBI GI NO: 18396599 NR Description: expressed protein; protein id: At3g03610
  misc_feature (1)..(150): NCBI GI NO: 21555509 NR Description: unknown [Arabidopsis thaliana]
  misc_feature (1)..(150): NCBI GI NO: 6091761 NR Description: hypothetical protein [Arabidopsis thaliana]
  misc_feature (1)..(150): NCBI GI NO: 14140119 NR Description: putative protein [Oryza sativa]
  misc_feature (1)..(150): NCBI GI NO: 18408759 NR Description: hypothetical protein; protein id: At1g67400.1
  misc_feature (1)..(150): NCBI GI NO: 15218859 NR Description: hypothetical protein; protein id: At1g03620.1
  misc_feature (1)..(150): NCBI GI NO: 38344760 NR Description: OSJNBa0068L06.3
  misc_feature (1)..(152): NCBI GI NO: 18406626 NR Description: expressed protein; protein id: At2g44770
  misc_feature (1)..(152): NCBI GI NO: 15810014 NR Description: At2g44770/F16B22.26 [Arabidopsis thaliana]
  misc_feature (1)..(152): NCBI GI NO: 18411543 NR Description: putative protein; protein id: At3g60260
MGWQGNDPSTDFRGGGLISLENLIFFARNYPNSFQMLLNKVQGQRSDWEYPFAVAGINVSFMLVQMLDLKSSVPSSKYGIRFLELLGRDENAFDHLYCVAFRLLDAQWLVKRASYMEFNEVLKSTRTQLERELVLDDVLEVKDLPSYTMLDE

SEQ ID NO: 38757 - protein, 117 aa, Zea mays subsp. mays
  peptide (1)..(117): Ceres Seq. ID no. 12374641
  misc_feature (1)..(97): Pfam Name: Pfam Description:  Protein of unknown function, DUF609
  misc_feature (1)..(115): NCBI GI NO: 18396599 NR Description: expressed protein; protein id: At3g03610
  misc_feature (1)..(115): NCBI GI NO: 21555509 NR Description: unknown [Arabidopsis thaliana]
  misc_feature (1)..(115): NCBI GI NO: 6091761 NR Description: hypothetical protein [Arabidopsis thaliana]
  misc_feature (1)..(115): NCBI GI NO: 14140119 NR Description: putative protein [Oryza sativa]
  misc_feature (1)..(115): NCBI GI NO: 18408759 NR Description: hypothetical protein; protein id: At1g67400.1
  misc_feature (1)..(115): NCBI GI NO: 15218859 NR Description: hypothetical protein; protein id: At1g03620.1
  misc_feature (1)..(115): NCBI GI NO: 38344760 NR Description: OSJNBa0068L06.3
  misc_feature (1)..(117): NCBI GI NO: 18406626 NR Description: expressed protein; protein id: At2g44770
  misc_feature (1)..(117): NCBI GI NO: 15810014 NR Description: At2g44770/F16B22.26 [Arabidopsis thaliana]
  misc_feature (1)..(117): NCBI GI NO: 18411543 NR Description: putative protein; protein id: At3g60260
MLLNKVQGQRSDWEYPFAVAGINVSFMLVQMLDLKSSVPSSKYGIRFLELLGRDENAFDHLYCVAFRLLDAQWLVKRASYMEFNEVLKSTRTQLERELVLDDVLEVKDLPSYTMLDE

SEQ ID NO: 38758 - DNA, 511 bp, Zea mays subsp. mays
  misc_feature (1)..(511): Ceres Seq. ID no. 1669784
agaattttcagaagagagcagaccgccaccgaagcacacaagcagcgtcgtcagggcgtgaaggcaccaccgaatctcgggagcagcagctatggcgaggttcaacccatacgagaacaacggcggcacgtgcttggccgtcgccggcgccgactactgcgtcgtcgccgccgacacccgcctctccatcggttacagcatcctgtcccgtgaccactctaaaatctctcagctgtcagacaaatgtgttttggcctcatctgggtttcaaggtgatatcaaagctttgcagaaggctctggctgctaaggaattaatctatgaacacaataataacaagaagatgagctgcccagcaatggctcaacttctgtcaaacacactctactacaagagatttttcccatactacgctttcaatgtgttggccggactggacacccaaggtaaaggatgtgtctttacatacgatgctgttggatcttatgagaggacaggctatagtgctcag

SEQ ID NO: 38759 - protein, 70 aa, Zea mays subsp. mays
  peptide (1)..(70): Ceres Seq. ID no. 1669785
RIFRREQTATEAHKQRRQGVKAPPNLGSSSYGEVQPIREQRRHVLGRRRRRLLRRRRRHPPLHRLQHPVP

SEQ ID NO: 38760 - protein, 104 aa, Zea mays subsp. mays
  peptide (1)..(104): Ceres Seq. ID no. 1669786
NFQKRADRHRSTQAASSGREGTTESREQQLWRGSTHTRTTAARAWPSPAPTTASSPPTPASPSVTASCPVTTLKSLSCQTNVFWPHLGFKVISKLCRRLWLLRN

SEQ ID NO: 38761 - protein, 140 aa, Zea mays subsp. mays
  peptide (1)..(140): Ceres Seq. ID no. 1669787
  misc_feature (8)..(139): Pfam Name: Pfam Description:  Proteasome A-type and B-type
  misc_feature (7)..(139): NCBI GI NO: 17380182 NR Description: Proteasome subunit beta type 1
  misc_feature (2)..(139): NCBI GI NO: 17380185 NR Description: Proteasome subunit beta type 1
  misc_feature (5)..(139): NCBI GI NO: 14594933 NR Description: putative beta6 proteasome subunit
  misc_feature (2)..(139): NCBI GI NO: 600387 NR Description: proteosome subunit [Arabidopsis thaliana]
  misc_feature (2)..(139): NCBI GI NO: 15232965 NR Description: 20S proteasome beta subunit F1
  misc_feature (3)..(139): NCBI GI NO: 28829610 NR Description: similar to Petunia hybrida (Petunia)
  misc_feature (1)..(139): NCBI GI NO: 4506193 NR Description: proteasome beta 1 subunit
  misc_feature (1)..(139): NCBI GI NO: 12653473 NR Description: proteasome
  misc_feature (1)..(139): NCBI GI NO: 1165123 NR Description: component C5 of proteasome [Mus musculus]
  misc_feature (1)..(139): NCBI GI NO: 7242197 NR Description: proteasome
MARFNPYENNGGTCLAVAGADYCVVAADTRLSIGYSILSRDHSKISQLSDKCVLASSGFQGDIKALQKALAAKELIYEHNNNKKMSCPAMAQLLSNTLYYKRFFPYYAFNVLAGLDTQGKGCVFTYDAVGSYERTGYSAQ

SEQ ID NO: 38762 - DNA, 1640 bp, Zea mays subsp. mays
  misc_feature (1)..(1640): Ceres Seq. ID no. 12374684
aaaaaaaaacaatttcaaacctcgcgtcggccgccgagcccatttcaaacccggacgccccctccccaagcgcaccgaggaagcagcaaggccagcggtggtccctttcccctccactgcagtctccagagtctagagacctccaccgtccactccaaagacgagcagcgggcaaacccaagcacccgcccaatccggttcgccttccttctcaccccgcccggactctgcggagagatctggcagcggtggctatgccattgggcgacgacgcggcggcggacttcgcgctgccggacgagctcctggcggcgctgccgcgggacccctacgagcagctggatctggcgcgccgcatcaccgcgctggcggtggcggggcgggtgtccgggctggagcgggaggcggggcgcctgcgcgcggaggccgcggggaaggaccgcgagagcgccgagctccgggagcggggtggcgctgctcgacgccgcgcttcaggagaccaacgccaggctccgcgccgcgctcgaggacaatattaagctcagcaaggagcgggactcgctggcgcagacgtccaagaagctggcacgcgacctgcacaagctggagtcattcaagaggcatctgatgcagtcattgcgtgatgatagttcatcaacacaggaaacagttgacattacaacgtgtgatcagccagtagcatcaaaagcatcatccagtgcagatggtggatctgtcagcaaccctgcaacgaatatatttactgagtcattggatgtgggaagcacaaaccgagatggtgctgcagcaaggcctccgatccagaaatactctctcacaacacacatcactccccgccttaccccagaggccactcctaaagtaatgtccacttctgcttctccaaggcgaatgtctaccacaggaacacccaagttgatgtctggttctacatcaccgtcaaaaactcgaatcgaatctcacatgtcaatgacaccatggtatccatcaagcaagcaatcctcggcggcaaactcgcctccacgaggacgttcaaacccaggtcgcactcctcgaatcgatggaaaggagttctttcgtcaggccaggagtcgtctatcctacgagcaatttggagcattcttagccaacatcaaagagctcaatgcccataagcagtcacgtgaggaaactctcaagaaagctgaagagatctttggtccagacaataaagatctgtacctgtctttccaaggcctgctgaaccgtagcatggtggcataaggcttcacaggtcgcttcgcaagtccaatggagttccctcttccgcaacgctaataggatacgcaagttgttgctggctttgcagagataatgaggttgctgcattggcaacttatctagctgtggatctgaaggcccagctgcaagttttggccccgtaataatccatatcggtggaacgagcggatctctctgaacgactgagtgtgcaaaccagcagtgtcgcttctgtaaaagtggtgtgtgtacttgccgaaagcggatgacaaattcattgcctaaatcagggtgcagtctgtcatgaagcgcgtccttgtaaaaccgtgaaaaaggtaaccatgagagtaacaaactcc

SEQ ID NO: 38763 - protein, 427 aa, Zea mays subsp. mays
  peptide (1)..(427): Ceres Seq. ID no. 12374685
  misc_feature (160)..(425): NCBI GI NO: 30684901 NR Description: expressed protein [Arabidopsis thaliana]
  misc_feature (157)..(421): NCBI GI NO: 15222835 NR Description: hypothetical protein; protein id: At1g56080.1
  misc_feature (155)..(424): NCBI GI NO: 18414476 NR Description: Expressed protein; protein id: At4g15545
  misc_feature (169)..(424): NCBI GI NO: 38344261 NR Description: OSJNBa0008M17.14
  misc_feature (155)..(396): NCBI GI NO: 7485048 NR Description: hypothetical protein - Arabidopsis thaliana
  misc_feature (160)..(365): NCBI GI NO: 38344261 NR Description: OSJNBa0008M17.14
  misc_feature (158)..(347): NCBI GI NO: 34909876 NR Description: B1143G03.2
  misc_feature (169)..(372): NCBI GI NO: 34909876 NR Description: B1143G03.2
  misc_feature (345)..(423): NCBI GI NO: 23489944 NR Description: hypothetical protein [Plasmodium yoelii yoelii]
  misc_feature (345)..(423): NCBI GI NO: 23613663 NR Description: hypothetical protein, conserved
KKKQFQTSRRPPSPFQTRTPPPQAHRGSSKASGGPFPLHCSLQSLETSTVHSKDEQRANPSTRPIRFAFLLTPPGLCGEIWQRWLCHWATTRRRTSRCRTSSWRRCRGTPTSSWIWRAASPRWRWRGGCPGWSGRRGACARRPRGRTARAPSSGSGVALLDAALQETNARLRAALEDNIKLSKERDSLAQTSKKLARDLHKLESFKRHLMQSLRDDSSSTQETVDITTCDQPVASKASSSADGGSVSNPATNIFTESLDVGSTNRDGAAARPPIQKYSLTTHITPRLTPEATPKVMSTSASPRRMSTTGTPKLMSGSTSPSKTRIESHMSMTPWYPSSKQSSAANSPPRGRSNPGRTPRIDGKEFFRQARSRLSYEQFGAFLANIKELNAHKQSREETLKKAEEIFGPDNKDLYLSFQGLLNRSMVA

SEQ ID NO: 38764 - protein, 218 aa, Zea mays subsp. mays
  peptide (1)..(218): Ceres Seq. ID no. 12374686
  misc_feature (1)..(216): NCBI GI NO: 30684901 NR Description: expressed protein [Arabidopsis thaliana]
  misc_feature (1)..(212): NCBI GI NO: 15222835 NR Description: hypothetical protein; protein id: At1g56080.1
  misc_feature (1)..(215): NCBI GI NO: 18414476 NR Description: Expressed protein; protein id: At4g15545
  misc_feature (1)..(215): NCBI GI NO: 38344261 NR Description: OSJNBa0008M17.14
  misc_feature (1)..(187): NCBI GI NO: 7485048 NR Description: hypothetical protein - Arabidopsis thaliana
  misc_feature (1)..(156): NCBI GI NO: 38344261 NR Description: OSJNBa0008M17.14
  misc_feature (1)..(138): NCBI GI NO: 34909876 NR Description: B1143G03.2
  misc_feature (1)..(163): NCBI GI NO: 34909876 NR Description: B1143G03.2
  misc_feature (136)..(214): NCBI GI NO: 23489944 NR Description: hypothetical protein [Plasmodium yoelii yoelii]
  misc_feature (136)..(214): NCBI GI NO: 23613663 NR Description: hypothetical protein, conserved
MQSLRDDSSSTQETVDITTCDQPVASKASSSADGGSVSNPATNIFTESLDVGSTNRDGAAARPPIQKYSLTTHITPRLTPEATPKVMSTSASPRRMSTTGTPKLMSGSTSPSKTRIESHMSMTPWYPSSKQSSAANSPPRGRSNPGRTPRIDGKEFFRQARSRLSYEQFGAFLANIKELNAHKQSREETLKKAEEIFGPDNKDLYLSFQGLLNRSMVA

SEQ ID NO: 38765 - DNA, 1345 bp, Zea mays subsp. mays
  misc_feature (1)..(1345): Ceres Seq. ID no. 12415368
gcacgagaccattacctagaacatcctaatcgaaaaagaatccagatccagcgcccgcatctctctctctcgcgcgcgcgcgcgagcgcgatgagctgccgcgacgggcgatcgtgctagcggtaacagcgagcggtgcgcgagggcggagtgggagtgtggatccgaggggcggcaaatctggcaggcgccgcggtggggctgcgggcgcgggggagggcggggggctgggcggacggcggggagggaggggaggactgcggtaggctcaggccctggcgcaggaggctgctcgcgtccatggcgctctcgtggtcctcggccctccgcctcgccgtcgccgccgtcctgctcgtcgccgtcgtcgtcgcgctcttcactctccccatcgagaagattttgaaggactttctggtttggatcaaggagaatttgggtccatggggtcctttggtgttggccctcgcttacatccctctgacagtcttagctgttccagcatcaattcttacacttggagggggctatctatttggcttgccagtggggtttgttgctgattccattggagcagcaattggtgcgactgctgcatttctgcttggcaggacgattgggaggtcttatgttctctccaaatgcaaagattaccctaagtttcaagcagtagctattgccatccaaagatctggcttcaagatcgtgttgctactaaggcttgtacctttacttccgttcaacatgttgaactacctgttatctgtcactcctgttggtgttggagaatacatgctggcttcttggttgggaatgatgccaatcactcttgctctggtgtacgttggaacaacactaaaagatctatcagatgtgacacatgggtggagtgagatctcgactactcgacggattctgataatatctggttttgtattatctgtggtcttgattatctgcgtcacaaaaattgcaaaatcatctctggagaaggcattggctgagaatggagagctccatgtaggaacatcgcagcttccaggtgtaacctctcccttggatctgcaacaacctcttgtaatcaagattgacacatcaaatgaagaccacgagaagtaaaagtgttgtgtttacaatctcagatctaaattctttggttgttgagtcggtagactgtatatacacccatactctggtgaggcccgtaaatgggtaaaaaagacatcatccccccttccaaaaaagggaatgaagtttagtttactgataggttatagtaatacgatatgcgctttgtttcactccacgtgctaccttatctttggtgaaaatactcgcacttaactgg

SEQ ID NO: 38766 - protein, 271 aa, Zea mays subsp. mays
  peptide (1)..(271): Ceres Seq. ID no. 12415369
  misc_feature (1)..(271): NCBI GI NO: 23617115 NR Description: contains EST AU173803
  misc_feature (1)..(266): NCBI GI NO: 40823094 NR Description: At1g03260 [Arabidopsis thaliana]
  misc_feature (1)..(266): NCBI GI NO: 30678508 NR Description: expressed protein [Arabidopsis thaliana]
  misc_feature (7)..(266): NCBI GI NO: 25406732 NR Description: protein F15K9.14 [imported] - Arabidopsis thaliana
  misc_feature (1)..(263): NCBI GI NO: 30687125 NR Description: expressed protein [Arabidopsis thaliana]
  misc_feature (9)..(233): NCBI GI NO: 23042280 NR Description: hypothetical protein
  misc_feature (6)..(233): NCBI GI NO: 23128176 NR Description: hypothetical protein [Nostoc punctiforme]
  misc_feature (1)..(235): NCBI GI NO: 17229699 NR Description: hypothetical protein [Nostoc sp. PCC 7120]
  misc_feature (34)..(232): NCBI GI NO: 16331873 NR Description: hypothetical protein [Synechocystis sp. PCC 6803]
  misc_feature (1)..(232): NCBI GI NO: 23128177 NR Description: hypothetical protein [Nostoc punctiforme]
MALSWSSALRLAVAAVLLVAVVVALFTLPIEKILKDFLVWIKENLGPWGPLVLALAYIPLTVLAVPASILTLGGGYLFGLPVGFVADSIGAAIGATAAFLLGRTIGRSYVLSKCKDYPKFQAVAIAIQRSGFKIVLLLRLVPLLPFNMLNYLLSVTPVGVGEYMLASWLGMMPITLALVYVGTTLKDLSDVTHGWSEISTTRRILIISGFVLSVVLIICVTKIAKSSLEKALAENGELHVGTSQLPGVTSPLDLQQPLVIKIDTSNEDHEK

SEQ ID NO: 38767 - DNA, 992 bp, Zea mays subsp. mays
  misc_feature (1)..(992): Ceres Seq. ID no. 12358927
agtacaacgcgcgactccatacaacaatacaaacaaagctgtaacgtactgtaaaagtaagatatggaggccgccggcggcggcggcgaggttcacaaggctagcaacgacaaggaggagcatttcgtgctcgtgcacggcgccggccacggcgcctggtgctggttcaagctggcgtgcctgctccggggctccggccgccaccgcgtctcctgcgtcgacctcgccggggccgccggcagcctcgtcgacccggacgacgtccgctcgttcgacgagtacgacgcgccgctcctcgacttgatggccgccttgccggacgacggccgcaaggtggttctggtagggcatagcgcaggaggactgagcgtcacccacgcgatgcatctgttcagagacaagatcaagcaggccatcttcgtagcagcgaccatgctcccgttcgggtaccagtcggagcaagatatcaaagatggagcacctgatctatccgagttcggcgacgacgtttacgacctcaagttcagtctgggagacgaccgccctccgacgagcgtggcgctgagagaggagcaccagcgcgcgatcctgtaccagcaatgcacccacgaggactccacgctcgcatccattctgctgcgcccgtggccggcagctctgggcgccgccaggttcggcttcggccgcgccgacgacggcgccgtgaacactgtgcgtcgggtgtacgtgaagacggccaacgaccgcatgctgaagccggagcagcaggaggcgatggtccgccggtggccgccgagcgaggtggcggcgatggacaccgaccacagccccttcttctccgccccagagcgcctcttcgagctgatcatcaagtcattgtgaatctctcatctgtagtaatcgcttgtgttcttccagactccagtgcctggtgctgtcctgtatgccatgccaaccaataagttatcatttatttatcaataaattatctc

SEQ ID NO: 38768 - protein, 272 aa, Zea mays subsp. mays
  peptide (1)..(272): Ceres Seq. ID no. 12358928
  misc_feature (49)..(270): Pfam Name: Pfam Description:  alpha/beta hydrolase fold
  misc_feature (17)..(271): NCBI GI NO: 15228391 NR Description: putative alpha-hydroxynitrile lyase
  misc_feature (18)..(271): NCBI GI NO: 15237165 NR Description: polyneuridine aldehyde esterase-like
  misc_feature (20)..(272): NCBI GI NO: 15866583 NR Description: hypothetical protein [Capsella rubella]
  misc_feature (20)..(272): NCBI GI NO: 15235844 NR Description: cyanohydrin lyase like protein
  misc_feature (21)..(270): NCBI GI NO: 15218463 NR Description: polyneuridine aldehyde esterase, putative
  misc_feature (21)..(270): NCBI GI NO: 25518661 NR Description: hypothetical protein F12G12
  misc_feature (21)..(270): NCBI GI NO: 21595837 NR Description: polyneuridine aldehyde esterase, putative
  misc_feature (15)..(272): NCBI GI NO: 15230077 NR Description: alpha/beta hydrolase, putative
  misc_feature (17)..(270): NCBI GI NO: 30681236 NR Description: hydrolase family [Arabidopsis thaliana]
  misc_feature (9)..(270): NCBI GI NO: 15222699 NR Description: hypothetical protein; protein id: At1g26360.1
MEAAGGGGEVHKASNDKEEHFVLVHGAGHGAWCWFKLACLLRGSGRHRVSCVDLAGAAGSLVDPDDVRSFDEYDAPLLDLMAALPDDGRKVVLVGHSAGGLSVTHAMHLFRDKIKQAIFVAATMLPFGYQSEQDIKDGAPDLSEFGDDVYDLKFSLGDDRPPTSVALREEHQRAILYQQCTHEDSTLASILLRPWPAALGAARFGFGRADDGAVNTVRRVYVKTANDRMLKPEQQEAMVRRWPPSEVAAMDTDHSPFFSAPERLFELIIKSL

SEQ ID NO: 38769 - protein, 192 aa, Zea mays subsp. mays
  peptide (1)..(192): Ceres Seq. ID no. 12358929
  misc_feature (1)..(190): Pfam Name: Pfam Description:  alpha/beta hydrolase fold
  misc_feature (1)..(191): NCBI GI NO: 15228391 NR Description: putative alpha-hydroxynitrile lyase
  misc_feature (1)..(191): NCBI GI NO: 15237165 NR Description: polyneuridine aldehyde esterase-like
  misc_feature (1)..(192): NCBI GI NO: 15866583 NR Description: hypothetical protein [Capsella rubella]
  misc_feature (1)..(192): NCBI GI NO: 15235844 NR Description: cyanohydrin lyase like protein
  misc_feature (1)..(190): NCBI GI NO: 15218463 NR Description: polyneuridine aldehyde esterase, putative
  misc_feature (1)..(190): NCBI GI NO: 21595837 NR Description: polyneuridine aldehyde esterase, putative
  misc_feature (1)..(190): NCBI GI NO: 25518661 NR Description: hypothetical protein F12G12
  misc_feature (1)..(192): NCBI GI NO: 15230077 NR Description: alpha/beta hydrolase, putative
  misc_feature (1)..(190): NCBI GI NO: 30681236 NR Description: hydrolase family [Arabidopsis thaliana]
  misc_feature (1)..(190): NCBI GI NO: 15222699 NR Description: hypothetical protein; protein id: At1g26360.1
MAALPDDGRKVVLVGHSAGGLSVTHAMHLFRDKIKQAIFVAATMLPFGYQSEQDIKDGAPDLSEFGDDVYDLKFSLGDDRPPTSVALREEHQRAILYQQCTHEDSTLASILLRPWPAALGAARFGFGRADDGAVNTVRRVYVKTANDRMLKPEQQEAMVRRWPPSEVAAMDTDHSPFFSAPERLFELIIKSL

SEQ ID NO: 38770 - protein, 166 aa, Zea mays subsp. mays
  peptide (1)..(166): Ceres Seq. ID no. 12358930
  misc_feature (1)..(164): Pfam Name: Pfam Description:  alpha/beta hydrolase fold
  misc_feature (1)..(165): NCBI GI NO: 15228391 NR Description: putative alpha-hydroxynitrile lyase
  misc_feature (1)..(165): NCBI GI NO: 15237165 NR Description: polyneuridine aldehyde esterase-like
  misc_feature (1)..(166): NCBI GI NO: 15866583 NR Description: hypothetical protein [Capsella rubella]
  misc_feature (1)..(166): NCBI GI NO: 15235844 NR Description: cyanohydrin lyase like protein
  misc_feature (1)..(164): NCBI GI NO: 15218463 NR Description: polyneuridine aldehyde esterase, putative
  misc_feature (1)..(164): NCBI GI NO: 21595837 NR Description: polyneuridine aldehyde esterase, putative
  misc_feature (1)..(164): NCBI GI NO: 25518661 NR Description: hypothetical protein F12G12
  misc_feature (1)..(166): NCBI GI NO: 15230077 NR Description: alpha/beta hydrolase, putative
  misc_feature (1)..(164): NCBI GI NO: 30681236 NR Description: hydrolase family [Arabidopsis thaliana]
  misc_feature (1)..(164): NCBI GI NO: 15222699 NR Description: hypothetical protein; protein id: At1g26360.1
MHLFRDKIKQAIFVAATMLPFGYQSEQDIKDGAPDLSEFGDDVYDLKFSLGDDRPPTSVALREEHQRAILYQQCTHEDSTLASILLRPWPAALGAARFGFGRADDGAVNTVRRVYVKTANDRMLKPEQQEAMVRRWPPSEVAAMDTDHSPFFSAPERLFELIIKSL

SEQ ID NO: 38771 - DNA, 1492 bp, Zea mays subsp. mays
  misc_feature (1)..(1492): Ceres Seq. ID no. 12366507
atccaccagcagctagcgtagcgagcgatggccaccgaactccggtcgccgctcctcccgccgccgccgcagcgacgactaagcccgcgggcagccgcgtgggcggcgctcgccgtctcggcgacggtcctgctcctccccttcctgatcggcagcagaagcaccaccaccagcaccagcagcacgagacacccccggccccgatcctccccaccatccaaccccgtggagctgaccctcctgaccgccgccagcgacaagggcgcggtgtgcctggacgggagccccccgggctaccacctgcaggcggggtccggcgccgggtccggcagctggctcatccatctcatggggggcggctggtgcgacaccgtccgcagctgctccgaccgcaggacgacctacctcggctcgtccctcttcatgcagaaagtcatggacttcactggcattctcagcaacgacccggcacagaatcctgatttctacagctggaacagagtgttcgttaggtactgcgacggggcatcgttttcgggggattcccagcgcgaggctgggcctgggaacggcacgctcttcttcagaggcctgcgcatctgggaggcagtcctcgacgagctcatgcacaagggcctcgcgcattccaaacaggccttgctcacaggttgttccgctggtggtctggccacgctgctgcactgcgacgattttcgcgcacggtttccccctgaggttcctgtgaaatgcctctccgatgccgggttctttgttgacgcgaaggatttgtcagggcagcgctccatgcgttctgtgtacagcggagttgttcatcttcagaacgttactaaagttttgcccaaggactgcctcctcgcaaacaaggacgatcccacgcagtgtttcttcccggcggagcttgttaagagcatcagcacgcccacgttgatcgtaaactctgcttacgactcttggcaggtacggtttgtcgttgcgccagacaggtcgtctcccgacgagtcatggcgcggctgcagagacgacgttcgcagatgcaattcctcccagatccaagtcctcaatgcatttaggaagacgatggtagatgacctcgtcgaggctgccgacggcaccaacagcagctggttcatcgactcttgcttcacacattgtcagactatcttcgacagctcaggatggaactcagcggccgcgccgaggatcgggaacaagacactgacggaggtgatcggggactggtactttggtaggagcccgagcccggtggtgaggcaggttggctgcgagtatccatgcaaccccacatgcaataggcagccaccagttgccggcttctacaacaaagctcttccgccgcgtgaacaagcgaacattcttgtattgggatgaaacatacaagtaaacggatgaaacatacaagtaaatgttgggtgtgtcctctacagctggtcatcagtgaccggattgggcc

SEQ ID NO: 38772 - protein, 460 aa, Zea mays subsp. mays
  peptide (1)..(460): Ceres Seq. ID no. 12366508
  misc_feature (59)..(416): Pfam Name: Pfam Description:  Pectinacetylesterase
  misc_feature (59)..(439): NCBI GI NO: 34907550 NR Description: putative pectinacetylesterase
  misc_feature (21)..(434): NCBI GI NO: 6478931 NR Description: putative pectinacetylesterase
  misc_feature (67)..(435): NCBI GI NO: 25347293 NR Description: probable pectinacetylesterase precursor T8L23.6
  misc_feature (67)..(435): NCBI GI NO: 30696158 NR Description: pectinacetylesterase, putative
  misc_feature (67)..(435): NCBI GI NO: 21703105 NR Description: At1g57590/T8L23_6 [Arabidopsis thaliana]
  misc_feature (67)..(435): NCBI GI NO: 15226462 NR Description: pectinacetylesterase, putative
  misc_feature (44)..(435): NCBI GI NO: 28392968 NR Description: putative pectinacetylesterase
  misc_feature (2)..(434): NCBI GI NO: 22330933 NR Description: pectinacetylesterase family; protein id:At3g09410
  misc_feature (25)..(434): NCBI GI NO: 6478941 NR Description: putative pectinacetylesterase
  misc_feature (60)..(441): NCBI GI NO: 10176854 NR Description: pectinacetylesterase [Arabidopsis thaliana]
MATELRSPLLPPPPQRRLSPRAAAWAALAVSATVLLLPFLIGSRSTTTSTSSTRHPRPRSSPPSNPVELTLLTAASDKGAVCLDGSPPGYHLQAGSGAGSGSWLIHLMGGGWCDTVRSCSDRRTTYLGSSLFMQKVMDFTGILSNDPAQNPDFYSWNRVFVRYCDGASFSGDSQREAGPGNGTLFFRGLRIWEAVLDELMHKGLAHSKQALLTGCSAGGLATLLHCDDFRARFPPEVPVKCLSDAGFFVDAKDLSGQRSMRSVYSGVVHLQNVTKVLPKDCLLANKDDPTQCFFPAELVKSISTPTLIVNSAYDSWQVRFVVAPDRSSPDESWRGCRDDVRRCNSSQIQVLNAFRKTMVDDLVEAADGTNSSWFIDSCFTHCQTIFDSSGWNSAAAPRIGNKTLTEVIGDWYFGRSPSPVVRQVGCEYPCNPTCNRQPPVAGFYNKALPPREQANILVLG

SEQ ID NO: 38773 - protein, 353 aa, Zea mays subsp. mays
  peptide (1)..(353): Ceres Seq. ID no. 12366509
  misc_feature (1)..(309): Pfam Name: Pfam Description:  Pectinacetylesterase
  misc_feature (1)..(332): NCBI GI NO: 34907550 NR Description: putative pectinacetylesterase
  misc_feature (1)..(327): NCBI GI NO: 6478931 NR Description: putative pectinacetylesterase
  misc_feature (1)..(328): NCBI GI NO: 25347293 NR Description: probable pectinacetylesterase precursor T8L23.6
  misc_feature (1)..(328): NCBI GI NO: 30696158 NR Description: pectinacetylesterase, putative
  misc_feature (1)..(328): NCBI GI NO: 21703105 NR Description: At1g57590/T8L23_6 [Arabidopsis thaliana]
  misc_feature (1)..(328): NCBI GI NO: 15226462 NR Description: pectinacetylesterase, putative
  misc_feature (1)..(328): NCBI GI NO: 28392968 NR Description: putative pectinacetylesterase
  misc_feature (1)..(327): NCBI GI NO: 22330933 NR Description: pectinacetylesterase family; protein id:At3g09410
  misc_feature (1)..(327): NCBI GI NO: 6478941 NR Description: putative pectinacetylesterase
  misc_feature (1)..(334): NCBI GI NO: 10176854 NR Description: pectinacetylesterase [Arabidopsis thaliana]
MGGGWCDTVRSCSDRRTTYLGSSLFMQKVMDFTGILSNDPAQNPDFYSWNRVFVRYCDGASFSGDSQREAGPGNGTLFFRGLRIWEAVLDELMHKGLAHSKQALLTGCSAGGLATLLHCDDFRARFPPEVPVKCLSDAGFFVDAKDLSGQRSMRSVYSGVVHLQNVTKVLPKDCLLANKDDPTQCFFPAELVKSISTPTLIVNSAYDSWQVRFVVAPDRSSPDESWRGCRDDVRRCNSSQIQVLNAFRKTMVDDLVEAADGTNSSWFIDSCFTHCQTIFDSSGWNSAAAPRIGNKTLTEVIGDWYFGRSPSPVVRQVGCEYPCNPTCNRQPPVAGFYNKALPPREQANILVLG

SEQ ID NO: 38774 - protein, 328 aa, Zea mays subsp. mays
  peptide (1)..(328): Ceres Seq. ID no. 12366510
  misc_feature (1)..(284): Pfam Name: Pfam Description:  Pectinacetylesterase
  misc_feature (1)..(307): NCBI GI NO: 34907550 NR Description: putative pectinacetylesterase
  misc_feature (1)..(302): NCBI GI NO: 6478931 NR Description: putative pectinacetylesterase
  misc_feature (1)..(303): NCBI GI NO: 25347293 NR Description: probable pectinacetylesterase precursor T8L23.6
  misc_feature (1)..(303): NCBI GI NO: 30696158 NR Description: pectinacetylesterase, putative
  misc_feature (1)..(303): NCBI GI NO: 21703105 NR Description: At1g57590/T8L23_6 [Arabidopsis thaliana]
  misc_feature (1)..(303): NCBI GI NO: 15226462 NR Description: pectinacetylesterase, putative
  misc_feature (1)..(303): NCBI GI NO: 28392968 NR Description: putative pectinacetylesterase
  misc_feature (1)..(302): NCBI GI NO: 22330933 NR Description: pectinacetylesterase family; protein id:At3g09410
  misc_feature (1)..(302): NCBI GI NO: 6478941 NR Description: putative pectinacetylesterase
  misc_feature (1)..(309): NCBI GI NO: 10176854 NR Description: pectinacetylesterase [Arabidopsis thaliana]
MQKVMDFTGILSNDPAQNPDFYSWNRVFVRYCDGASFSGDSQREAGPGNGTLFFRGLRIWEAVLDELMHKGLAHSKQALLTGCSAGGLATLLHCDDFRARFPPEVPVKCLSDAGFFVDAKDLSGQRSMRSVYSGVVHLQNVTKVLPKDCLLANKDDPTQCFFPAELVKSISTPTLIVNSAYDSWQVRFVVAPDRSSPDESWRGCRDDVRRCNSSQIQVLNAFRKTMVDDLVEAADGTNSSWFIDSCFTHCQTIFDSSGWNSAAAPRIGNKTLTEVIGDWYFGRSPSPVVRQVGCEYPCNPTCNRQPPVAGFYNKALPPREQANILVLG

SEQ ID NO: 38775 - DNA, 1326 bp, Zea mays subsp. mays
  misc_feature (1)..(1326): Ceres Seq. ID no. 12424016
  misc_feature (718)..(718): n is a, c, t, g, unknown, or other
  misc_feature (715)..(715): n is a, c, t, g, unknown, or other
  misc_feature (830)..(830): n is a, c, t, g, unknown, or other
  misc_feature (972)..(972): n is a, c, t, g, unknown, or other
  misc_feature (712)..(712): n is a, c, t, g, unknown, or other
  misc_feature (969)..(969): n is a, c, t, g, unknown, or other
  misc_feature (896)..(896): n is a, c, t, g, unknown, or other
  misc_feature (498)..(498): n is a, c, t, g, unknown, or other
  misc_feature (530)..(530): n is a, c, t, g, unknown, or other
  misc_feature (499)..(499): n is a, c, t, g, unknown, or other
  misc_feature (818)..(818): n is a, c, t, g, unknown, or other
  misc_feature (490)..(490): n is a, c, t, g, unknown, or other
  misc_feature (719)..(719): n is a, c, t, g, unknown, or other
aatccaccggatccccacccacacctcgctaccccgaccgatgaaggcgtcgatcaagttccgcgacgacgagcggccgctggtgcgcgccaaggtgccgatcgtcgtgctggggctgccgttccagtcggggctcgcggcgggaagggacctgcgggagctccgcttcgacgtgtccacggcgttcgcatcgggcccggcgctccggctctcgtaccgccccaacgacccggcgctccccttcgcgctcgccgtgcgcgcggggctcggcccgctggggtccccggcacgcgcgcccttcgcgctcgccgccgagttcaacctcgtcgcccacgacccctcctcgtcgcccgccttcttcctccgcctcaagccgcggctcggcgacttctcgctctcccacacgctgcgctcccctgcggcggcgccagcgccacggaaggccggggagccgagctccgacggccggcgggaggtgaagcctctggantacatgcnnccgttcacgttcaccgggagcgggctcgcgnccgacgtggcggcggcggggaccggcagcggggtcggcacgctgctgtccggcatgcggctcacgaccaggagcgtgctcccgctgtggggccgggcgagcctgcggttcaactggggcctgcgcgtgccgccggagctgctcgccgccgacggcaagggcgcttgcgcgcccgtcagcaanatnccnntgctggtcatgagcaaggtttgcatcgagcagtccccgcgctccgtcacgggcaccaaggccggcggccgagcacctgcacccgccctggcctccacgnacgcggcgtcgnacggcgacgcggcgttctcgctggtgaggcggcagctggagtcgctgagcgtggacaacatgctgntccggcgcgccgtggaggacctccgcgcggaggtccgcagcagcaacagcagggccgcgccgcccgctgcttntgntgcggggcgtggcttgggcagggtggcggcgaccgcgccacaaatgcagacgcagacgcagccttaccacgtgacgaagccggaccaccgaccccggggcgccgcgagggaggctgcggccgcgccggacgacgtcggcgaggagctgaagaaggcgttggaggcccgcctgcgctgagcagccagccttggctgccaggccgcgtcgcgtgcgagcccggcagctcaccggcaccgctcgagtgaaggtgaagtgctagtgtcgctgttaggcgttgtaatctgttggtgtcagcagcaatttggagctgctgatttgatcgctgagaagaaggggatcggacttgtcttgcc

SEQ ID NO: 38776 - protein, 405 aa, Zea mays subsp. mays
  peptide (1)..(405): Ceres Seq. ID no. 12424017
  misc_feature (4)..(398): NCBI GI NO: 23106243 NR Description: hypothetical protein [Azotobacter vinelandii]
  misc_feature (2)..(393): NCBI GI NO: 29247944 NR Description: GLP_26_54603_52153 [Giardia lamblia ATCC 50803]
  misc_feature (2)..(303): NCBI GI NO: 73648 NR Description: immediate-early protein IE180 - suid herpesvirus 1
  misc_feature (12)..(292): NCBI GI NO: 23103741 NR Description: hypothetical protein [Azotobacter vinelandii]
  misc_feature (164)..(164): Xaa is any aa, unknown or other
  misc_feature (166)..(166): Xaa is any aa, unknown or other
  misc_feature (167)..(167): Xaa is any aa, unknown or other
  misc_feature (177)..(177): Xaa is any aa, unknown or other
  misc_feature (238)..(238): Xaa is any aa, unknown or other
  misc_feature (239)..(239): Xaa is any aa, unknown or other
  misc_feature (240)..(240): Xaa is any aa, unknown or other
  misc_feature (273)..(273): Xaa is any aa, unknown or other
  misc_feature (277)..(277): Xaa is any aa, unknown or other
  misc_feature (299)..(299): Xaa is any aa, unknown or other
  misc_feature (323)..(323): Xaa is any aa, unknown or other
  misc_feature (324)..(324): Xaa is any aa, unknown or other
NPPDPHPHLATPTDEGVDQVPRRRAAAGARQGADRRAGAAVPVGARGGKGPAGAPLRRVHGVRIGPGAPALVPPQRPGAPLRARRARGARPAGVPGTRALRARRRVQPRRPRPLLVARLLPPPQAAARRLLALPHAALPCGGASATEGRGAELRRPAGGEASGXHXXVHVHRERARXRRGGGGDRQRGRHAAVRHAAHDQERAPAVGPGEPAVQLGPARAAGAARRRRQGRLRARQQXXXAGHEQGLHRAVPALRHGHQGRRPSTCTRPGLHXRGVXRRRGVLAGEAAAGVAERGQHAXPARRGGPPRGGPQQQQQGRAARCXXCGAWLGQGGGDRATNADADAALPRDEAGPPTPGRREGGCGRAGRRRRGAEEGVGGPPALSSQPWLPGRVACEPGSSPAPLE

SEQ ID NO: 38777 - protein, 382 aa, Zea mays subsp. mays
  peptide (1)..(382): Ceres Seq. ID no. 12424018
  misc_feature (14)..(382): NCBI GI NO: 28411873 NR Description: OSJNBa0016N23.25
  misc_feature (14)..(326): NCBI GI NO: 15230911 NR Description: putative protein; protein id: At3g57990
  misc_feature (64)..(141): NCBI GI NO: 21740989 NR Description: OSJNBa0019K04.27
  misc_feature (163)..(163): Xaa is any aa, unknown or other
  misc_feature (166)..(166): Xaa is any aa, unknown or other
  misc_feature (177)..(177): Xaa is any aa, unknown or other
  misc_feature (237)..(237): Xaa is any aa, unknown or other
  misc_feature (238)..(238): Xaa is any aa, unknown or other
  misc_feature (239)..(239): Xaa is any aa, unknown or other
  misc_feature (240)..(240): Xaa is any aa, unknown or other
  misc_feature (273)..(273): Xaa is any aa, unknown or other
  misc_feature (277)..(277): Xaa is any aa, unknown or other
  misc_feature (299)..(299): Xaa is any aa, unknown or other
  misc_feature (323)..(323): Xaa is any aa, unknown or other
  misc_feature (324)..(324): Xaa is any aa, unknown or other
IHRIPTHTSLPRPMKASIKFRDDERPLVRAKVPIVVLGLPFQSGLAAGRDLRELRFDVSTAFASGPALRLSYRPNDPALPFALAVRAGLGPLGSPARAPFALAAEFNLVAHDPSSSPAFFLRLKPRLGDFSLSHTLRSPAAAPAPRKAGEPSSDGRREVKPLXYMXPFTFTGSGLAXDVAAAGTGSGVGTLLSGMRLTTRSVLPLWGRASLRFNWGLRVPPELLAADGKGACAPVSXXXXLVMSKVCIEQSPRSVTGTKAGGRAPAPALASTXAASXGDAAFSLVRRQLESLSVDNMLXRRAVEDLRAEVRSSNSRAAPPAAXXAGRGLGRVAATAPQMQTQTQPYHVTKPDHRPRGAAREAAAAPDDVGEELKKALEARLR

SEQ ID NO: 38778 - protein, 369 aa, Zea mays subsp. mays
  peptide (1)..(369): Ceres Seq. ID no. 12424019
  misc_feature (1)..(369): NCBI GI NO: 28411873 NR Description: OSJNBa0016N23.25
  misc_feature (1)..(313): NCBI GI NO: 15230911 NR Description: putative protein; protein id: At3g57990
  misc_feature (51)..(128): NCBI GI NO: 21740989 NR Description: OSJNBa0019K04.27
  misc_feature (150)..(150): Xaa is any aa, unknown or other
  misc_feature (153)..(153): Xaa is any aa, unknown or other
  misc_feature (164)..(164): Xaa is any aa, unknown or other
  misc_feature (224)..(224): Xaa is any aa, unknown or other
  misc_feature (225)..(225): Xaa is any aa, unknown or other
  misc_feature (226)..(226): Xaa is any aa, unknown or other
  misc_feature (227)..(227): Xaa is any aa, unknown or other
  misc_feature (260)..(260): Xaa is any aa, unknown or other
  misc_feature (264)..(264): Xaa is any aa, unknown or other
  misc_feature (286)..(286): Xaa is any aa, unknown or other
  misc_feature (310)..(310): Xaa is any aa, unknown or other
  misc_feature (311)..(311): Xaa is any aa, unknown or other
MKASIKFRDDERPLVRAKVPIVVLGLPFQSGLAAGRDLRELRFDVSTAFASGPALRLSYRPNDPALPFALAVRAGLGPLGSPARAPFALAAEFNLVAHDPSSSPAFFLRLKPRLGDFSLSHTLRSPAAAPAPRKAGEPSSDGRREVKPLXYMXPFTFTGSGLAXDVAAAGTGSGVGTLLSGMRLTTRSVLPLWGRASLRFNWGLRVPPELLAADGKGACAPVSXXXXLVMSKVCIEQSPRSVTGTKAGGRAPAPALASTXAASXGDAAFSLVRRQLESLSVDNMLXRRAVEDLRAEVRSSNSRAAPPAAXXAGRGLGRVAATAPQMQTQTQPYHVTKPDHRPRGAAREAAAAPDDVGEELKKALEARLR

SEQ ID NO: 38779 - DNA, 1789 bp, Zea mays subsp. mays
  misc_feature (1)..(1789): Ceres Seq. ID no. 13586275
  misc_feature (914)..(914): n is a, c, t, g, unknown, or other
  misc_feature (1188)..(1188): n is a, c, t, g, unknown, or other
  misc_feature (608)..(608): n is a, c, t, g, unknown, or other
taaagggaacaaaagctggagctccaccgcggtggcggccgctctagaactagtggatcccccgggctgcaggaattcgcacgagaccattacctagaacatcctaatcgaaaaaagacaccaaacacccatgcacacgcaacctatcaagatgaaaagaggcctcctggtactttggtccttgttctacttcagtgttgcaaacgctgacactagaaaccaggccaagcagcctcttgagttcaatcaattgagagtatcaaggaaatatgttcaaggaaaacaagattcaactcccaagaacggaaccagtccatcagtgcatagaggctcaacaagcaatcaacgggagcaggataagatcatatgtatgcctgggcaaacaggggtagcagagtttgaccaatatgcaggatatgtgactgtggatgccaaggctggaagggctttgttctactactttgttgaggctcctcaagatccttcaaacaaacctcttgtcctatggctgaatggagggcctggctgttcatcctttggatctggggccatggttgaacttggacctttctctgttcatagtgacaacaagacactgtacaagaaanggcatgcatggaacagaatggccaacatgttgttcattgagatcccagctggtgttggatactcatattcaaacactacatcagattactataacactggtgaccaaagaacaacagatgatgcatatacctttcttattacttggctagagaaatttcctgaatatcaggaccgtgatttcttcataactggtgagagctatgcaggtcactatataccagaacttgcaaatctgattctctctaagaatagagccaccaatgtaactagtatcaagcttaaaggtgttgcgattggaaatgcanacttggatgataatttgactctaagagcatcatatgactactattggatgcatgctatgatttcgggaaaagcttataaagccgtcaaggataagtgcggctttaacgggacatacactgaagactgccaaaatgccatggacttagccacccaagaaaaaggaaatattgatgactatgacatctatgcaccaatatgccaagatgcctcaaacccttctaaatcaagtgactcgttagtgtttggtgatccatgcacaaaccactacgtctnctcttacctaaatcgtcctgaggtccaaagggcactccatgcaaacacaacagggttaggctacccatggatggactgtagtcagcagatatttgataattggaaagattcaccagagacaatgctgccatcaatcaagaaactcatttcaagtggcacgagaatatggctgtacagtggtgatatggatgcagtgtgctcattcatttcaacacaatatgtgctggacaatcttgggcttcctatagaagcagcttggcgtccatggcacgtcgacaatgaggttgctggctacgtcattgggtataaagggctggtcttcgcgacggtcagaggagctgtgcacatggtgccatactaccagcctcgcagggcattggcattattctcgtcattcctcgaaggggagctccctccacgctgatcgattaagctagcagggtttgtgaatgccatttactcattttccacagcctatggaatcataggcggtacatgaggcctagtgtttttactatacttgtagctggcctttattttttatataaatatataaaacaaaccaagcagggagctgacgattatattaataaaaaatgag

SEQ ID NO: 38780 - protein, 493 aa, Zea mays subsp. mays
  peptide (1)..(493): Ceres Seq. ID no. 13586276
  misc_feature (82)..(487): Pfam Name: Pfam Description:  Serine carboxypeptidase
  misc_feature (8)..(491): NCBI GI NO: 34329345 NR Description: putative serine carboxypeptidase
  misc_feature (60)..(491): NCBI GI NO: 13877871 NR Description: putative serine carboxypeptidase II
  misc_feature (60)..(491): NCBI GI NO: 15234795 NR Description: serine carboxypeptidase -related
  misc_feature (67)..(493): NCBI GI NO: 34895992 NR Description: putative carboxypeptidase D
  misc_feature (51)..(492): NCBI GI NO: 1706082 NR Description: Serine carboxypeptidase II-3 precursor (CP-MII.3)
  misc_feature (62)..(491): NCBI GI NO: 15229439 NR Description: serine carboxypeptidase, putative
  misc_feature (18)..(492): NCBI GI NO: 34899032 NR Description: putative serine carboxypeptidase II-3 precursor
  misc_feature (64)..(491): NCBI GI NO: 15227493 NR Description: serine carboxypeptidase -related
  misc_feature (68)..(493): NCBI GI NO: 11967861 NR Description: putative serine carboxypeptidase [Pisum sativum]
  misc_feature (60)..(492): NCBI GI NO: 15231911 NR Description: serine carboxypeptidase -related
  misc_feature (160)..(160): Xaa is any aa, unknown or other
  misc_feature (262)..(262): Xaa is any aa, unknown or other
  misc_feature (353)..(353): Xaa is any aa, unknown or other
MHTQPIKMKRGLLVLWSLFYFSVANADTRNQAKQPLEFNQLRVSRKYVQGKQDSTPKNGTSPSVHRGSTSNQREQDKIICMPGQTGVAEFDQYAGYVTVDAKAGRALFYYFVEAPQDPSNKPLVLWLNGGPGCSSFGSGAMVELGPFSVHSDNKTLYKKXHAWNRMANMLFIEIPAGVGYSYSNTTSDYYNTGDQRTTDDAYTFLITWLEKFPEYQDRDFFITGESYAGHYIPELANLILSKNRATNVTSIKLKGVAIGNAXLDDNLTLRASYDYYWMHAMISGKAYKAVKDKCGFNGTYTEDCQNAMDLATQEKGNIDDYDIYAPICQDASNPSKSSDSLVFGDPCTNHYVXSYLNRPEVQRALHANTTGLGYPWMDCSQQIFDNWKDSPETMLPSIKKLISSGTRIWLYSGDMDAVCSFISTQYVLDNLGLPIEAAWRPWHVDNEVAGYVIGYKGLVFATVRGAVHMVPYYQPRRALALFSSFLEGELPPR

SEQ ID NO: 38781 - protein, 486 aa, Zea mays subsp. mays
  peptide (1)..(486): Ceres Seq. ID no. 13586277
  misc_feature (75)..(480): Pfam Name: Pfam Description:  Serine carboxypeptidase
  misc_feature (1)..(484): NCBI GI NO: 34329345 NR Description: putative serine carboxypeptidase
  misc_feature (53)..(484): NCBI GI NO: 13877871 NR Description: putative serine carboxypeptidase II
  misc_feature (53)..(484): NCBI GI NO: 15234795 NR Description: serine carboxypeptidase -related
  misc_feature (60)..(486): NCBI GI NO: 34895992 NR Description: putative carboxypeptidase D
  misc_feature (44)..(485): NCBI GI NO: 1706082 NR Description: Serine carboxypeptidase II-3 precursor (CP-MII.3)
  misc_feature (55)..(484): NCBI GI NO: 15229439 NR Description: serine carboxypeptidase, putative
  misc_feature (11)..(485): NCBI GI NO: 34899032 NR Description: putative serine carboxypeptidase II-3 precursor
  misc_feature (57)..(484): NCBI GI NO: 15227493 NR Description: serine carboxypeptidase -related
  misc_feature (61)..(486): NCBI GI NO: 11967861 NR Description: putative serine carboxypeptidase [Pisum sativum]
  misc_feature (53)..(485): NCBI GI NO: 15231911 NR Description: serine carboxypeptidase -related
  misc_feature (153)..(153): Xaa is any aa, unknown or other
  misc_feature (255)..(255): Xaa is any aa, unknown or other
  misc_feature (346)..(346): Xaa is any aa, unknown or other
MKRGLLVLWSLFYFSVANADTRNQAKQPLEFNQLRVSRKYVQGKQDSTPKNGTSPSVHRGSTSNQREQDKIICMPGQTGVAEFDQYAGYVTVDAKAGRALFYYFVEAPQDPSNKPLVLWLNGGPGCSSFGSGAMVELGPFSVHSDNKTLYKKXHAWNRMANMLFIEIPAGVGYSYSNTTSDYYNTGDQRTTDDAYTFLITWLEKFPEYQDRDFFITGESYAGHYIPELANLILSKNRATNVTSIKLKGVAIGNAXLDDNLTLRASYDYYWMHAMISGKAYKAVKDKCGFNGTYTEDCQNAMDLATQEKGNIDDYDIYAPICQDASNPSKSSDSLVFGDPCTNHYVXSYLNRPEVQRALHANTTGLGYPWMDCSQQIFDNWKDSPETMLPSIKKLISSGTRIWLYSGDMDAVCSFISTQYVLDNLGLPIEAAWRPWHVDNEVAGYVIGYKGLVFATVRGAVHMVPYYQPRRALALFSSFLEGELPPR

SEQ ID NO: 38782 - protein, 413 aa, Zea mays subsp. mays
  peptide (1)..(413): Ceres Seq. ID no. 13586278
  misc_feature (2)..(407): Pfam Name: Pfam Description:  Serine carboxypeptidase
  misc_feature (1)..(411): NCBI GI NO: 34329345 NR Description: putative serine carboxypeptidase
  misc_feature (1)..(411): NCBI GI NO: 13877871 NR Description: putative serine carboxypeptidase II
  misc_feature (1)..(411): NCBI GI NO: 15234795 NR Description: serine carboxypeptidase -related
  misc_feature (1)..(413): NCBI GI NO: 34895992 NR Description: putative carboxypeptidase D
  misc_feature (1)..(412): NCBI GI NO: 1706082 NR Description: Serine carboxypeptidase II-3 precursor (CP-MII.3)
  misc_feature (1)..(411): NCBI GI NO: 15229439 NR Description: serine carboxypeptidase, putative
  misc_feature (1)..(412): NCBI GI NO: 34899032 NR Description: putative serine carboxypeptidase II-3 precursor
  misc_feature (1)..(411): NCBI GI NO: 15227493 NR Description: serine carboxypeptidase -related
  misc_feature (1)..(413): NCBI GI NO: 11967861 NR Description: putative serine carboxypeptidase [Pisum sativum]
  misc_feature (1)..(412): NCBI GI NO: 15231911 NR Description: serine carboxypeptidase -related
  misc_feature (80)..(80): Xaa is any aa, unknown or other
  misc_feature (182)..(182): Xaa is any aa, unknown or other
  misc_feature (273)..(273): Xaa is any aa, unknown or other
MPGQTGVAEFDQYAGYVTVDAKAGRALFYYFVEAPQDPSNKPLVLWLNGGPGCSSFGSGAMVELGPFSVHSDNKTLYKKXHAWNRMANMLFIEIPAGVGYSYSNTTSDYYNTGDQRTTDDAYTFLITWLEKFPEYQDRDFFITGESYAGHYIPELANLILSKNRATNVTSIKLKGVAIGNAXLDDNLTLRASYDYYWMHAMISGKAYKAVKDKCGFNGTYTEDCQNAMDLATQEKGNIDDYDIYAPICQDASNPSKSSDSLVFGDPCTNHYVXSYLNRPEVQRALHANTTGLGYPWMDCSQQIFDNWKDSPETMLPSIKKLISSGTRIWLYSGDMDAVCSFISTQYVLDNLGLPIEAAWRPWHVDNEVAGYVIGYKGLVFATVRGAVHMVPYYQPRRALALFSSFLEGELPPR

SEQ ID NO: 38783 - DNA, 1125 bp, Zea mays subsp. mays
  misc_feature (1)..(1125): Ceres Seq. ID no. 12368184
  misc_feature (643)..(643): n is a, c, t, g, unknown, or other
  misc_feature (623)..(623): n is a, c, t, g, unknown, or other
  misc_feature (611)..(611): n is a, c, t, g, unknown, or other
cacatagaccaccacgacacccttccccacaccagcagtcgagctgagcacgacacaaagccggctggggccgcctcgccatggcgatccggatgagcaacaacgtgatcggcgcgctgaacctggtgacactcctgctctcggtccccatcctcgtctcgggaatctggctgcggtcgcgcgccgacggcaccgagtgcgaccacctcctgtccaccccggccatcgcgctgggcgcggtgctcatggccgtcgctgtcgcgggtctcgccggcgcctgcttccgcgccacctggctgctatggctctacctcctcgccatgctcgtgttcatcgtcgcgctgctctgcttcaccgtcttcgccttcgccgtcaccaacaggggcgccggggaggccgtgtcgggggtaggctacagggagtaccgcctcggggactactccacctggctgcggcgccacgtcgaaagccgcaaggactgggcccggatccggagctgcctcgccgacgcgcacgtctgcaggcgcctggaggagagggagagggagagcaaggacgcggcgggtctggttcggctcggcctgtccccggtcgagtccgggtgctgcaanccgcccacgagntgcaacttcacgtacaccgncggcacggagtggaccaggacagcggcgggctccgcgcccgccggccgggactgcagcgcgtggggcaacgacgaggacgacctctgctacgggtgccagtcgtgcaaggccggcgtggtggacgcgctcaagcgggactggaagcgggccgccatcgtcaacgtcgtcatcctctccttcatcgtcgtcgtttactccgtcggctgctgcgccttcaagaacagccgccgggacaactacgcctaccacagcggccgcggatggaaacgaggcggtgacgcttaaatgcttaatcaaacttttccttatcatctgcgttagtgcaatttaccattatcttgtatattagcctgagttcgtgatctgctttagttcagtttaccattagcttgtatattattagcctcagtttgtatcacttagttgtttggcagcatattagcagaatttcgggcagtatatgagcagaatttcgctgccc

SEQ ID NO: 38784 - protein, 282 aa, Zea mays subsp. mays
  peptide (1)..(282): Ceres Seq. ID no. 12368185
  misc_feature (5)..(249): Pfam Name: Pfam Description:  Tetraspanin family
  misc_feature (1)..(279): NCBI GI NO: 29367553 NR Description: senescence-associated protein-like protein
  misc_feature (4)..(277): NCBI GI NO: 3551954 NR Description: senescence-associated protein 5
  misc_feature (4)..(277): NCBI GI NO: 20197174 NR Description: hypothetical protein [Arabidopsis thaliana]
  misc_feature (3)..(268): NCBI GI NO: 15234374 NR Description: senescence-associated protein -like
  misc_feature (3)..(273): NCBI GI NO: 15234743 NR Description: senescence-associated protein homolog
  misc_feature (3)..(273): NCBI GI NO: 21537169 NR Description: senescence-associated protein-like protein
  misc_feature (3)..(267): NCBI GI NO: 15231187 NR Description: putative protein; protein id: At3g45600
  misc_feature (3)..(265): NCBI GI NO: 15238641 NR Description: senescence-associated protein - like
  misc_feature (5)..(267): NCBI GI NO: 17979386 NR Description: putative senescence-associated protein 5
  misc_feature (5)..(267): NCBI GI NO: 15237490 NR Description: senescence-associated protein 5-like protein
  misc_feature (177)..(177): Xaa is any aa, unknown or other
  misc_feature (181)..(181): Xaa is any aa, unknown or other
  misc_feature (188)..(188): Xaa is any aa, unknown or other
MAIRMSNNVIGALNLVTLLLSVPILVSGIWLRSRADGTECDHLLSTPAIALGAVLMAVAVAGLAGACFRATWLLWLYLLAMLVFIVALLCFTVFAFAVTNRGAGEAVSGVGYREYRLGDYSTWLRRHVESRKDWARIRSCLADAHVCRRLEERERESKDAAGLVRLGLSPVESGCCXPPTXCNFTYTXGTEWTRTAAGSAPAGRDCSAWGNDEDDLCYGCQSCKAGVVDALKRDWKRAAIVNVVILSFIVVVYSVGCCAFKNSRRDNYAYHSGRGWKRGGDA

SEQ ID NO: 38785 - protein, 278 aa, Zea mays subsp. mays
  peptide (1)..(278): Ceres Seq. ID no. 12368186
  misc_feature (1)..(245): Pfam Name: Pfam Description:  Tetraspanin family
  misc_feature (1)..(275): NCBI GI NO: 29367553 NR Description: senescence-associated protein-like protein
  misc_feature (1)..(273): NCBI GI NO: 3551954 NR Description: senescence-associated protein 5
  misc_feature (1)..(273): NCBI GI NO: 20197174 NR Description: hypothetical protein [Arabidopsis thaliana]
  misc_feature (1)..(264): NCBI GI NO: 15234374 NR Description: senescence-associated protein -like
  misc_feature (1)..(269): NCBI GI NO: 15234743 NR Description: senescence-associated protein homolog
  misc_feature (1)..(269): NCBI GI NO: 21537169 NR Description: senescence-associated protein-like protein
  misc_feature (1)..(263): NCBI GI NO: 15231187 NR Description: putative protein; protein id: At3g45600
  misc_feature (1)..(261): NCBI GI NO: 15238641 NR Description: senescence-associated protein - like
  misc_feature (1)..(263): NCBI GI NO: 17979386 NR Description: putative senescence-associated protein 5
  misc_feature (1)..(263): NCBI GI NO: 15237490 NR Description: senescence-associated protein 5-like protein
  misc_feature (173)..(173): Xaa is any aa, unknown or other
  misc_feature (177)..(177): Xaa is any aa, unknown or other
  misc_feature (184)..(184): Xaa is any aa, unknown or other
MSNNVIGALNLVTLLLSVPILVSGIWLRSRADGTECDHLLSTPAIALGAVLMAVAVAGLAGACFRATWLLWLYLLAMLVFIVALLCFTVFAFAVTNRGAGEAVSGVGYREYRLGDYSTWLRRHVESRKDWARIRSCLADAHVCRRLEERERESKDAAGLVRLGLSPVESGCCXPPTXCNFTYTXGTEWTRTAAGSAPAGRDCSAWGNDEDDLCYGCQSCKAGVVDALKRDWKRAAIVNVVILSFIVVVYSVGCCAFKNSRRDNYAYHSGRGWKRGGDA

SEQ ID NO: 38786 - protein, 227 aa, Zea mays subsp. mays
  peptide (1)..(227): Ceres Seq. ID no. 12368187
  misc_feature (1)..(194): Pfam Name: Pfam Description:  Tetraspanin family
  misc_feature (1)..(224): NCBI GI NO: 29367553 NR Description: senescence-associated protein-like protein
  misc_feature (1)..(222): NCBI GI NO: 3551954 NR Description: senescence-associated protein 5
  misc_feature (1)..(222): NCBI GI NO: 20197174 NR Description: hypothetical protein [Arabidopsis thaliana]
  misc_feature (1)..(213): NCBI GI NO: 15234374 NR Description: senescence-associated protein -like
  misc_feature (1)..(218): NCBI GI NO: 15234743 NR Description: senescence-associated protein homolog
  misc_feature (1)..(218): NCBI GI NO: 21537169 NR Description: senescence-associated protein-like protein
  misc_feature (1)..(212): NCBI GI NO: 15231187 NR Description: putative protein; protein id: At3g45600
  misc_feature (1)..(210): NCBI GI NO: 15238641 NR Description: senescence-associated protein - like
  misc_feature (1)..(212): NCBI GI NO: 17979386 NR Description: putative senescence-associated protein 5
  misc_feature (1)..(212): NCBI GI NO: 15237490 NR Description: senescence-associated protein 5-like protein
  misc_feature (122)..(122): Xaa is any aa, unknown or other
  misc_feature (126)..(126): Xaa is any aa, unknown or other
  misc_feature (133)..(133): Xaa is any aa, unknown or other
MAVAVAGLAGACFRATWLLWLYLLAMLVFIVALLCFTVFAFAVTNRGAGEAVSGVGYREYRLGDYSTWLRRHVESRKDWARIRSCLADAHVCRRLEERERESKDAAGLVRLGLSPVESGCCXPPTXCNFTYTXGTEWTRTAAGSAPAGRDCSAWGNDEDDLCYGCQSCKAGVVDALKRDWKRAAIVNVVILSFIVVVYSVGCCAFKNSRRDNYAYHSGRGWKRGGDA

SEQ ID NO: 38787 - DNA, 1112 bp, Zea mays subsp. mays
  misc_feature (1)..(1112): Ceres Seq. ID no. 12387373
aaccgctcgccgcgtgctccctttgtgactaaaccgcatcctccccgcgccgacctgctccggcgagttaaacatggccgtcctcctccgcggcacctccgccgccgcctcgactgctggcccctcctcggcgctgctcgccaccaccttccgccgctcccgcggctgccttctgccccgtgccgcgccgcagcgccgcttgtatgtggcccgcgcctcggcccagccccttgaggtctgcgctaaggagtccatcaccatccctggccgcctcggagactgtcctttcacacagagggttttgttgactatagaggagaagcatctgccttatgatctgaagctagttgatctagctaataagccagattggttatttgaaatcaacccagaaggtaaagtgcctatcgtgaagctcgaggaaaaatggatcggtgattctgatgttataacacaagcattagaggagaaataccctgaaccacccttggcaactccaccagaaaaagcttcagttggatcaaaaatattttccactttcattggtttcctcaaaagcaaagatccaagcgatggaacagaagaggcactacttaatgagcttacttcatttgatagttatctaaaagacaatggtccatttattaatggtggaataatttctgctgctgatctctctctgggtcctaaactatatcacatggagataactctgggccactacaagaattggtctgttccagattcactttcttatgtaaaaacatatatgaagtcgattttctcaatggattcttttgtcaaaactcaagctctgacagaggatgtaattgctggatggcgcccaaaagtcatgggttaaattcatttctaaagttagacgttaaggagagggagagaggtgtcgattggcgaatggagggtctagatgcaaaggtttgtcgcatggctgtaatatgtacatgaattgtggtggattttgttaggaattttctagggcatagcatatctggtattcatatccaatctcctttgctttgtatgtcaaatggaaaacatctatacaattgtaaaacatatattttatgtaaatgagcattctcgttgaactt

SEQ ID NO: 38788 - protein, 262 aa, Zea mays subsp. mays
  peptide (1)..(262): Ceres Seq. ID no. 12387374
  misc_feature (170)..(240): Pfam Name: Pfam Description:  Glutathione S-transferase, C-terminal domain
  misc_feature (12)..(262): NCBI GI NO: 10952514 NR Description: dehydroascorbate reductase [Arabidopsis thaliana]
  misc_feature (12)..(262): NCBI GI NO: 18418055 NR Description: dehydroascorbate reductase, putative
  misc_feature (13)..(262): NCBI GI NO: 22653413 NR Description: dehydroascorbate reductase [Brassica juncea]
  misc_feature (12)..(262): NCBI GI NO: 17473687 NR Description: unknown protein [Arabidopsis thaliana]
  misc_feature (45)..(262): NCBI GI NO: 22653415 NR Description: dehydroascorbate reductase [Brassica juncea]
  misc_feature (40)..(256): NCBI GI NO: 10952512 NR Description: dehydroascorbate reductase [Spinacia oleracea]
  misc_feature (12)..(236): NCBI GI NO: 11271417 NR Description: valine-tRNA ligase-like protein
  misc_feature (53)..(260): NCBI GI NO: 28192427 NR Description: dehydroascorbate reductase [Nicotiana tabacum]
  misc_feature (54)..(260): NCBI GI NO: 28192421 NR Description: dehydroascorbate reductase [Triticum aestivum]
  misc_feature (53)..(260): NCBI GI NO: 28192425 NR Description: dehydroascorbate reductase [Oryza sativa]
MAVLLRGTSAAASTAGPSSALLATTFRRSRGCLLPRAAPQRRLYVARASAQPLEVCAKESITIPGRLGDCPFTQRVLLTIEEKHLPYDLKLVDLANKPDWLFEINPEGKVPIVKLEEKWIGDSDVITQALEEKYPEPPLATPPEKASVGSKIFSTFIGFLKSKDPSDGTEEALLNELTSFDSYLKDNGPFINGGIISAADLSLGPKLYHMEITLGHYKNWSVPDSLSYVKTYMKSIFSMDSFVKTQALTEDVIAGWRPKVMG

SEQ ID NO: 38789 - DNA, 1393 bp, Zea mays subsp. mays
  misc_feature (1)..(1393): Ceres Seq. ID no. 12360042
ccaggacaaacaccgcgcacgcaccgccttctccactacttacccgaatcctaacgctattccactgcattctgctccgaaatggccctcgccaccaacgccgccgccgcagccgccatctccggagggtccgcctcacagccccgccgcgcgtcgccgtcgctgctcctgctcaggcgccgctgcgccgtcggcgccgtacacgccgcggagccgtcgaagaaccccggcgtcgtcccggccgccgcgaaggcctcgacgccgacggtcgtgcccgagaacgacaccgtcccggccccgtcccttggcccgaacgcgtcgttgcgcgcgaggtgggcggtggacagctggaggacgaagaaggccctgcagcagccagaatacccgaaccagacagagctcgaggaggcggtcaacacgatcgagaagtctccgccgatcgtctttgccggggaggcgcgtcacctggaggagcgcctcgccgacgccgccgtcggccgcgcattcctcctccagggcggcgactgcgccgaaagttttaaagagttcctgagggggatcgccaacccccttggcatcaaggtgagcgacaagatggagcccggcgagctggtgaagctgatcgacatactgaacccgacgaacaagcccgggaggatcaccgtcatcacaaggatgggggcagagaacatcagggtcaagttacctcaccttatccgcgcggtccgccaggctggacagagtgtcacctggatcactgacccgatgcacgggaacaccatcaagactccttgcggacgaaagactcggccatttgactccattctggccgaggtacgcccttcttcgatgtgcacgaccaagagggaagccagcctggaggtgtccaccttgagatgaccggtcagaacgtgaccgaatgcacgggcgggtcaagcaacgtcaccttcgacaacctgagagaccgctaccacacgcaatgcgaccccaggctgaacgcgtcccagtccctggagctcgccttcatactcgccgagaagcttaggaagcggaggatgcggcggtcgtcggtggcgtctgggctcggcggcagcatcttgcccttgccgccctttggcttttgatgtcttgcacgctggctgtgtgcatgcagggtgcagtgcaggggtgtggtaggagaatcttacgttgtcgtttgccttgctatgtagtatgtaatgctttaatttactgcattctacgtcgttttttcccttcttcttctatttgtttctttttgtacgtagctgcagctcataagagattgaataatactattgctgccacatatatagacggagttggctttgtgaattaataaagtccattgctgctgtcgtcaactgtttccttc

SEQ ID NO: 38790 - protein, 272 aa, Zea mays subsp. mays
  peptide (1)..(272): Ceres Seq. ID no. 12360043
  misc_feature (84)..(156): Pfam Name: Pfam Description:  Class-II DAHP synthetase family
  misc_feature (1)..(156): NCBI GI NO: 34906844 NR Description: putative phospho-2-dehydro-3-deoxyheptonatealdolase 1
  misc_feature (155)..(253): NCBI GI NO: 34906844 NR Description: putative phospho-2-dehydro-3-deoxyheptonatealdolase 1
  misc_feature (1)..(156): NCBI GI NO: 584778 NR Description: Phospho-2-dehydro-3-deoxyheptonate aldolase 2
  misc_feature (155)..(253): NCBI GI NO: 584778 NR Description: Phospho-2-dehydro-3-deoxyheptonate aldolase 2
  misc_feature (37)..(156): NCBI GI NO: 584777 NR Description: Phospho-2-dehydro-3-deoxyheptonate aldolase 1
  misc_feature (155)..(253): NCBI GI NO: 584777 NR Description: Phospho-2-dehydro-3-deoxyheptonate aldolase 1
  misc_feature (37)..(156): NCBI GI NO: 24745903 NR Description: 3-deoxy-D-arabino-heptulosonate 7-phosphatesynthase
  misc_feature (155)..(253): NCBI GI NO: 24745903 NR Description: 3-deoxy-D-arabino-heptulosonate 7-phosphatesynthase
  misc_feature (37)..(156): NCBI GI NO: 114193 NR Description: Phospho-2-dehydro-3-deoxyheptonate aldolase 1
  misc_feature (155)..(253): NCBI GI NO: 114193 NR Description: Phospho-2-dehydro-3-deoxyheptonate aldolase 1
MALATNAAAAAAISGGSASQPRRASPSLLLLRRRCAVGAVHAAEPSKNPGVVPAAAKASTPTVVPENDTVPAPSLGPNASLRARWAVDSWRTKKALQQPEYPNQTELEEAVNTIEKSPPIVFAGEARHLEERLADAAVGRAFLLQGGDCAESFKEFLRGIANPLGIKVSDKMEPGELVKLIDILNPTNKPGRITVITRMGAENIRVKLPHLIRAVRQAGQSVTWITDPMHGNTIKTPCGRKTRPFDSILAEVRPSSMCTTKREASLEVSTLR

SEQ ID NO: 38791 - protein, 183 aa, Zea mays subsp. mays
  peptide (1)..(183): Ceres Seq. ID no. 12360044
  misc_feature (5)..(177): NCBI GI NO: 25143299 NR Description: pre-mRNA splicing SR protein related RSR-1 (68
  misc_feature (17)..(176): NCBI GI NO: 14017929 NR Description: KIAA1856 protein [Homo sapiens]
QDKHRARTAFSTTYPNPNAIPLHSAPKWPSPPTPPPQPPSPEGPPHSPAARRRRCSCSGAAAPSAPYTPRSRRRTPASSRPPRRPRRRRSCPRTTPSRPRPLARTRRCARGGRWTAGGRRRPCSSQNTRTRQSSRRRSTRSRSLRRSSLPGRRVTWRSASPTPPSAAHSSSRAATAPKVLKSS

SEQ ID NO: 38792 - protein, 179 aa, Zea mays subsp. mays
  peptide (1)..(179): Ceres Seq. ID no. 12360045
RTNTAHAPPSPLLTRILTLFHCILLRNGPRHQRRRRSRHLRRVRLTAPPRVAVAAPAQAPLRRRRRTRRGAVEEPRRRPGRREGLDADGRARERHRPGPVPWPERVVAREVGGGQLEDEEGPAAARIPEPDRARGGGQHDREVSADRLCRGGASPGGAPRRRRRRPRIPPPGRRLRRKF

SEQ ID NO: 38793 - DNA, 1391 bp, Zea mays subsp. mays
  misc_feature (1)..(1391): Ceres Seq. ID no. 12415942
agtattcgaagagaagtctgatcgtcttatctgcggtctggcggcgtccgacgagagtggaaatgatcgctctctccaagatagccctggtgtctgcggtggcgctgctggggctgggctgggcgtaccaggccacccgcccgccgcccccggcgatcttgggcgccccaggagggccgccgatcagctcacctagaatccggctgaaagacggccggcaccttgcctacagggaggaaggagtgcgcagggagaacgccaggttcaggatcgttttcatccatggcttctcctccaccaaggagagcgggttccccgtgtcccaggagcttgtggagcagctgggcatatacatgctcttcttcgacagagccgggtatggcgacagcgacgccaacccgaagcgctgcctcaagagcgacgccacggacgtcgaggagctcgccgatgcgctgcagctcggggacaggttctacgtggtagggtgctccgtgggcggctacccagcatggagctgcctcaaatacattcccaacaggctggccggagtggccctggccgcgccggcggtgaactactggtggccgctgcctgctaacgtgtcgagggccgcgtacgggaggctccacgcccgggaccgtaggaccttctggatcgcgcaccacgcgccggcgctgctccacgcctggctcgcgcagaagtggttccgggtgtcgccgatcgtcagggccgagcgcgacgcgttcaccgccaaggactgggagatcctcaccgcgctctggaggaagcagcgcgagagcggcctggtggacccggccaaagcgacgcagcaggggatctacgagtcgctgtgccgggacgcgacgatcctgttcggcacgtgggagttcgaccccacggagatcgagaacccgttccccgacggggagggcggcgtcagcatctggcaggggcgccaggacaagatcgtccaggtggagatccagcggtacgtggcgcagaagctgccgtgggtgcggtaccacgagcaccccgaggccgggcacgcgctcccggacatggacgggatcggggacgagatcatcagggagctcctgctcggcgagagcgagctgcaccaggagcccagggcgcaggatgcctgagcctcaactgaacgttgggaagggttggtgaagagattaaactagctactgtagtagatagatactcgcgtataactggagaataaacggtgttggccccaaggcagtggttgatgaacttccagttgctggattttgctggccagtagtttgtcacgctacttattggtccccacatagatgggttaattaagagacgcttcataggtgggttgatgaactcagattcagcaaccttcatgttcc

SEQ ID NO: 38794 - protein, 380 aa, Zea mays subsp. mays
  peptide (1)..(380): Ceres Seq. ID no. 12415943
  misc_feature (116)..(377): Pfam Name: Pfam Description:  alpha/beta hydrolase fold
  misc_feature (21)..(368): NCBI GI NO: 34908462 NR Description: P0683F02.22
  misc_feature (24)..(377): NCBI GI NO: 15228377 NR Description: putative protein; protein id: At3g48410
  misc_feature (32)..(366): NCBI GI NO: 15242253 NR Description: putative protein; protein id: At5g22460
  misc_feature (43)..(364): NCBI GI NO: 22122901 NR Description: hypothetical protein
  misc_feature (43)..(364): NCBI GI NO: 37536162 NR Description: putative alpha/beta hydrolase
  misc_feature (31)..(365): NCBI GI NO: 21592662 NR Description: unknown [Arabidopsis thaliana]
  misc_feature (22)..(365): NCBI GI NO: 18410582 NR Description: expressed protein; protein id: At1g74300
  misc_feature (26)..(377): NCBI GI NO: 38346334 NR Description: OSJNBa0073L04.5
  misc_feature (33)..(365): NCBI GI NO: 21537089 NR Description: unknown [Arabidopsis thaliana]
  misc_feature (15)..(370): NCBI GI NO: 15221193 NR Description: unknown protein; protein id: At1g74290.1
YSKRSLIVLSAVWRRPTRVEMIALSKIALVSAVALLGLGWAYQATRPPPPAILGAPGGPPISSPRIRLKDGRHLAYREEGVRRENARFRIVFIHGFSSTKESGFPVSQELVEQLGIYMLFFDRAGYGDSDANPKRCLKSDATDVEELADALQLGDRFYVVGCSVGGYPAWSCLKYIPNRLAGVALAAPAVNYWWPLPANVSRAAYGRLHARDRRTFWIAHHAPALLHAWLAQKWFRVSPIVRAERDAFTAKDWEILTALWRKQRESGLVDPAKATQQGIYESLCRDATILFGTWEFDPTEIENPFPDGEGGVSIWQGRQDKIVQVEIQRYVAQKLPWVRYHEHPEAGHALPDMDGIGDEIIRELLLGESELHQEPRAQDA

SEQ ID NO: 38795 - protein, 360 aa, Zea mays subsp. mays
  peptide (1)..(360): Ceres Seq. ID no. 12415944
  misc_feature (96)..(357): Pfam Name: Pfam Description:  alpha/beta hydrolase fold
  misc_feature (1)..(348): NCBI GI NO: 34908462 NR Description: P0683F02.22
  misc_feature (4)..(357): NCBI GI NO: 15228377 NR Description: putative protein; protein id: At3g48410
  misc_feature (12)..(346): NCBI GI NO: 15242253 NR Description: putative protein; protein id: At5g22460
  misc_feature (23)..(344): NCBI GI NO: 22122901 NR Description: hypothetical protein
  misc_feature (23)..(344): NCBI GI NO: 37536162 NR Description: putative alpha/beta hydrolase
  misc_feature (11)..(345): NCBI GI NO: 21592662 NR Description: unknown [Arabidopsis thaliana]
  misc_feature (2)..(345): NCBI GI NO: 18410582 NR Description: expressed protein; protein id: At1g74300
  misc_feature (6)..(357): NCBI GI NO: 38346334 NR Description: OSJNBa0073L04.5
  misc_feature (13)..(345): NCBI GI NO: 21537089 NR Description: unknown [Arabidopsis thaliana]
  misc_feature (1)..(350): NCBI GI NO: 15221193 NR Description: unknown protein; protein id: At1g74290.1
MIALSKIALVSAVALLGLGWAYQATRPPPPAILGAPGGPPISSPRIRLKDGRHLAYREEGVRRENARFRIVFIHGFSSTKESGFPVSQELVEQLGIYMLFFDRAGYGDSDANPKRCLKSDATDVEELADALQLGDRFYVVGCSVGGYPAWSCLKYIPNRLAGVALAAPAVNYWWPLPANVSRAAYGRLHARDRRTFWIAHHAPALLHAWLAQKWFRVSPIVRAERDAFTAKDWEILTALWRKQRESGLVDPAKATQQGIYESLCRDATILFGTWEFDPTEIENPFPDGEGGVSIWQGRQDKIVQVEIQRYVAQKLPWVRYHEHPEAGHALPDMDGIGDEIIRELLLGESELHQEPRAQDA

SEQ ID NO: 38796 - protein, 263 aa, Zea mays subsp. mays
  peptide (1)..(263): Ceres Seq. ID no. 12415945
  misc_feature (1)..(260): Pfam Name: Pfam Description:  alpha/beta hydrolase fold
  misc_feature (1)..(251): NCBI GI NO: 34908462 NR Description: P0683F02.22
  misc_feature (1)..(260): NCBI GI NO: 15228377 NR Description: putative protein; protein id: At3g48410
  misc_feature (1)..(249): NCBI GI NO: 15242253 NR Description: putative protein; protein id: At5g22460
  misc_feature (1)..(247): NCBI GI NO: 22122901 NR Description: hypothetical protein
  misc_feature (1)..(247): NCBI GI NO: 37536162 NR Description: putative alpha/beta hydrolase
  misc_feature (1)..(248): NCBI GI NO: 21592662 NR Description: unknown [Arabidopsis thaliana]
  misc_feature (1)..(248): NCBI GI NO: 18410582 NR Description: expressed protein; protein id: At1g74300
  misc_feature (1)..(260): NCBI GI NO: 38346334 NR Description: OSJNBa0073L04.5
  misc_feature (1)..(248): NCBI GI NO: 21537089 NR Description: unknown [Arabidopsis thaliana]
  misc_feature (1)..(253): NCBI GI NO: 15221193 NR Description: unknown protein; protein id: At1g74290.1
MLFFDRAGYGDSDANPKRCLKSDATDVEELADALQLGDRFYVVGCSVGGYPAWSCLKYIPNRLAGVALAAPAVNYWWPLPANVSRAAYGRLHARDRRTFWIAHHAPALLHAWLAQKWFRVSPIVRAERDAFTAKDWEILTALWRKQRESGLVDPAKATQQGIYESLCRDATILFGTWEFDPTEIENPFPDGEGGVSIWQGRQDKIVQVEIQRYVAQKLPWVRYHEHPEAGHALPDMDGIGDEIIRELLLGESELHQEPRAQDA

SEQ ID NO: 38797 - DNA, 990 bp, Zea mays subsp. mays
  misc_feature (1)..(990): Ceres Seq. ID no. 12382534
  misc_feature (491)..(491): n is a, c, t, g, unknown, or other
  misc_feature (940)..(940): n is a, c, t, g, unknown, or other
aaactagccaaggtccaagtgaccatcacgtttcagtttcattctctgggtaggggagctgctgcagccgtgtgtatggcgtcctcttcctcctccctgacgcggttatttatcccgcctcaccgagcgcaccatgaggcagccatggccgcttcggccggcgcctctctgcgtaacggcggcgggatgcagatgctggatcttgtgatgcagaggtgggccgagatggtgttgtgctgcggcgcggattggaattgcgtgtcgcagctgtggaacagggtggtgctgcgcaagtggctaaacatcggcgcggggtccggggattccgacttcagcgccgacgagcacgatacctcggagggcgagaccgaccgcgaaggcatgtctggtttgaatcatgccctatgtaacgaagaaaggatattaggtggattgggtgcaagcacgactggtgacgaaatgagcgatttaccttactgccttagaatgcncagatcagagatcagtcgtgctcagtatgttgatgttagagaactcaggatttatgtagggacatggaatgttggaggcagatttccacccagtgacttggacattgaagaatggctggctacggaggagccagctgaaatttatgttatcggctttcaagagattgttccactcaatgctgggaatatatttggtgctgaagacaatcgtccagttgcagtatgggagcacatcatccgtgaaactttgaataagaattgttcagataaatcagggtttaagtgccatagtgatcctctttcaccatcaaggtttaatccatcagatgttgttctttccatggaacatggattgcttagtgagtctgacaaggatagtgatggggagcttcatccattgattgaacgagaccataattgtggacttcaagctaaaacaaatgaaaatnttgaagctttcccagaagataatttagcctgtgatgccatcattgataat

SEQ ID NO: 38798 - protein, 330 aa, Zea mays subsp. mays
  peptide (1)..(330): Ceres Seq. ID no. 12382535
  misc_feature (181)..(301): Pfam Name: Pfam Description:  Endonuclease/Exonuclease/phosphatase family
  misc_feature (174)..(301): NCBI GI NO: 34910610 NR Description: P0683B11.14
  misc_feature (146)..(318): NCBI GI NO: 18399139 NR Description: inositol polyphosphate 5-phosphatase II, putative
  misc_feature (73)..(120): NCBI GI NO: 18399139 NR Description: inositol polyphosphate 5-phosphatase II, putative
  misc_feature (146)..(318): NCBI GI NO: 10444261 NR Description: inositol polyphosphate 5-phosphatase I
  misc_feature (73)..(120): NCBI GI NO: 10444261 NR Description: inositol polyphosphate 5-phosphatase I
  misc_feature (73)..(292): NCBI GI NO: 4204695 NR Description: putative inositol polyphosphate 5-phosphatase At5P1
  misc_feature (73)..(318): NCBI GI NO: 30693006 NR Description: inositol polyphosphate 5-phosphatase I (IP5PI)
  misc_feature (108)..(301): NCBI GI NO: 18409892 NR Description: RIBOSOMAL PROTEIN, putative; protein id:At1g71710
  misc_feature (108)..(301): NCBI GI NO: 15081807 NR Description: At1g71710/F14O23_9 [Arabidopsis thaliana]
  misc_feature (108)..(301): NCBI GI NO: 25352249 NR Description: hypothetical protein F14O23.9
  misc_feature (164)..(164): Xaa is any aa, unknown or other
  misc_feature (314)..(314): Xaa is any aa, unknown or other
KLAKVQVTITFQFHSLGRGAAAAVCMASSSSSLTRLFIPPHRAHHEAAMAASAGASLRNGGGMQMLDLVMQRWAEMVLCCGADWNCVSQLWNRVVLRKWLNIGAGSGDSDFSADEHDTSEGETDREGMSGLNHALCNEERILGGLGASTTGDEMSDLPYCLRMXRSEISRAQYVDVRELRIYVGTWNVGGRFPPSDLDIEEWLATEEPAEIYVIGFQEIVPLNAGNIFGAEDNRPVAVWEHIIRETLNKNCSDKSGFKCHSDPLSPSRFNPSDVVLSMEHGLLSESDKDSDGELHPLIERDHNCGLQAKTNENXEAFPEDNLACDAIIDN

SEQ ID NO: 38799 - protein, 305 aa, Zea mays subsp. mays
  peptide (1)..(305): Ceres Seq. ID no. 12382536
  misc_feature (156)..(276): Pfam Name: Pfam Description:  Endonuclease/Exonuclease/phosphatase family
  misc_feature (149)..(276): NCBI GI NO: 34910610 NR Description: P0683B11.14
  misc_feature (121)..(293): NCBI GI NO: 18399139 NR Description: inositol polyphosphate 5-phosphatase II, putative
  misc_feature (48)..(95): NCBI GI NO: 18399139 NR Description: inositol polyphosphate 5-phosphatase II, putative
  misc_feature (121)..(293): NCBI GI NO: 10444261 NR Description: inositol polyphosphate 5-phosphatase I
  misc_feature (48)..(95): NCBI GI NO: 10444261 NR Description: inositol polyphosphate 5-phosphatase I
  misc_feature (48)..(267): NCBI GI NO: 4204695 NR Description: putative inositol polyphosphate 5-phosphatase At5P1
  misc_feature (48)..(293): NCBI GI NO: 30693006 NR Description: inositol polyphosphate 5-phosphatase I (IP5PI)
  misc_feature (83)..(276): NCBI GI NO: 18409892 NR Description: RIBOSOMAL PROTEIN, putative; protein id:At1g71710
  misc_feature (83)..(276): NCBI GI NO: 15081807 NR Description: At1g71710/F14O23_9 [Arabidopsis thaliana]
  misc_feature (83)..(276): NCBI GI NO: 25352249 NR Description: hypothetical protein F14O23.9
  misc_feature (139)..(139): Xaa is any aa, unknown or other
  misc_feature (289)..(289): Xaa is any aa, unknown or other
MASSSSSLTRLFIPPHRAHHEAAMAASAGASLRNGGGMQMLDLVMQRWAEMVLCCGADWNCVSQLWNRVVLRKWLNIGAGSGDSDFSADEHDTSEGETDREGMSGLNHALCNEERILGGLGASTTGDEMSDLPYCLRMXRSEISRAQYVDVRELRIYVGTWNVGGRFPPSDLDIEEWLATEEPAEIYVIGFQEIVPLNAGNIFGAEDNRPVAVWEHIIRETLNKNCSDKSGFKCHSDPLSPSRFNPSDVVLSMEHGLLSESDKDSDGELHPLIERDHNCGLQAKTNENXEAFPEDNLACDAIIDN

SEQ ID NO: 38800 - protein, 282 aa, Zea mays subsp. mays
  peptide (1)..(282): Ceres Seq. ID no. 12382537
  misc_feature (133)..(253): Pfam Name: Pfam Description:  Endonuclease/Exonuclease/phosphatase family
  misc_feature (126)..(253): NCBI GI NO: 34910610 NR Description: P0683B11.14
  misc_feature (98)..(270): NCBI GI NO: 18399139 NR Description: inositol polyphosphate 5-phosphatase II, putative
  misc_feature (25)..(72): NCBI GI NO: 18399139 NR Description: inositol polyphosphate 5-phosphatase II, putative
  misc_feature (98)..(270): NCBI GI NO: 10444261 NR Description: inositol polyphosphate 5-phosphatase I
  misc_feature (25)..(72): NCBI GI NO: 10444261 NR Description: inositol polyphosphate 5-phosphatase I
  misc_feature (25)..(244): NCBI GI NO: 4204695 NR Description: putative inositol polyphosphate 5-phosphatase At5P1
  misc_feature (25)..(270): NCBI GI NO: 30693006 NR Description: inositol polyphosphate 5-phosphatase I (IP5PI)
  misc_feature (60)..(253): NCBI GI NO: 18409892 NR Description: RIBOSOMAL PROTEIN, putative; protein id:At1g71710
  misc_feature (60)..(253): NCBI GI NO: 15081807 NR Description: At1g71710/F14O23_9 [Arabidopsis thaliana]
  misc_feature (60)..(253): NCBI GI NO: 25352249 NR Description: hypothetical protein F14O23.9
  misc_feature (116)..(116): Xaa is any aa, unknown or other
  misc_feature (266)..(266): Xaa is any aa, unknown or other
MAASAGASLRNGGGMQMLDLVMQRWAEMVLCCGADWNCVSQLWNRVVLRKWLNIGAGSGDSDFSADEHDTSEGETDREGMSGLNHALCNEERILGGLGASTTGDEMSDLPYCLRMXRSEISRAQYVDVRELRIYVGTWNVGGRFPPSDLDIEEWLATEEPAEIYVIGFQEIVPLNAGNIFGAEDNRPVAVWEHIIRETLNKNCSDKSGFKCHSDPLSPSRFNPSDVVLSMEHGLLSESDKDSDGELHPLIERDHNCGLQAKTNENXEAFPEDNLACDAIIDN

SEQ ID NO: 38801 - DNA, 1642 bp, Zea mays subsp. mays
  misc_feature (1)..(1642): Ceres Seq. ID no. 13496541
  misc_feature (113)..(113): n is a, c, t, g, unknown, or other
cgcaattaaccctcactaaagggaacaaaagctggagctccaccgcggtggcggccgctctagaactagtggatcccccgggctgcaggaattcgcacgagaccattacctanaacatcctaatcgaaaaacgacacgcccttgtatccgacagcgaatctccactggcactactgctccgagcccgagacgaataatggcgggggcggcagcggcggcagtagctgtgctggtgctcgccgcggcgcacggcgcgctctgcgggtgctgggaccaccgccgcgcagcgccagcgccgtcgccgtcctgggaccaccgcgggacgaacagcacggcggcgctggagggttgcgggtgcgagccgtcgccgccgccgccgtggaggttcaggaacgacaagctgagggcgctgtacccggtgatccaggcgttcaagcagacgatcacgtgcgacccgctgggcgtgacggcgacgtggacgggcacggagctctgcgacagcttcttcaacaacggcagcaccaccacgtactacaggggattctactgcgactacccgccggacgcgccgggcgtgctgacggtggcgtccatcgacttcaacgggttcgggctgtgcgcgccgtcgctggccgggttcatcgacgcgttcccggacctggcgctgttccacgccaactccaacaacttctccggcgacgtgccggacctgacccagctgcgctacttctacgagctggacctgtccaacaacaacttctcgggcgcgttcccggaggccgtggtgccgctgggcgggctgctgttcctggacctccgcttcaaccggtacgcgggggaggtgccagcgccggtgttcgcgctcacggtggaggcgctcttcctcaacaacaacggctttggcgggcggatcccggacacgctcggcagcacgggcgcgcagtacctggtggtggccaacaaccagttcacgggccccatcccgcgctccatctacaacgcgtcggccacgctgtcggaggtgctgttcctcaacaaccgcctgtccgggtgcctcccctacgagatcgggctggtggaggggctggccgtgttcgacgccggcgggaacgagatcacggggcccgtgccgctgtcgttcggctgcctccgcgacgtggaggagctcaacctggcggggaaccagctgtacgggcaggtgcccgacgtggtgtgcctgctggcgcggacggggaagctgcagaacctgtcgctgtcggacaacttcttccactcggtggggcaccactgcatggagctggtgcgcagccgtgtcctggacgtgcggcgcaactgcattctggggttccccgaccagcggcccccgctcgagtgcgccgccttctacgtcgaccccagcaagcactgccccttcatcccgcacatcccctgcgagctgcctgggtacacggcgcacggccatcctcaccaaggccatgggggtgggaactgatccatggccacccatggtgatttggtagcctttttggggggaggaataagttccactgctgcattcatgacactgggtggggctcgaaaaactccatccgtgacaaataatattatccttttaataagaggtactagttatttacagcgt

SEQ ID NO: 38802 - protein, 431 aa, Zea mays subsp. mays
  peptide (1)..(431): Ceres Seq. ID no. 13496542
  misc_feature (64)..(405): NCBI GI NO: 30680322 NR Description: extensin-related protein [Arabidopsis thaliana]
  misc_feature (61)..(420): NCBI GI NO: 32490271 NR Description: OSJNBb0116K07.13
  misc_feature (34)..(412): NCBI GI NO: 15230349 NR Description: leucine rich repeat protein family
  misc_feature (55)..(413): NCBI GI NO: 15222811 NR Description: leucine rich repeat protein family
  misc_feature (60)..(404): NCBI GI NO: 15230120 NR Description: leucine-rich repeat extensin family
  misc_feature (60)..(393): NCBI GI NO: 34912294 NR Description: putative extensin-like protein
  misc_feature (60)..(404): NCBI GI NO: 15235668 NR Description: leucine-rich repeat extensin family
  misc_feature (43)..(396): NCBI GI NO: 15228861 NR Description: leucine-rich repeat extensin family
  misc_feature (32)..(404): NCBI GI NO: 37718858 NR Description: putative leucine-rich receptor-like protein kinase
  misc_feature (60)..(404): NCBI GI NO: 15233976 NR Description: leucine-rich repeat extensin family
MAGAAAAAVAVLVLAAAHGALCGCWDHRRAAPAPSPSWDHRGTNSTAALEGCGCEPSPPPPWRFRNDKLRALYPVIQAFKQTITCDPLGVTATWTGTELCDSFFNNGSTTTYYRGFYCDYPPDAPGVLTVASIDFNGFGLCAPSLAGFIDAFPDLALFHANSNNFSGDVPDLTQLRYFYELDLSNNNFSGAFPEAVVPLGGLLFLDLRFNRYAGEVPAPVFALTVEALFLNNNGFGGRIPDTLGSTGAQYLVVANNQFTGPIPRSIYNASATLSEVLFLNNRLSGCLPYEIGLVEGLAVFDAGGNEITGPVPLSFGCLRDVEELNLAGNQLYGQVPDVVCLLARTGKLQNLSLSDNFFHSVGHHCMELVRSRVLDVRRNCILGFPDQRPPLECAAFYVDPSKHCPFIPHIPCELPGYTAHGHPHQGHGGGN

SEQ ID NO: 38803 - DNA, 1204 bp, Zea mays subsp. mays
  misc_feature (1)..(1204): Ceres Seq. ID no. 12360865
gcacgagaccattacctagaacatcctaatcaaaaaatacaaaaaaggcagacggctacccgttcgaaaaaaaaaacagcagcagccggcggcggccatagcccaggagcccggagctgtttcttcgtcgcaggaatgggcaaggacggcatccagtacgcagtggtggacgccttcacggcggagccgttcaagggcaacccagccgcggtgtgcctcctcgaggacgccgccaaggccgccgacgagcggtggatgcagtccgtcgccgccgagttcaacatctccgagaccgccttcctcctccgggaaaagtcctccgcggccggcgccgtcccgctgttccagctccgatggttcacccccgtcgctgaggtggagctctgcggccacgccacgctggcttccgcccacttcctcttcacatccgtcctcgcggagcacgagaagctcgtcgagttctcgaccaagtccgggattcttacggccaaaaaggtccctgcgccgcagagcacgggcgtgtcgggcgaggggaagctgttcattgagctggatttccccacgattgaccttgttgattgccatccttccgagctgccggcaatccccgacaccctcaacggagcctccattgtcagcgttcacaagtcaacgacggccggtgacctcattgtggagctttcatcaggaaaggaggttgctgatatcattcctaacattcatgaaattgaaaagtgttccggcagaggaattattgttacagggccagcgcctgctggatctggctacgacttcttcacgcgttttttctgcccaaaatttggaatagatgaggatcccgtttgtggcagtgcacattgtgttttagcaccttactggggtgggaagctggggaaacacaaactgatagcgtttcaagcatcccctcggagtggaatactatacctggagttagaagctacaggcaggagagtgcgaattcagggagaagcggtcagtgtgatgactggcaccctcttagcataacccctgctcaatgaacatcctatgtcttcacttcagttgtgtggcatgatttctctgcagctaggaataaattaagtctcttttcacctgtccaaaggtgttagatacactgcttccagactatgaagcagagtgtatgaggatgtttcttttgaataaatcagtgggtgttcaatgc

SEQ ID NO: 38804 - protein, 341 aa, Zea mays subsp. mays
  peptide (1)..(341): Ceres Seq. ID no. 12360866
  misc_feature (46)..(341): NCBI GI NO: 34903112 NR Description: unnamed protein product
  misc_feature (46)..(340): NCBI GI NO: 15236203 NR Description: putative protein; protein id: At4g02860
  misc_feature (46)..(340): NCBI GI NO: 20466358 NR Description: putative protein [Arabidopsis thaliana]
  misc_feature (48)..(340): NCBI GI NO: 15218739 NR Description: unknown protein; protein id: At1g03210
  misc_feature (51)..(340): NCBI GI NO: 15236201 NR Description: putative protein; protein id: At4g02850.1
  misc_feature (181)..(339): NCBI GI NO: 23129095 NR Description: hypothetical protein [Nostoc punctiforme]
  misc_feature (56)..(187): NCBI GI NO: 23129095 NR Description: hypothetical protein [Nostoc punctiforme]
  misc_feature (181)..(340): NCBI GI NO: 17229436 NR Description: hypothetical protein [Nostoc sp. PCC 7120]
  misc_feature (50)..(187): NCBI GI NO: 17229436 NR Description: hypothetical protein [Nostoc sp. PCC 7120]
  misc_feature (154)..(339): NCBI GI NO: 23017885 NR Description: hypothetical protein [Thermobifida fusca]
ARDHYLEHPNQKIQKRQTATRSKKKTAAAGGGHSPGARSCFFVAGMGKDGIQYAVVDAFTAEPFKGNPAAVCLLEDAAKAADERWMQSVAAEFNISETAFLLREKSSAAGAVPLFQLRWFTPVAEVELCGHATLASAHFLFTSVLAEHEKLVEFSTKSGILTAKKVPAPQSTGVSGEGKLFIELDFPTIDLVDCHPSELPAIPDTLNGASIVSVHKSTTAGDLIVELSSGKEVADIIPNIHEIEKCSGRGIIVTGPAPAGSGYDFFTRFFCPKFGIDEDPVCGSAHCVLAPYWGGKLGKHKLIAFQASPRSGILYLELEATGRRVRIQGEAVSVMTGTLLA

SEQ ID NO: 38805 - protein, 296 aa, Zea mays subsp. mays
  peptide (1)..(296): Ceres Seq. ID no. 12360867
  misc_feature (1)..(296): NCBI GI NO: 34903112 NR Description: unnamed protein product
  misc_feature (1)..(295): NCBI GI NO: 15236203 NR Description: putative protein; protein id: At4g02860
  misc_feature (1)..(295): NCBI GI NO: 20466358 NR Description: putative protein [Arabidopsis thaliana]
  misc_feature (3)..(295): NCBI GI NO: 15218739 NR Description: unknown protein; protein id: At1g03210
  misc_feature (6)..(295): NCBI GI NO: 15236201 NR Description: putative protein; protein id: At4g02850.1
  misc_feature (136)..(294): NCBI GI NO: 23129095 NR Description: hypothetical protein [Nostoc punctiforme]
  misc_feature (11)..(142): NCBI GI NO: 23129095 NR Description: hypothetical protein [Nostoc punctiforme]
  misc_feature (136)..(295): NCBI GI NO: 17229436 NR Description: hypothetical protein [Nostoc sp. PCC 7120]
  misc_feature (5)..(142): NCBI GI NO: 17229436 NR Description: hypothetical protein [Nostoc sp. PCC 7120]
  misc_feature (109)..(294): NCBI GI NO: 23017885 NR Description: hypothetical protein [Thermobifida fusca]
MGKDGIQYAVVDAFTAEPFKGNPAAVCLLEDAAKAADERWMQSVAAEFNISETAFLLREKSSAAGAVPLFQLRWFTPVAEVELCGHATLASAHFLFTSVLAEHEKLVEFSTKSGILTAKKVPAPQSTGVSGEGKLFIELDFPTIDLVDCHPSELPAIPDTLNGASIVSVHKSTTAGDLIVELSSGKEVADIIPNIHEIEKCSGRGIIVTGPAPAGSGYDFFTRFFCPKFGIDEDPVCGSAHCVLAPYWGGKLGKHKLIAFQASPRSGILYLELEATGRRVRIQGEAVSVMTGTLLA

SEQ ID NO: 38806 - protein, 256 aa, Zea mays subsp. mays
  peptide (1)..(256): Ceres Seq. ID no. 12360868
  misc_feature (1)..(256): NCBI GI NO: 34903112 NR Description: unnamed protein product
  misc_feature (1)..(255): NCBI GI NO: 15236203 NR Description: putative protein; protein id: At4g02860
  misc_feature (1)..(255): NCBI GI NO: 20466358 NR Description: putative protein [Arabidopsis thaliana]
  misc_feature (1)..(255): NCBI GI NO: 15218739 NR Description: unknown protein; protein id: At1g03210
  misc_feature (1)..(255): NCBI GI NO: 15236201 NR Description: putative protein; protein id: At4g02850.1
  misc_feature (96)..(254): NCBI GI NO: 23129095 NR Description: hypothetical protein [Nostoc punctiforme]
  misc_feature (1)..(102): NCBI GI NO: 23129095 NR Description: hypothetical protein [Nostoc punctiforme]
  misc_feature (96)..(255): NCBI GI NO: 17229436 NR Description: hypothetical protein [Nostoc sp. PCC 7120]
  misc_feature (1)..(102): NCBI GI NO: 17229436 NR Description: hypothetical protein [Nostoc sp. PCC 7120]
  misc_feature (69)..(254): NCBI GI NO: 23017885 NR Description: hypothetical protein [Thermobifida fusca]
MQSVAAEFNISETAFLLREKSSAAGAVPLFQLRWFTPVAEVELCGHATLASAHFLFTSVLAEHEKLVEFSTKSGILTAKKVPAPQSTGVSGEGKLFIELDFPTIDLVDCHPSELPAIPDTLNGASIVSVHKSTTAGDLIVELSSGKEVADIIPNIHEIEKCSGRGIIVTGPAPAGSGYDFFTRFFCPKFGIDEDPVCGSAHCVLAPYWGGKLGKHKLIAFQASPRSGILYLELEATGRRVRIQGEAVSVMTGTLLA

SEQ ID NO: 38807 - DNA, 1410 bp, Zea mays subsp. mays
  misc_feature (1)..(1410): Ceres Seq. ID no. 12383255
gcacgagaccattacctagaacatcctaatcgaaaaaataatctagcaacagaaaataatgcacagagaagtaatccgagtggcgatcacaccacagagcgagagtgaggagagaactctcactgagaggggagtggatggtcggacggatgacaggagaaatgggagggctcagatcgaggatcctcaggaccttgcagtccttccccaccgccgctcccgcgcagtcgcccaacctcatcctcgcgccgctccctcccggcgccggcccctcgcctcagccgcccgcggcgccgtgcgtccgcctccaggaaccggcgccgctgggcgatgaagcgcgggccgcgcccgaggtgcccggcggcggaggcgatgacgacaaggagaacgtctcgccaggcgccaccccgcgcaaggccaagaagatgaagctcagctcggaccaccacgacagaagcccgggcctcggggaggagcagcgcgccgatggcgccacgcgctaccgccggccggacctcgcctcggcgacgctcttcgacccggacctcctcgccgccttccgccgcgccgtcgacgcctacgcgcaggccctggacgcggccaggcgccgcgacgtcgacgtcgacgacggggacggcgtccctggcggcggaggtgggccgggcgtcgcggaccccctggatgcgttcgagcggcggtgcccgcccggcggcgagcgcgcggtggtgctgtacaccacgtcgatccgcggcgtgcgcaggacgttcgaggactgcgcccgcgtgcgccgcctgctcggcggcctccgcgtcgcgttcctggagcgcgacgtctccatgcacgcgccctacagggaggagctccgggcgctgcttctctgcgagcggggggaggacggcggcggcgcgttccccgtgccgccgcggctgttcgtggacggccggtacctcggcggcgccgacgaggtcgtggcgctgcacgagcggtcccagctccggcccgtgctccggcgcgcggcgtggcgcggcgcaggggagggcccgtgcgcggtctgcggcggcgcgtggttcgtggtgtgcggcgcgtgcggcggcagtcattggctccatgacgccagcgccggcgccggccgcgtgccgtgctccgcgtgcaacgagaacggactcgtgccctgccctctctgcagctaagatcgaacgcgcggggaccgggatggttttggtttgggaggcgttctcttgattatttggtcatgtcatcgctacgatccttcccatggtcgctggaacgaaggattgatctctgtccgtccatcaaattgaacagactgtatttattaagatcattgtatgtccctgtttaagctcagctctcgatgagacgatttttactatttccagccaattctcc

SEQ ID NO: 38808 - protein, 350 aa, Zea mays subsp. mays
  peptide (1)..(350): Ceres Seq. ID no. 12383256
  misc_feature (171)..(350): NCBI GI NO: 15240974 NR Description: putative protein; protein id: At5g01420.1
  misc_feature (171)..(350): NCBI GI NO: 26451045 NR Description: unknown protein [Arabidopsis thaliana]
  misc_feature (13)..(164): NCBI GI NO: 15240974 NR Description: putative protein; protein id: At5g01420.1
  misc_feature (13)..(164): NCBI GI NO: 26451045 NR Description: unknown protein [Arabidopsis thaliana]
  misc_feature (179)..(349): NCBI GI NO: 34899868 NR Description: OJ1714_H10.16
  misc_feature (182)..(350): NCBI GI NO: 15235179 NR Description: putative protein; protein id: At4g10630.1
  misc_feature (92)..(350): NCBI GI NO: 38346321 NR Description: OJ000126_13.3
  misc_feature (179)..(349): NCBI GI NO: 15217659 NR Description: peptide transporter, putative
  misc_feature (179)..(349): NCBI GI NO: 17381052 NR Description: putative peptide transporter protein
  misc_feature (184)..(350): NCBI GI NO: 15240060 NR Description: putative protein; protein id: At5g06470.1
MVGRMTGEMGGLRSRILRTLQSFPTAAPAQSPNLILAPLPPGAGPSPQPPAAPCVRLQEPAPLGDEARAAPEVPGGGGDDDKENVSPGATPRKAKKMKLSSDHHDRSPGLGEEQRADGATRYRRPDLASATLFDPDLLAAFRRAVDAYAQALDAARRRDVDVDDGDGVPGGGGGPGVADPLDAFERRCPPGGERAVVLYTTSIRGVRRTFEDCARVRRLLGGLRVAFLERDVSMHAPYREELRALLLCERGEDGGGAFPVPPRLFVDGRYLGGADEVVALHERSQLRPVLRRAAWRGAGEGPCAVCGGAWFVVCGACGGSHWLHDASAGAGRVPCSACNENGLVPCPLCS

SEQ ID NO: 38809 - protein, 346 aa, Zea mays subsp. mays
  peptide (1)..(346): Ceres Seq. ID no. 12383257
  misc_feature (167)..(346): NCBI GI NO: 15240974 NR Description: putative protein; protein id: At5g01420.1
  misc_feature (167)..(346): NCBI GI NO: 26451045 NR Description: unknown protein [Arabidopsis thaliana]
  misc_feature (9)..(160): NCBI GI NO: 15240974 NR Description: putative protein; protein id: At5g01420.1
  misc_feature (9)..(160): NCBI GI NO: 26451045 NR Description: unknown protein [Arabidopsis thaliana]
  misc_feature (175)..(345): NCBI GI NO: 34899868 NR Description: OJ1714_H10.16
  misc_feature (178)..(346): NCBI GI NO: 15235179 NR Description: putative protein; protein id: At4g10630.1
  misc_feature (88)..(346): NCBI GI NO: 38346321 NR Description: OJ000126_13.3
  misc_feature (175)..(345): NCBI GI NO: 15217659 NR Description: peptide transporter, putative
  misc_feature (175)..(345): NCBI GI NO: 17381052 NR Description: putative peptide transporter protein
  misc_feature (180)..(346): NCBI GI NO: 15240060 NR Description: putative protein; protein id: At5g06470.1
MTGEMGGLRSRILRTLQSFPTAAPAQSPNLILAPLPPGAGPSPQPPAAPCVRLQEPAPLGDEARAAPEVPGGGGDDDKENVSPGATPRKAKKMKLSSDHHDRSPGLGEEQRADGATRYRRPDLASATLFDPDLLAAFRRAVDAYAQALDAARRRDVDVDDGDGVPGGGGGPGVADPLDAFERRCPPGGERAVVLYTTSIRGVRRTFEDCARVRRLLGGLRVAFLERDVSMHAPYREELRALLLCERGEDGGGAFPVPPRLFVDGRYLGGADEVVALHERSQLRPVLRRAAWRGAGEGPCAVCGGAWFVVCGACGGSHWLHDASAGAGRVPCSACNENGLVPCPLCS

SEQ ID NO: 38810 - protein, 342 aa, Zea mays subsp. mays
  peptide (1)..(342): Ceres Seq. ID no. 12383258
  misc_feature (163)..(342): NCBI GI NO: 15240974 NR Description: putative protein; protein id: At5g01420.1
  misc_feature (163)..(342): NCBI GI NO: 26451045 NR Description: unknown protein [Arabidopsis thaliana]
  misc_feature (5)..(156): NCBI GI NO: 15240974 NR Description: putative protein; protein id: At5g01420.1
  misc_feature (5)..(156): NCBI GI NO: 26451045 NR Description: unknown protein [Arabidopsis thaliana]
  misc_feature (171)..(341): NCBI GI NO: 34899868 NR Description: OJ1714_H10.16
  misc_feature (174)..(342): NCBI GI NO: 15235179 NR Description: putative protein; protein id: At4g10630.1
  misc_feature (84)..(342): NCBI GI NO: 38346321 NR Description: OJ000126_13.3
  misc_feature (171)..(341): NCBI GI NO: 15217659 NR Description: peptide transporter, putative
  misc_feature (171)..(341): NCBI GI NO: 17381052 NR Description: putative peptide transporter protein
  misc_feature (176)..(342): NCBI GI NO: 15240060 NR Description: putative protein; protein id: At5g06470.1
MGGLRSRILRTLQSFPTAAPAQSPNLILAPLPPGAGPSPQPPAAPCVRLQEPAPLGDEARAAPEVPGGGGDDDKENVSPGATPRKAKKMKLSSDHHDRSPGLGEEQRADGATRYRRPDLASATLFDPDLLAAFRRAVDAYAQALDAARRRDVDVDDGDGVPGGGGGPGVADPLDAFERRCPPGGERAVVLYTTSIRGVRRTFEDCARVRRLLGGLRVAFLERDVSMHAPYREELRALLLCERGEDGGGAFPVPPRLFVDGRYLGGADEVVALHERSQLRPVLRRAAWRGAGEGPCAVCGGAWFVVCGACGGSHWLHDASAGAGRVPCSACNENGLVPCPLCS

SEQ ID NO: 38811 - DNA, 1136 bp, Zea mays subsp. mays
  misc_feature (1)..(1136): Ceres Seq. ID no. 12383299
gcacgagaccattacctagaacatcctaatcgaaaagggaacagctatagccctgcagttagtagcatctcgtttcagagcccagaggagggaggaagaagaagaagaagcagcagcagcagacatggattgctgcatctgcagccccgtggcgtccgtgtacaggctgccaaggaacgccatctgcgctccctgccaccaaggcgccaaggccatcatcggtttcctcgacagggatggtgagcgggaagaggacgacggcggtggccgttctgtccagcctcctcgcggctcggccaaggggctgagagatgcgtgggagcaggtgaaggagatgagagccagggaggaggagaccaggcagagagctgccttcctccagcacggcttcgcgtcggcgtggaaggagggaatccacaccgacatcgtcgtcaaacctggcaccggtcccgcgattcgagcccacaaggccatcctggccgcgcggtcggaggtgttccggcacatgctgtccggcgacgaccgctgcaaggcccccgccggcgactccatctcgctcccggagctctcccacgacgacctgtccctcctgctcgccttcctctacacaggcgctctggaggcgccaggaggaggaggaggagaggccagccaggaccaggagcggcagctgcacgcgctcttcgtcgcggccgacaagtacgacgtgccgttcctgaggcgggcatgcgaggcgcggctggcggcgggcgtggcgccccggaacgcgctgcggacgcttgaggtcgccgagctgagctccagctccgcgctcatggagcgcgccatgggcgccgtcgtggagcacgccgaggaggtcgtgttctcggcggaatacgagcggttcgccgcacggaacgcggggctgtgcgtcgagatcacccgcgcgctgctggccaggatgccgacgccggcgaggagtgatggcccgtgcttagagcttggaagcagctagctgatgcatgcagttgtattgtatcagatgatgatggatcggaaagaatactactcttgttccagtttcgagtcacgacaatatgtaattgtaaacgcataagttcttctgaaacacgggcgagcacgatgagctagactgt

SEQ ID NO: 38812 - protein, 289 aa, Zea mays subsp. mays
  peptide (1)..(289): Ceres Seq. ID no. 12383300
  misc_feature (93)..(210): Pfam Name: Pfam Description:  BTB/POZ domain
  misc_feature (1)..(270): NCBI GI NO: 15228868 NR Description: putative protein; protein id: At3g56230.1
  misc_feature (77)..(281): NCBI GI NO: 15223447 NR Description: hypothetical protein; protein id: At1g01640.1
  misc_feature (77)..(281): NCBI GI NO: 33589788 NR Description: At3g01790 [Arabidopsis thaliana]
  misc_feature (81)..(283): NCBI GI NO: 15226686 NR Description: hypothetical protein; protein id: At2g40450.1
  misc_feature (88)..(281): NCBI GI NO: 15238994 NR Description: putative protein; protein id: At5g48510.1
  misc_feature (63)..(277): NCBI GI NO: 22328490 NR Description: hypothetical protein; protein id: At4g08455.1
  misc_feature (63)..(277): NCBI GI NO: 34900926 NR Description: Speckle-type POZ protein-like~contains ESTsAU030338
  misc_feature (93)..(269): NCBI GI NO: 27661061 NR Description: similar to speckle-type POZ protein
  misc_feature (93)..(269): NCBI GI NO: 34858214 NR Description: similar to speckle-type POZ protein-like 1
  misc_feature (110)..(272): NCBI GI NO: 15233388 NR Description: hypothetical protein; protein id: At4g04090.1
MDCCICSPVASVYRLPRNAICAPCHQGAKAIIGFLDRDGEREEDDGGGRSVQPPRGSAKGLRDAWEQVKEMRAREEETRQRAAFLQHGFASAWKEGIHTDIVVKPGTGPAIRAHKAILAARSEVFRHMLSGDDRCKAPAGDSISLPELSHDDLSLLLAFLYTGALEAPGGGGGEASQDQERQLHALFVAADKYDVPFLRRACEARLAAGVAPRNALRTLEVAELSSSSALMERAMGAVVEHAEEVVFSAEYERFAARNAGLCVEITRALLARMPTPARSDGPCLELGSS

SEQ ID NO: 38813 - protein, 219 aa, Zea mays subsp. mays
  peptide (1)..(219): Ceres Seq. ID no. 12383301
  misc_feature (23)..(140): Pfam Name: Pfam Description:  BTB/POZ domain
  misc_feature (1)..(200): NCBI GI NO: 15228868 NR Description: putative protein; protein id: At3g56230.1
  misc_feature (7)..(211): NCBI GI NO: 15223447 NR Description: hypothetical protein; protein id: At1g01640.1
  misc_feature (7)..(211): NCBI GI NO: 33589788 NR Description: At3g01790 [Arabidopsis thaliana]
  misc_feature (11)..(213): NCBI GI NO: 15226686 NR Description: hypothetical protein; protein id: At2g40450.1
  misc_feature (18)..(211): NCBI GI NO: 15238994 NR Description: putative protein; protein id: At5g48510.1
  misc_feature (1)..(207): NCBI GI NO: 22328490 NR Description: hypothetical protein; protein id: At4g08455.1
  misc_feature (1)..(207): NCBI GI NO: 34900926 NR Description: Speckle-type POZ protein-like~contains ESTsAU030338
  misc_feature (23)..(199): NCBI GI NO: 27661061 NR Description: similar to speckle-type POZ protein
  misc_feature (23)..(199): NCBI GI NO: 34858214 NR Description: similar to speckle-type POZ protein-like 1
  misc_feature (40)..(202): NCBI GI NO: 15233388 NR Description: hypothetical protein; protein id: At4g04090.1
MRAREEETRQRAAFLQHGFASAWKEGIHTDIVVKPGTGPAIRAHKAILAARSEVFRHMLSGDDRCKAPAGDSISLPELSHDDLSLLLAFLYTGALEAPGGGGGEASQDQERQLHALFVAADKYDVPFLRRACEARLAAGVAPRNALRTLEVAELSSSSALMERAMGAVVEHAEEVVFSAEYERFAARNAGLCVEITRALLARMPTPARSDGPCLELGSS

SEQ ID NO: 38814 - protein, 162 aa, Zea mays subsp. mays
  peptide (1)..(162): Ceres Seq. ID no. 12383302
  misc_feature (1)..(83): Pfam Name: Pfam Description:  BTB/POZ domain
  misc_feature (1)..(143): NCBI GI NO: 15228868 NR Description: putative protein; protein id: At3g56230.1
  misc_feature (1)..(154): NCBI GI NO: 15223447 NR Description: hypothetical protein; protein id: At1g01640.1
  misc_feature (1)..(154): NCBI GI NO: 33589788 NR Description: At3g01790 [Arabidopsis thaliana]
  misc_feature (1)..(156): NCBI GI NO: 15226686 NR Description: hypothetical protein; protein id: At2g40450.1
  misc_feature (1)..(154): NCBI GI NO: 15238994 NR Description: putative protein; protein id: At5g48510.1
  misc_feature (1)..(150): NCBI GI NO: 22328490 NR Description: hypothetical protein; protein id: At4g08455.1
  misc_feature (1)..(150): NCBI GI NO: 34900926 NR Description: Speckle-type POZ protein-like~contains ESTsAU030338
  misc_feature (1)..(142): NCBI GI NO: 27661061 NR Description: similar to speckle-type POZ protein
  misc_feature (1)..(142): NCBI GI NO: 34858214 NR Description: similar to speckle-type POZ protein-like 1
  misc_feature (1)..(145): NCBI GI NO: 15233388 NR Description: hypothetical protein; protein id: At4g04090.1
MLSGDDRCKAPAGDSISLPELSHDDLSLLLAFLYTGALEAPGGGGGEASQDQERQLHALFVAADKYDVPFLRRACEARLAAGVAPRNALRTLEVAELSSSSALMERAMGAVVEHAEEVVFSAEYERFAARNAGLCVEITRALLARMPTPARSDGPCLELGSS

SEQ ID NO: 38815 - DNA, 815 bp, Zea mays subsp. mays
  misc_feature (1)..(815): Ceres Seq. ID no. 12416420
aaatacccagtaagtgagacttgtcgtccattctgaagtccggcggcggcgacagcggcgaggcgaggcctctgcgacttccagatctccccgacgaggaggaagtctctacagcggaggggagggagatgtcgtacatgcggggtgacctgctgacgagaatgcggaagctggtgaagggcctcgccaggcccgagccccggtggctcaaggccttggaacgggctccgccagtgacatttcctcgcccagaggggaagatcaagactctggtgcttcctgaggatgtgtatgtcacgaagttcaacagaatacatccagattcgctttaccatgatgcaatcaagataagtggatttgatccaccgccagctcgagtgtttgcttggcgtgtcctggagttgaaagagcaaggagtcgatgaagatgttgcaatgggctgtagcagataacgagtaccggacagagaagaaggcaaagaagaaagcgtacaaggagctgaaagaaatcgcccgcagtgaagggaggaagccacctccgaatccatacccgagtgccataaaggaaatacaagcggaggaaaagaagtatgtcatggaccgtttgcataacccgaaggtaatcgagattgcgaacaagatgaaggaggagcgagacaggatgttgagggatagagcagcaggtcagcggtagtcgtagcagcaggtaatgtttggactggccgactgggtgttgttgttcacgacatgggccaactggcgtcataaataatggttgttggagattgatatggcaaatatgaaactcttgtttct

SEQ ID NO: 38816 - protein, 107 aa, Zea mays subsp. mays
  peptide (1)..(107): Ceres Seq. ID no. 12416421
  misc_feature (1)..(107): NCBI GI NO: 18396035 NR Description: expressed protein; protein id: At1g26750
  misc_feature (1)..(107): NCBI GI NO: 21555186 NR Description: unknown [Arabidopsis thaliana]
MSYMRGDLLTRMRKLVKGLARPEPRWLKALERAPPVTFPRPEGKIKTLVLPEDVYVTKFNRIHPDSLYHDAIKISGFDPPPARVFAWRVLELKEQGVDEDVAMGCSR

SEQ ID NO: 38817 - protein, 104 aa, Zea mays subsp. mays
  peptide (1)..(104): Ceres Seq. ID no. 12416422
  misc_feature (1)..(104): NCBI GI NO: 18396035 NR Description: expressed protein; protein id: At1g26750
  misc_feature (1)..(104): NCBI GI NO: 21555186 NR Description: unknown [Arabidopsis thaliana]
MRGDLLTRMRKLVKGLARPEPRWLKALERAPPVTFPRPEGKIKTLVLPEDVYVTKFNRIHPDSLYHDAIKISGFDPPPARVFAWRVLELKEQGVDEDVAMGCSR

SEQ ID NO: 38818 - protein, 96 aa, Zea mays subsp. mays
  peptide (1)..(96): Ceres Seq. ID no. 12416423
  misc_feature (1)..(96): NCBI GI NO: 18396035 NR Description: expressed protein; protein id: At1g26750
  misc_feature (1)..(96): NCBI GI NO: 21555186 NR Description: unknown [Arabidopsis thaliana]
MRKLVKGLARPEPRWLKALERAPPVTFPRPEGKIKTLVLPEDVYVTKFNRIHPDSLYHDAIKISGFDPPPARVFAWRVLELKEQGVDEDVAMGCSR

SEQ ID NO: 38819 - DNA, 1952 bp, Zea mays subsp. mays
  misc_feature (1)..(1952): Ceres Seq. ID no. 12366144
gctctcctgcccgtgcccacctccacgactccacctccgcagcgcccgcagtaacctccccacgccacgccacatcgcgtgcgagccccaaccgtcgccggcctcccaattaagccgcccccgcggcgcgatccggtgtccaccgctgctccgccggaggagggggaaggggaagaaaagggagggggggagcacagggggatgctagaggcgaagccgccgtcgccgggctccggcgcggccggggcggcggcgcacatccacggtcaccggcggtgggcggcgccgctgctggcctcggttctgctctcgtcgctcctcatcaccgcgtcgctcttcttttcctcctcccgcgcgctgctactctccttctcgccgctcccctccgcggcctccgccgagcctctcttcgtcgaggccaagctccgccagcagatgcgggccgaggagcgccccacgcggggcgccgtgcccaggatcgcctacctcatctccggctccgcggggggacggagccgcgctgcgccggacgctcagggcgctctaccacccggtaaacacatacgtcgtgcacctcgacctcgaggcccccgccgccgagcgcgccgaactcgcctctgccatccacgcggaccccgtctacgctaggttccgcaacgtcaaggtcgtcacacgggccaacttggtcacctaccgtggcccgaccatggtggccaacacgctgcacgcggctgccatcctgctgcgcgagggcggtaattgggactggttcatcaacctctccgcctccgactatccgctcgtcacccaggacgatctattgcatgtgctttctgagttgcccaggcagcttaacttcattgagcataccagtgacatcggatggaaggagtaccagagggcgaagccagtgatcatcgaccctgggctatacagcctgcagaagtctgacgttttctggataacagagaaaaggagtgtcccaactgcattcaagctcttcaccggctcagcatggatgatgcttactcatcagttcattgaatattgtatatggggatgggacaatctcccaaggacagtcctgatgtattacgcaaattttctttcttcaccagagggttacttccacactgtcatctgcaatgtccccgagttccgcaacaccacagtcaaccatgatctacatttcatttcttgggacaacccaccaaagcaacaccctcattatctcacactcgctgacttcgatggtatggttaacagcaacgcaccctttgcaaggaagtttggaagagaggatcctgtgctggacaagattgaccaggaactgttggcccgccgacctgatggatttgtgcctggtggatggacagacctactgaacacaactgagaaagggaaacccttcacggttgagcgcgtgcaagatctccgcccaggtcctggtgtggacagattaaagaaactcgtcacaggattgctcacccaagaaggttttgatgacaagcattgcctgtgaaactcccagtaagatgattctggggcagtaggttacacgctcaaatttgaaggcatcgggccatttgctaggaatgcccctactagctgaggcagcagcacattagcgtcatgtacgcgaggatgcaacgataaggaaggtgctcttacagacaactgcttgagttgagttaccttacagcaggagaccacggatgtagcagtcggagatgattatacagaactagtagctcattagtttattagatgattataatcagccccccaaccatgaataatgttggaatttttgacatttctgcgcccgagggttgtgcaaggtagcccattctttgtttcgaagccatggcacctggtgcaccagctggtagcgtgagacttcgttgtattgactagtggatgtttctgagtaaactgatacatttgattgc

SEQ ID NO: 38820 - protein, 271 aa, Zea mays subsp. mays
  peptide (1)..(271): Ceres Seq. ID no. 12366145
  misc_feature (1)..(150): Pfam Name: Pfam Description:  Core-2/I-Branching enzyme
  misc_feature (1)..(270): NCBI GI NO: 15242532 NR Description: N-acetylglucosaminyltransferase family
  misc_feature (1)..(270): NCBI GI NO: 15242199 NR Description: N-acetylglucosaminyltransferase family
  misc_feature (1)..(270): NCBI GI NO: 18400725 NR Description: N-acetylglucosaminyltransferase family
  misc_feature (1)..(270): NCBI GI NO: 15236287 NR Description: N-acetylglucosaminyltransferase family
  misc_feature (1)..(270): NCBI GI NO: 15146308 NR Description: AT3g15350/K7L4_15 [Arabidopsis thaliana]
  misc_feature (1)..(271): NCBI GI NO: 15219202 NR Description: N-acetylglucosaminyltransferase family
  misc_feature (1)..(270): NCBI GI NO: 7486258 NR Description: hypothetical protein F27G19
  misc_feature (1)..(270): NCBI GI NO: 30687610 NR Description: N-acetylglucosaminyltransferase family
  misc_feature (1)..(270): NCBI GI NO: 15218824 NR Description: N-acetylglucosaminyltransferase family
  misc_feature (1)..(270): NCBI GI NO: 34903664 NR Description: B1015E06.17
MVANTLHAAAILLREGGNWDWFINLSASDYPLVTQDDLLHVLSELPRQLNFIEHTSDIGWKEYQRAKPVIIDPGLYSLQKSDVFWITEKRSVPTAFKLFTGSAWMMLTHQFIEYCIWGWDNLPRTVLMYYANFLSSPEGYFHTVICNVPEFRNTTVNHDLHFISWDNPPKQHPHYLTLADFDGMVNSNAPFARKFGREDPVLDKIDQELLARRPDGFVPGGWTDLLNTTEKGKPFTVERVQDLRPGPGVDRLKKLVTGLLTQEGFDDKHCL

SEQ ID NO: 38821 - protein, 167 aa, Zea mays subsp. mays
  peptide (1)..(167): Ceres Seq. ID no. 12366146
  misc_feature (1)..(166): NCBI GI NO: 15242532 NR Description: N-acetylglucosaminyltransferase family
  misc_feature (1)..(166): NCBI GI NO: 15242199 NR Description: N-acetylglucosaminyltransferase family
  misc_feature (1)..(166): NCBI GI NO: 18400725 NR Description: N-acetylglucosaminyltransferase family
  misc_feature (1)..(166): NCBI GI NO: 15236287 NR Description: N-acetylglucosaminyltransferase family
  misc_feature (1)..(166): NCBI GI NO: 15146308 NR Description: AT3g15350/K7L4_15 [Arabidopsis thaliana]
  misc_feature (1)..(167): NCBI GI NO: 15219202 NR Description: N-acetylglucosaminyltransferase family
  misc_feature (1)..(166): NCBI GI NO: 7486258 NR Description: hypothetical protein F27G19
  misc_feature (1)..(166): NCBI GI NO: 30687610 NR Description: N-acetylglucosaminyltransferase family
  misc_feature (1)..(166): NCBI GI NO: 15218824 NR Description: N-acetylglucosaminyltransferase family
  misc_feature (1)..(166): NCBI GI NO: 34903664 NR Description: B1015E06.17
MMLTHQFIEYCIWGWDNLPRTVLMYYANFLSSPEGYFHTVICNVPEFRNTTVNHDLHFISWDNPPKQHPHYLTLADFDGMVNSNAPFARKFGREDPVLDKIDQELLARRPDGFVPGGWTDLLNTTEKGKPFTVERVQDLRPGPGVDRLKKLVTGLLTQEGFDDKHCL

SEQ ID NO: 38822 - protein, 166 aa, Zea mays subsp. mays
  peptide (1)..(166): Ceres Seq. ID no. 12366147
  misc_feature (1)..(165): NCBI GI NO: 15242532 NR Description: N-acetylglucosaminyltransferase family
  misc_feature (1)..(165): NCBI GI NO: 15242199 NR Description: N-acetylglucosaminyltransferase family
  misc_feature (1)..(165): NCBI GI NO: 18400725 NR Description: N-acetylglucosaminyltransferase family
  misc_feature (1)..(165): NCBI GI NO: 15236287 NR Description: N-acetylglucosaminyltransferase family
  misc_feature (1)..(165): NCBI GI NO: 15146308 NR Description: AT3g15350/K7L4_15 [Arabidopsis thaliana]
  misc_feature (1)..(166): NCBI GI NO: 15219202 NR Description: N-acetylglucosaminyltransferase family
  misc_feature (1)..(165): NCBI GI NO: 7486258 NR Description: hypothetical protein F27G19
  misc_feature (1)..(165): NCBI GI NO: 30687610 NR Description: N-acetylglucosaminyltransferase family
  misc_feature (1)..(165): NCBI GI NO: 15218824 NR Description: N-acetylglucosaminyltransferase family
  misc_feature (1)..(165): NCBI GI NO: 34903664 NR Description: B1015E06.17
MLTHQFIEYCIWGWDNLPRTVLMYYANFLSSPEGYFHTVICNVPEFRNTTVNHDLHFISWDNPPKQHPHYLTLADFDGMVNSNAPFARKFGREDPVLDKIDQELLARRPDGFVPGGWTDLLNTTEKGKPFTVERVQDLRPGPGVDRLKKLVTGLLTQEGFDDKHCL

SEQ ID NO: 38823 - DNA, 1287 bp, Zea mays subsp. mays
  misc_feature (1)..(1287): Ceres Seq. ID no. 12364248
gcacgagaccattacctagaacatcctaatcgaaaaagcgatcccaatccccgactcctccggcagcccgcaacgactcgcgccgcctccggtcgcgccgggtccaggtaaagcggcttccatctcctcggtctcagcgcgtcatcccctcctccttcctcttccgtttcccttagggttggagtagacacgtcggctcaaggatccttcgagggtcaggacacttattgattttcaacaaagatctagcatggaaccatcctcacagcctcaaccaatgatgggtgttgggtcacaaccttatcctgctgctgctccctatgtgccagtacctggatctcttgctgttcctcctggctcacagccagcagcagcattccccaatccaactcaactcagtgctcagcaccagatggtgtaccagcaggctcagcaatttcatcaacaacttcagcaacagcaggaacaacagctcagggagttctggactacccagatggatgagatcaagcaagcaaatgacttcaagatccacaccttgccacttgcaaggataaagaagataatgaaggctgatgaggatgtgcggatgatctctgcagaagctcctgttgtgtttgcgaaggcatgcgaggtattcatattagagctgacattgaggtcatggatgcacacagaggagaacaagcgccggaccttgcagaagaacgacattgcagctgccatcaccaggactgatatatatgacttcctggtggacataatcccgagggatgaaatgaaagaggaggggctcggacataatcccatagttggcctgccgcctgctatgggggctccagctgatcatggttctcatccatattactatgtgccagctcagcaggtgcaaggagcaggtatgatgtatggtggccagcagggtcacccagtgacttatatgtggcagacgccgcaagggcaagcggcagagccccccgaagaggagcagcagcagtctgcctgaatgtagcaaatagacgataacagcgaagcaattacatcttatctgaagttctgaacttagttctctaaacaaacaaatatgatttggttatgttaattgtgcagatgattgcaggctgaaacaattgtcgctaattaggtgtcatagcctcatagggtttcctaatggtagtttcgactcccgacgctgccacggcagcagtagaaaatgattgtaatttgcagactaatgtagtaagattagccttttctgtctaatccaatatacgattgaggccctcg

SEQ ID NO: 38824 - protein, 251 aa, Zea mays subsp. mays
  peptide (1)..(251): Ceres Seq. ID no. 12364249
  misc_feature (39)..(227): NCBI GI NO: 15223482 NR Description: transcription factor, putative
  misc_feature (26)..(248): NCBI GI NO: 15242784 NR Description: transcription factor Hap5a-like protein
  misc_feature (39)..(227): NCBI GI NO: 21554704 NR Description: transcription factor, putative
  misc_feature (62)..(246): NCBI GI NO: 6289057 NR Description: heme activated protein [Arabidopsis thaliana]
  misc_feature (62)..(246): NCBI GI NO: 15223986 NR Description: putative transcription factor
  misc_feature (62)..(246): NCBI GI NO: 25372763 NR Description: hypothetical protein
  misc_feature (34)..(248): NCBI GI NO: 15228405 NR Description: transcription factor Hap5a; protein id:At3g48590
  misc_feature (30)..(242): NCBI GI NO: 15221912 NR Description: heme activated protein, putative
  misc_feature (1)..(211): NCBI GI NO: 5257260 NR Description: Similar to sequence of BAC F7G19 from Arabidopsisthaliana
  misc_feature (83)..(227): NCBI GI NO: 25404100 NR Description: transcription factor
MEPSSQPQPMMGVGSQPYPAAAPYVPVPGSLAVPPGSQPAAAFPNPTQLSAQHQMVYQQAQQFHQQLQQQQEQQLREFWTTQMDEIKQANDFKIHTLPLARIKKIMKADEDVRMISAEAPVVFAKACEVFILELTLRSWMHTEENKRRTLQKNDIAAAITRTDIYDFLVDIIPRDEMKEEGLGHNPIVGLPPAMGAPADHGSHPYYYVPAQQVQGAGMMYGGQQGHPVTYMWQTPQGQAAEPPEEEQQQSA

SEQ ID NO: 38825 - protein, 242 aa, Zea mays subsp. mays
  peptide (1)..(242): Ceres Seq. ID no. 12364250
  misc_feature (30)..(218): NCBI GI NO: 15223482 NR Description: transcription factor, putative
  misc_feature (17)..(239): NCBI GI NO: 15242784 NR Description: transcription factor Hap5a-like protein
  misc_feature (30)..(218): NCBI GI NO: 21554704 NR Description: transcription factor, putative
  misc_feature (53)..(237): NCBI GI NO: 6289057 NR Description: heme activated protein [Arabidopsis thaliana]
  misc_feature (53)..(237): NCBI GI NO: 15223986 NR Description: putative transcription factor
  misc_feature (53)..(237): NCBI GI NO: 25372763 NR Description: hypothetical protein
  misc_feature (25)..(239): NCBI GI NO: 15228405 NR Description: transcription factor Hap5a; protein id:At3g48590
  misc_feature (21)..(233): NCBI GI NO: 15221912 NR Description: heme activated protein, putative
  misc_feature (1)..(202): NCBI GI NO: 5257260 NR Description: Similar to sequence of BAC F7G19 from Arabidopsisthaliana
  misc_feature (74)..(218): NCBI GI NO: 25404100 NR Description: transcription factor
MMGVGSQPYPAAAPYVPVPGSLAVPPGSQPAAAFPNPTQLSAQHQMVYQQAQQFHQQLQQQQEQQLREFWTTQMDEIKQANDFKIHTLPLARIKKIMKADEDVRMISAEAPVVFAKACEVFILELTLRSWMHTEENKRRTLQKNDIAAAITRTDIYDFLVDIIPRDEMKEEGLGHNPIVGLPPAMGAPADHGSHPYYYVPAQQVQGAGMMYGGQQGHPVTYMWQTPQGQAAEPPEEEQQQSA

SEQ ID NO: 38826 - protein, 241 aa, Zea mays subsp. mays
  peptide (1)..(241): Ceres Seq. ID no. 12364251
  misc_feature (29)..(217): NCBI GI NO: 15223482 NR Description: transcription factor, putative
  misc_feature (16)..(238): NCBI GI NO: 15242784 NR Description: transcription factor Hap5a-like protein
  misc_feature (29)..(217): NCBI GI NO: 21554704 NR Description: transcription factor, putative
  misc_feature (52)..(236): NCBI GI NO: 6289057 NR Description: heme activated protein [Arabidopsis thaliana]
  misc_feature (52)..(236): NCBI GI NO: 15223986 NR Description: putative transcription factor
  misc_feature (52)..(236): NCBI GI NO: 25372763 NR Description: hypothetical protein
  misc_feature (24)..(238): NCBI GI NO: 15228405 NR Description: transcription factor Hap5a; protein id:At3g48590
  misc_feature (20)..(232): NCBI GI NO: 15221912 NR Description: heme activated protein, putative
  misc_feature (1)..(201): NCBI GI NO: 5257260 NR Description: Similar to sequence of BAC F7G19 from Arabidopsisthaliana
  misc_feature (73)..(217): NCBI GI NO: 25404100 NR Description: transcription factor
MGVGSQPYPAAAPYVPVPGSLAVPPGSQPAAAFPNPTQLSAQHQMVYQQAQQFHQQLQQQQEQQLREFWTTQMDEIKQANDFKIHTLPLARIKKIMKADEDVRMISAEAPVVFAKACEVFILELTLRSWMHTEENKRRTLQKNDIAAAITRTDIYDFLVDIIPRDEMKEEGLGHNPIVGLPPAMGAPADHGSHPYYYVPAQQVQGAGMMYGGQQGHPVTYMWQTPQGQAAEPPEEEQQQSA

SEQ ID NO: 38827 - DNA, 1461 bp, Zea mays subsp. mays
  misc_feature (1)..(1461): Ceres Seq. ID no. 12424045
gcacgagaccattacctagaacatcctaatcaaaaaaccaagtcctaggaataacaccacggcgcaaaaactcgcaccaccaccgccactaccgccgcgctgtagctagctaccataccagctgcacgcctcagtgctagcttcgccgggcgggggcggctgggacaccagcagggcgtgctgcgctgcgcctctccctgccactcactcgaggagcaaccgtctcagctgcaagggcgacaagaggatcgaccagctgctagtagctagctcgcacatgttcccggtcgaagtgtcggcgctcgcggcgggcggtgcgggagcggggcgtcaggctgccggcgacgccgccgggacgatgctaccgccctttttcatgggctccatctggcccgcggccgctggcgccgctggctccgaggaggacgaggcggccgccgccgccgccgcccacgaccgcgcgctcgccgcgtcgcgcaaccaccgcgaggccgagaagcgccggcgcgagcgcattaagtcgcacctcgaccgcctccgcaacgtcctcgcctgcgaccccaagatagacaaggcttcgctgctggcgaaggcggtggagagggtgcgggacctgaagcagcgggcggcgggcgtcggggaggcggcgccggcgcacctgttcccgacggagcacgacgagatcgtggtgctcgcgtcgggcagcggcgccgtcttcgaggcctccgtctgctgcgacgaccgctccgacctcctcccggacctcatcgagacgctgcgcgcgctccgcctccgcacgctccgctccgagatggccaccctcggcggccgcgtccgcaacgtgctcgtcctggcgcgcgacgtcgtcgacggcggcggcggtgccgtcgcgggaggtgatgacggatacggtggacgcgctgctgactcggcgggcggtgccacagacggcggcggcggtgacttcctcaaggaagccctgcgggctctggtagagaggccaggcgctgccggagaccggcccaagaggcgacgggtctcggacatgaacatgcaagcggcagcatagctagcacgccgccgcaggaggcgggcagatcatctcgctcgattggtcgtcgtagctcaaatacctaattgcatgcatgctcatgtcgaatatataaaaatggtactacctccatcatctccatgtttagttagatgtcttcatgatgctagctagatatctcttcatctcccattctctcatgcatggctttcttcttgagatgccataccattattagggatagtatggtattgctattagggtttgcttgagcttgaaccaaatgttgttccaaagccaatgcaaatctacctttgagctataataacaaaaaagagtcaggcaaaggttgcggacttgttacccaactagttaataagcaatatatattctaagcaatatatatttgg

SEQ ID NO: 38828 - protein, 263 aa, Zea mays subsp. mays
  peptide (1)..(263): Ceres Seq. ID no. 12424046
  misc_feature (65)..(114): Pfam Name: Pfam Description:  Helix-loop-helix DNA-binding domain
  misc_feature (58)..(238): NCBI GI NO: 15226839 NR Description: bHLH protein; protein id: At2g41130.1
  misc_feature (58)..(238): NCBI GI NO: 18491261 NR Description: At2g41130/T3K9.10 [Arabidopsis thaliana]
  misc_feature (34)..(199): NCBI GI NO: 18409132 NR Description: bHLH protein; protein id: At1g68810
  misc_feature (55)..(238): NCBI GI NO: 15229004 NR Description: bHLH protein; protein id: At3g56770.1
  misc_feature (43)..(198): NCBI GI NO: 15230869 NR Description: bHLH protein; protein id: At3g25710
  misc_feature (11)..(205): NCBI GI NO: 34904034 NR Description: P0665D10.15
  misc_feature (26)..(201): NCBI GI NO: 34896028 NR Description: ESTs C26093
  misc_feature (60)..(192): NCBI GI NO: 15225658 NR Description: hypothetical protein; protein id: At2g40200
  misc_feature (199)..(228): NCBI GI NO: 2388805 NR Description: attachment region binding protein [Gallus gallus]
MFPVEVSALAAGGAGAGRQAAGDAAGTMLPPFFMGSIWPAAAGAAGSEEDEAAAAAAAHDRALAASRNHREAEKRRRERIKSHLDRLRNVLACDPKIDKASLLAKAVERVRDLKQRAAGVGEAAPAHLFPTEHDEIVVLASGSGAVFEASVCCDDRSDLLPDLIETLRALRLRTLRSEMATLGGRVRNVLVLARDVVDGGGGAVAGGDDGYGGRAADSAGGATDGGGGDFLKEALRALVERPGAAGDRPKRRRVSDMNMQAAA

SEQ ID NO: 38829 - protein, 236 aa, Zea mays subsp. mays
  peptide (1)..(236): Ceres Seq. ID no. 12424047
  misc_feature (38)..(87): Pfam Name: Pfam Description:  Helix-loop-helix DNA-binding domain
  misc_feature (31)..(211): NCBI GI NO: 15226839 NR Description: bHLH protein; protein id: At2g41130.1
  misc_feature (31)..(211): NCBI GI NO: 18491261 NR Description: At2g41130/T3K9.10 [Arabidopsis thaliana]
  misc_feature (7)..(172): NCBI GI NO: 18409132 NR Description: bHLH protein; protein id: At1g68810
  misc_feature (28)..(211): NCBI GI NO: 15229004 NR Description: bHLH protein; protein id: At3g56770.1
  misc_feature (16)..(171): NCBI GI NO: 15230869 NR Description: bHLH protein; protein id: At3g25710
  misc_feature (1)..(178): NCBI GI NO: 34904034 NR Description: P0665D10.15
  misc_feature (1)..(174): NCBI GI NO: 34896028 NR Description: ESTs C26093
  misc_feature (33)..(165): NCBI GI NO: 15225658 NR Description: hypothetical protein; protein id: At2g40200
  misc_feature (172)..(201): NCBI GI NO: 2388805 NR Description: attachment region binding protein [Gallus gallus]
MLPPFFMGSIWPAAAGAAGSEEDEAAAAAAAHDRALAASRNHREAEKRRRERIKSHLDRLRNVLACDPKIDKASLLAKAVERVRDLKQRAAGVGEAAPAHLFPTEHDEIVVLASGSGAVFEASVCCDDRSDLLPDLIETLRALRLRTLRSEMATLGGRVRNVLVLARDVVDGGGGAVAGGDDGYGGRAADSAGGATDGGGGDFLKEALRALVERPGAAGDRPKRRRVSDMNMQAAA

SEQ ID NO: 38830 - protein, 230 aa, Zea mays subsp. mays
  peptide (1)..(230): Ceres Seq. ID no. 12424048
  misc_feature (32)..(81): Pfam Name: Pfam Description:  Helix-loop-helix DNA-binding domain
  misc_feature (25)..(205): NCBI GI NO: 15226839 NR Description: bHLH protein; protein id: At2g41130.1
  misc_feature (25)..(205): NCBI GI NO: 18491261 NR Description: At2g41130/T3K9.10 [Arabidopsis thaliana]
  misc_feature (1)..(166): NCBI GI NO: 18409132 NR Description: bHLH protein; protein id: At1g68810
  misc_feature (22)..(205): NCBI GI NO: 15229004 NR Description: bHLH protein; protein id: At3g56770.1
  misc_feature (10)..(165): NCBI GI NO: 15230869 NR Description: bHLH protein; protein id: At3g25710
  misc_feature (1)..(172): NCBI GI NO: 34904034 NR Description: P0665D10.15
  misc_feature (1)..(168): NCBI GI NO: 34896028 NR Description: ESTs C26093
  misc_feature (27)..(159): NCBI GI NO: 15225658 NR Description: hypothetical protein; protein id: At2g40200
  misc_feature (166)..(195): NCBI GI NO: 2388805 NR Description: attachment region binding protein [Gallus gallus]
MGSIWPAAAGAAGSEEDEAAAAAAAHDRALAASRNHREAEKRRRERIKSHLDRLRNVLACDPKIDKASLLAKAVERVRDLKQRAAGVGEAAPAHLFPTEHDEIVVLASGSGAVFEASVCCDDRSDLLPDLIETLRALRLRTLRSEMATLGGRVRNVLVLARDVVDGGGGAVAGGDDGYGGRAADSAGGATDGGGGDFLKEALRALVERPGAAGDRPKRRRVSDMNMQAAA

SEQ ID NO: 38831 - DNA, 893 bp, Zea mays subsp. mays
  misc_feature (1)..(893): Ceres Seq. ID no. 12355035
acgttctcgcgcgggatctaattccaaacagcactgcccttgcttctaccgttccccaagtgcgctccctctctcgccatccatctcgtgcacgactgggcaacctttgccgctgtcgaggtgcccaggtcttcatcggtccctcgtcagttcttctccggcccttcgccgccgacaagctcccccagctactgaagagacaggagcaaagagttaacaggagatgaatgcccctgaccgttatgagcgtttcgtcgtgccagagggcaccaagaaagtgtcctatgagagggatacaaagattgtgaatgctgcatcattcactgtcgaacgcgaggatcacactgtaggcaatatcctccgcatgtaagtacaatttaatttcttttctttaacgcttcccatcttatggtttgtttggttgacatgatacaggcagttgcacagagacccaaatgttctctttgccgggtataagctccctcacccactccagtacaagatcattgttaggatccacacaacgagccagtcctccccgacgcaggcctacacccaggctatcaatgatctagacaaagagcttgagtaccttaagcaagcttttgaggatgagaagaacaggtacgaggacaggatgaagcaggggttctagatgaatggaatagtgtgggagataaacttcctgtgttagttttatcctaggcgagtcaacaatgaaacgaacgcccaaggatcgtgaatgtctgatccctgaactaaggttgcttgctgtcgttttactgtcatgcttgtgtcaatattcgtattattgcaaacacaccaatggagttttacattgacatcctcagattgttcgcaactagataattacatgcatgcctgtcttcaac

SEQ ID NO: 38832 - protein, 74 aa, Zea mays subsp. mays
  peptide (1)..(74): Ceres Seq. ID no. 12355036
VLARDLIPNSTALASTVPQVRSLSRHPSRARLGNLCRCRGAQVFIGPSSVLLRPFAADKLPQLLKRQEQRVNRR

SEQ ID NO: 38833 - protein, 71 aa, Zea mays subsp. mays
  peptide (1)..(71): Ceres Seq. ID no. 12355037
RSRAGSNSKQHCPCFYRSPSALPLSPSISCTTGQPLPLSRCPGLHRSLVSSSPALRRRQAPPATEETGAKS

SEQ ID NO: 38834 - protein, 48 aa, Zea mays subsp. mays
  peptide (1)..(48): Ceres Seq. ID no. 12355038
  misc_feature (1)..(48): NCBI GI NO: 34394446 NR Description: putative DNA-directed RNA polymerase II 13
  misc_feature (1)..(48): NCBI GI NO: 15231127 NR Description: DNA-directed RNA polymerase II 13
  misc_feature (1)..(47): NCBI GI NO: 19921456 NR Description: CG6840-PA [Drosophila melanogaster]
  misc_feature (1)..(47): NCBI GI NO: 6755362 NR Description: polymerase
  misc_feature (1)..(47): NCBI GI NO: 5453932 NR Description: DNA directed RNA polymerase II polypeptide J
  misc_feature (1)..(47): NCBI GI NO: 11595485 NR Description: RPB11a protein [Homo sapiens]
  misc_feature (1)..(48): NCBI GI NO: 25012186 NR Description: GM15177p [Drosophila melanogaster]
  misc_feature (1)..(47): NCBI GI NO: 33878913 NR Description: Unknown (protein for IMAGE:5017025) [Homo sapiens]
  misc_feature (1)..(47): NCBI GI NO: 40226460 NR Description: MGC13098 protein [Homo sapiens]
  misc_feature (1)..(47): NCBI GI NO: 21704272 NR Description: DNA directed RNA polymerase II polypeptide J-related gene isoform 3
MNAPDRYERFVVPEGTKKVSYERDTKIVNAASFTVEREDHTVGNILRM

SEQ ID NO: 38835 - DNA, 832 bp, Zea mays subsp. mays
  misc_feature (1)..(832): Ceres Seq. ID no. 12415059
  misc_feature (801)..(801): n is a, c, t, g, unknown, or other
  misc_feature (804)..(804): n is a, c, t, g, unknown, or other
  misc_feature (802)..(802): n is a, c, t, g, unknown, or other
actcatcaattctttgctggcggcctaagaagaaggatgtgctccgccatattctcgatccaacaaccaggtcgttcagccgcagattagcaggccgcctgcgctcctcctttcccctcagcctcccctcctctccggtgtacgtctccgccgagatggccgccccgctccggcggagcctcccctcccttggtcgcgcgcttctcacgccggcgccggcgcggatgctctccgcggaggcctctgatgccctcgttgagatcaagcccggggagatcgggatggtctccggcatccctgaggagcatctccgccgtaaggttctaatttattcaccagctaggactgcatcccagcaaggttcaggcaaagtcgggaggtggaaaattaatttttttgtcaacccaaaagtgggagaacccgttgatgggatggacatctactggggatccatatgctaatgtcggtgaagcaggacttacgtttgacagtgcagagtcagcaaaggcgtttgccgaaaaacatggatggaattatgtggttcggaaacgccatgcacctcttctgaggcctaaggcctacgctgagaacttcaagtggagaggccctccgaaagcggagcaagcatgagctcgagacatctgtgatgctgacattggcacgatgtcgttttcctcctggctcgattttattttgctttcaaccgtgcccattgttaaagtacgaactagagtatgcatctatcaaacttgtaataagcatgatgtgcaatcaaacaaaatggtgtacttgtacttccannangttaattcgtggatgacattgcttttgc

SEQ ID NO: 38836 - protein, 152 aa, Zea mays subsp. mays
  peptide (1)..(152): Ceres Seq. ID no. 12415060
  misc_feature (52)..(143): NCBI GI NO: 34901114 NR Description: NADH-ubiquinone oxidoreductase 18 kDa subunit
  misc_feature (80)..(143): NCBI GI NO: 15240784 NR Description: putative protein; protein id: At5g67590
  misc_feature (80)..(143): NCBI GI NO: 21555571 NR Description: unknown [Arabidopsis thaliana]
SSILCWRPKKKDVLRHILDPTTRSFSRRLAGRLRSSFPLSLPSSPVYVSAEMAAPLRRSLPSLGRALLTPAPARMLSAEASDALVEIKPGEIGMVSGIPEEHLRRKVLIYSPARTASQQGSGKVGRWKINFFVNPKVGEPVDGMDIYWGSIC

SEQ ID NO: 38837 - protein, 101 aa, Zea mays subsp. mays
  peptide (1)..(101): Ceres Seq. ID no. 12415061
  misc_feature (1)..(92): NCBI GI NO: 34901114 NR Description: NADH-ubiquinone oxidoreductase 18 kDa subunit
  misc_feature (29)..(92): NCBI GI NO: 15240784 NR Description: putative protein; protein id: At5g67590
  misc_feature (29)..(92): NCBI GI NO: 21555571 NR Description: unknown [Arabidopsis thaliana]
MAAPLRRSLPSLGRALLTPAPARMLSAEASDALVEIKPGEIGMVSGIPEEHLRRKVLIYSPARTASQQGSGKVGRWKINFFVNPKVGEPVDGMDIYWGSIC

SEQ ID NO: 38838 - protein, 78 aa, Zea mays subsp. mays
  peptide (1)..(78): Ceres Seq. ID no. 12415062
  misc_feature (1)..(69): NCBI GI NO: 34901114 NR Description: NADH-ubiquinone oxidoreductase 18 kDa subunit
  misc_feature (6)..(69): NCBI GI NO: 15240784 NR Description: putative protein; protein id: At5g67590
  misc_feature (6)..(69): NCBI GI NO: 21555571 NR Description: unknown [Arabidopsis thaliana]
MLSAEASDALVEIKPGEIGMVSGIPEEHLRRKVLIYSPARTASQQGSGKVGRWKINFFVNPKVGEPVDGMDIYWGSIC

SEQ ID NO: 38839 - DNA, 1155 bp, Zea mays subsp. mays
  misc_feature (1)..(1155): Ceres Seq. ID no. 12369606
gcacgagaccattacctagaacatcctaatcgaaaaaaaccatagcttcgtaaaccctcgccgccgccgccgccgccgccgccgatgacatcggaggagcacccctcgtctgcgtcctcggacggcagcaccaccatcggctccgacgaacatcttgacccctcgccatcaccttcgacgtccttcgactctcctcctgaatccgacgactccgccgcctcctcgctgctctcagacggctcttcagagtccgagcccatcattttcaagaaaccccgcccacccgtgcgctcgtggccggcctccgacgagatcgcgatcctcgagaccgtcgcgtcgcaccggcagaagcacgggcgacttcccctggcagacgacctcgccgccgcggtgcggggccgcctcagcgtgggggaccgcctcagcgccgcgcagatcaccaggcggctgtgcgcgctccgcaaccggtacgacaacaccgttatccgcctcaaacgcggcacgatcccggcgaaggacagcgacgtcaccatctacaggctctccaagctcatctgggagggcacgcgcagggggaggatagagaagaagacccgtgtgcccgacgcgcgcaatgacccaagagggttcgacgatctggccgagctgtacccttgcctctccgcggaggtggaggcgattggtgcgaggtgcggctacggggcgctgaagagggcattcgggcgcatcggtgacgacacggcggcgcggctggaggcgaagctgaagaggcagcggatggcggagaccagggcgagcggaaagcttgaccggctgaggtcgagagtcgccaatgcgcttcagggatttaacaagtgaaatgaagtggcggactttgttgaaggagctgaacgtggacgtctggaggattattagacaatagacacgccaagtgaaagtggctttaagattttgtcaaggagaggaagctacataacatggaggacttgctttgatgttctgcttaggttctatttgggactgatctaactttaaaaaattaattttggagctggcatagcaggttattaggtttattaggtgatccagaaaatcctagacctgcagaacctttagaaaatatcttgataagtcattttatttatattttagatt

SEQ ID NO: 38840 - protein, 257 aa, Zea mays subsp. mays
  peptide (1)..(257): Ceres Seq. ID no. 12369607
  misc_feature (67)..(161): Pfam Name: Pfam Description:  Protein of unknown function, DUF573
MTSEEHPSSASSDGSTTIGSDEHLDPSPSPSTSFDSPPESDDSAASSLLSDGSSESEPIIFKKPRPPVRSWPASDEIAILETVASHRQKHGRLPLADDLAAAVRGRLSVGDRLSAAQITRRLCALRNRYDNTVIRLKRGTIPAKDSDVTIYRLSKLIWEGTRRGRIEKKTRVPDARNDPRGFDDLAELYPCLSAEVEAIGARCGYGALKRAFGRIGDDTAARLEAKLKRQRMAETRASGKLDRLRSRVANALQGFNK

SEQ ID NO: 38841 - DNA, 1406 bp, Zea mays subsp. mays
  misc_feature (1)..(1406): Ceres Seq. ID no. 12415054
gcacgagaccattacctagaacatcctaatcgaaaagcgcgcgcgcttgcgcttccttccttgcttcccctgccctcttctttttattccccgtctcctttgttcgcttgcgggctgcgggaagggggagggagaggacgtgacgaggggaggggaggggaggggaggagggagggcaggcgggccgacgaatgcacagtcccggagaatattggtgaagcaataacttgatatagggttctagaccaaagaagcaatggaaaaggaatcatctgccacatacgagccaaaaaggaacagtgaaataagggtttttgagagttcagatgagatttcaacggatcttgctgagtatatctcacaagtttcagaaatttctgtcaaagaaaggggatactttgccatcgccttatctggaggtcccctagtcagttttttggggaaactttgtgaagctccatacaacaagacactggattggtccaaatggtacatcttctggtctgatgaacgtgctgtggcaaaaaaccatgcagagagtaactataggttaacaaaagaaggattcctcgccaaggtacctattctgaatggccatgtctactccataaatgacaatgccacagtggaggatgcagcaacagactatgaattcatgatcaggcagctggttaaggtccgcacaataggagtctcagagagaaacgactgtcccaagttcgatctcatccttctcaccatgggctccgatgggcatgtggcctcgcttttcccgaaccaccctgccatggagctgaaagacgactgggtcacctacatcaccgactctccgcagcctcctcctgagaggatcaccttcactctcccagtgatcaactcagcatccaacatcgcaatagtgtccaccggtgatgacaaagcaaaggctgttcacatagcagtttctgacatggccgaaggtcttgatgctcctacatcgctgcctgctagaatggtccagccaacggacgggaagctggtatggtttctggacaaggcggcggcatcattccttgactccaagaacgacgatgacgacgcttgctacgagcgtcatgagtgactaactccgaggatccttggtcgttttgaagcgaatgaacggaggtgtgtgtaagtaggtggttgcgtatgatggaagacgcgctgttccccttttagctcgatgcatgggttaattttgttctgagggtttttagctccggaaatctgaaattgctcttggtccttttgcagtgaggtgatttaaagcgatgaaatgtgtatgcgatgttgagtcgtcaaagaacaccggaatttaactgtggtcgtataatattatgtgctacattctatgctatggcagtttgtttttttttttgttttgt

SEQ ID NO: 38842 - protein, 281 aa, Zea mays subsp. mays
  peptide (1)..(281): Ceres Seq. ID no. 12415055
  misc_feature (33)..(267): Pfam Name: Pfam Description:  Glucosamine-6-phosphate isomerases/ 6-phosphogluconolactonase
  misc_feature (1)..(280): NCBI GI NO: 34394567 NR Description: putative 6-phosphogluconolactonase
  misc_feature (8)..(267): NCBI GI NO: 15222922 NR Description: unknown protein; protein id: At1g13700.1
  misc_feature (16)..(269): NCBI GI NO: 28140256 NR Description: putative 6-phosphogluconolactonase
  misc_feature (1)..(266): NCBI GI NO: 21554291 NR Description: 6-phosphogluconolactonase-like protein
  misc_feature (1)..(266): NCBI GI NO: 18420789 NR Description: 6-phosphogluconolactonase-like protein
  misc_feature (12)..(266): NCBI GI NO: 10177901 NR Description: 6-phosphogluconolactonase-like protein
  misc_feature (19)..(266): NCBI GI NO: 21537412 NR Description: 6-phosphogluconolactonase-like protein
  misc_feature (19)..(266): NCBI GI NO: 15238526 NR Description: 6-phosphogluconolactonase-like protein
  misc_feature (13)..(266): NCBI GI NO: 14009294 NR Description: putative 6-phosphogluconolactonase
  misc_feature (18)..(266): NCBI GI NO: 15229127 NR Description: 6-phosphogluconolactonase - like protein
MEKESSATYEPKRNSEIRVFESSDEISTDLAEYISQVSEISVKERGYFAIALSGGPLVSFLGKLCEAPYNKTLDWSKWYIFWSDERAVAKNHAESNYRLTKEGFLAKVPILNGHVYSINDNATVEDAATDYEFMIRQLVKVRTIGVSERNDCPKFDLILLTMGSDGHVASLFPNHPAMELKDDWVTYITDSPQPPPERITFTLPVINSASNIAIVSTGDDKAKAVHIAVSDMAEGLDAPTSLPARMVQPTDGKLVWFLDKAAASFLDSKNDDDDACYERHE

SEQ ID NO: 38843 - protein, 148 aa, Zea mays subsp. mays
  peptide (1)..(148): Ceres Seq. ID no. 12415056
  misc_feature (1)..(134): Pfam Name: Pfam Description:  Glucosamine-6-phosphate isomerases/ 6-phosphogluconolactonase
  misc_feature (1)..(147): NCBI GI NO: 34394567 NR Description: putative 6-phosphogluconolactonase
  misc_feature (1)..(134): NCBI GI NO: 15222922 NR Description: unknown protein; protein id: At1g13700.1
  misc_feature (1)..(136): NCBI GI NO: 28140256 NR Description: putative 6-phosphogluconolactonase
  misc_feature (1)..(133): NCBI GI NO: 21554291 NR Description: 6-phosphogluconolactonase-like protein
  misc_feature (1)..(133): NCBI GI NO: 18420789 NR Description: 6-phosphogluconolactonase-like protein
  misc_feature (1)..(133): NCBI GI NO: 10177901 NR Description: 6-phosphogluconolactonase-like protein
  misc_feature (1)..(133): NCBI GI NO: 21537412 NR Description: 6-phosphogluconolactonase-like protein
  misc_feature (1)..(133): NCBI GI NO: 15238526 NR Description: 6-phosphogluconolactonase-like protein
  misc_feature (1)..(133): NCBI GI NO: 14009294 NR Description: putative 6-phosphogluconolactonase
  misc_feature (1)..(133): NCBI GI NO: 15229127 NR Description: 6-phosphogluconolactonase - like protein
MIRQLVKVRTIGVSERNDCPKFDLILLTMGSDGHVASLFPNHPAMELKDDWVTYITDSPQPPPERITFTLPVINSASNIAIVSTGDDKAKAVHIAVSDMAEGLDAPTSLPARMVQPTDGKLVWFLDKAAASFLDSKNDDDDACYERHE

SEQ ID NO: 38844 - DNA, 994 bp, Zea mays subsp. mays
  misc_feature (1)..(994): Ceres Seq. ID no. 12377725
gcacgagaccattacctagaacatcctaatcgaaaaaccatcctgcacacactgcaatctccgtccatccctccgtttccttttttcctctgttgccatcagttcagtagtagcctgcagctctcccaccttctcgctgcgctgtactgtgctggcaggggaggggccatggacgaccccgtcgagcgcttgaaggacgggttccacaagttcaagaccgaggtctatgacaagaagccggagctgttcgagcctctcaaggccggccaggcccccaagtacgtggtgttcgcctgctccgactcccgcgtgtgcccgtcggtgaccctgggcctgcagcccggcgaggccttcaccgtccgcaacatcgccgccatggtcccagcctacgacaagaccaagtacaccggcatcgggtccgccatcgagtacgccgtgtgcgcgctcaaggtggaggtcctcgtggtcattggccacagctgctgcggtggcatcagggcgctcctctccctccaggacggcgcacctgacaacttccacttcgttgagaactgggttaagatcggcttccctgccaagattaaggtgaagaaagaccacgcatcggtgccgttcgatgaccagtgctctattctagagaaggaggccgtgaacctgtccctggagaacctcaagacctaccccttcgtcaaggaagggctggccaacgggacgctcaagctggtcggcggccactacaacttcgtgtcaggggagttccacccttggcactgaagtgattttttttgtaattcctcggcactgaagtgaagttttgtctgaatattgcctcgtaacataattgcccggtccctgttctagttgtggcgcagtctggtttgttttgacatttgttttcaaggttcatccttatttgcattgcatttgtttatggcttgacgttaacatttggaacaagtatttgtcaccgctcatgtcgatggtgtaaaacatg

SEQ ID NO: 38845 - protein, 257 aa, Zea mays subsp. mays
  peptide (1)..(257): Ceres Seq. ID no. 12377726
  misc_feature (59)..(256): NCBI GI NO: 7489809 NR Description: probable carbonate dehydratase (EC 4
  misc_feature (59)..(256): NCBI GI NO: 7489810 NR Description: probable carbonate dehydratase (EC 4
  misc_feature (57)..(256): NCBI GI NO: 7489810 NR Description: probable carbonate dehydratase (EC 4
  misc_feature (57)..(256): NCBI GI NO: 7489809 NR Description: probable carbonate dehydratase (EC 4
  misc_feature (56)..(256): NCBI GI NO: 7436816 NR Description: probable carbonate dehydratase (EC 4
  misc_feature (56)..(256): NCBI GI NO: 34911604 NR Description: carbonic anhydrase
  misc_feature (57)..(256): NCBI GI NO: 729003 NR Description: CARBONIC ANHYDRASE, CHLOROPLAST PRECURSOR
  misc_feature (59)..(256): NCBI GI NO: 7489810 NR Description: probable carbonate dehydratase (EC 4
  misc_feature (59)..(256): NCBI GI NO: 882246 NR Description: carbonic anhydrase 2
  misc_feature (59)..(256): NCBI GI NO: 882248 NR Description: carbonic anhydrase 1
ARDHYLEHPNRKTILHTLQSPSIPPFPFFLCCHQFSSSLQLSHLLAALYCAGRGGAMDDPVERLKDGFHKFKTEVYDKKPELFEPLKAGQAPKYVVFACSDSRVCPSVTLGLQPGEAFTVRNIAAMVPAYDKTKYTGIGSAIEYAVCALKVEVLVVIGHSCCGGIRALLSLQDGAPDNFHFVENWVKIGFPAKIKVKKDHASVPFDDQCSILEKEAVNLSLENLKTYPFVKEGLANGTLKLVGGHYNFVSGEFHPWH

SEQ ID NO: 38846 - protein, 201 aa, Zea mays subsp. mays
  peptide (1)..(201): Ceres Seq. ID no. 12377727
  misc_feature (3)..(200): NCBI GI NO: 7489809 NR Description: probable carbonate dehydratase (EC 4
  misc_feature (3)..(200): NCBI GI NO: 7489810 NR Description: probable carbonate dehydratase (EC 4
  misc_feature (1)..(200): NCBI GI NO: 7489810 NR Description: probable carbonate dehydratase (EC 4
  misc_feature (1)..(200): NCBI GI NO: 7489809 NR Description: probable carbonate dehydratase (EC 4
  misc_feature (1)..(200): NCBI GI NO: 7436816 NR Description: probable carbonate dehydratase (EC 4
  misc_feature (1)..(200): NCBI GI NO: 34911604 NR Description: carbonic anhydrase
  misc_feature (1)..(200): NCBI GI NO: 729003 NR Description: CARBONIC ANHYDRASE, CHLOROPLAST PRECURSOR
  misc_feature (3)..(200): NCBI GI NO: 7489810 NR Description: probable carbonate dehydratase (EC 4
  misc_feature (3)..(200): NCBI GI NO: 882246 NR Description: carbonic anhydrase 2
  misc_feature (3)..(200): NCBI GI NO: 882248 NR Description: carbonic anhydrase 1
MDDPVERLKDGFHKFKTEVYDKKPELFEPLKAGQAPKYVVFACSDSRVCPSVTLGLQPGEAFTVRNIAAMVPAYDKTKYTGIGSAIEYAVCALKVEVLVVIGHSCCGGIRALLSLQDGAPDNFHFVENWVKIGFPAKIKVKKDHASVPFDDQCSILEKEAVNLSLENLKTYPFVKEGLANGTLKLVGGHYNFVSGEFHPWH

SEQ ID NO: 38847 - protein, 132 aa, Zea mays subsp. mays
  peptide (1)..(132): Ceres Seq. ID no. 12377728
  misc_feature (1)..(131): NCBI GI NO: 7489809 NR Description: probable carbonate dehydratase (EC 4
  misc_feature (1)..(131): NCBI GI NO: 7489810 NR Description: probable carbonate dehydratase (EC 4
  misc_feature (1)..(131): NCBI GI NO: 7489810 NR Description: probable carbonate dehydratase (EC 4
  misc_feature (1)..(131): NCBI GI NO: 7489809 NR Description: probable carbonate dehydratase (EC 4
  misc_feature (1)..(131): NCBI GI NO: 7436816 NR Description: probable carbonate dehydratase (EC 4
  misc_feature (1)..(131): NCBI GI NO: 34911604 NR Description: carbonic anhydrase
  misc_feature (1)..(131): NCBI GI NO: 729003 NR Description: CARBONIC ANHYDRASE, CHLOROPLAST PRECURSOR
  misc_feature (1)..(131): NCBI GI NO: 7489810 NR Description: probable carbonate dehydratase (EC 4
  misc_feature (1)..(131): NCBI GI NO: 882246 NR Description: carbonic anhydrase 2
  misc_feature (1)..(131): NCBI GI NO: 882248 NR Description: carbonic anhydrase 1
MVPAYDKTKYTGIGSAIEYAVCALKVEVLVVIGHSCCGGIRALLSLQDGAPDNFHFVENWVKIGFPAKIKVKKDHASVPFDDQCSILEKEAVNLSLENLKTYPFVKEGLANGTLKLVGGHYNFVSGEFHPWH

SEQ ID NO: 38848 - DNA, 2485 bp, Zea mays subsp. mays
  misc_feature (1)..(2485): Ceres Seq. ID no. 12366523
gcacgagaccattacctagaacatcctaatcgaaaaaataagtgagcttccaggccggggagagggactggccggcggaccgccgatggaaaactttggaggctcctaacttccaagataccaactagctcccagcctcccaccgtcttctttccacccttggctgatgctagggagatgggatttttggagctctaagacaaatagttctgctccttgcgccctgcgtgttcttgatctggcctctaagtttgttggctgttttctcgtgtttgaggtgatatctcgattctaaaaagctaccagatttcttctccctgtttgtatggacaaatttgggaatgaaccctagtctgtgtgcaaagcagccaaattggtgttcttgcggatcaaagctaaagctgcagcagttggtgaggatacaagagatgcagggagaaacaagagaagggcttgttagattctgcagagacactcttattggttgatattttttccatcaactccggccagatttgcggaacctcgcaattttaggagccatttgatcttggacatggagaagcaacccagcgtgcgacatggtgccctagagaaactgaagagcttccgggggatggagaagcagagaagcttcaagttcttgtccatggagaagcagcagagcttcaaaaggaacaaggacagccctgggaagcggggtgacaccgcgctccacctcgcggcgagagctggcagtgtcgcacatgttcagaagatccttgcggagtgtgatccagaactggtggtggagttagctggccgcacgaatcaagacggcgagactgcgttgtatgtgtctgctgagaaagggcatgttgaggttgtgtgtgagattttgaaggcttcggatgtgcagtcagccgggatcaaggccagtaacagcttcgatgcattccatattgcggcaaagcagggccatttggatgtcttgaaggagctgttacaggcctttccctcattagcaatgacaacaaattctgtaaatgccacagctttggacactgctgcaactcagggccacgttgacattgttaatcttctgctagaaacagatgcaagccttgctaggattgcaagaaataatggcaagacagttttgcattcagcagcaagaatgggccatgtggaggtggtcactgcactgttaaataaggacccggggattgggtttagaacagataagaagggacaaacagctctacacatggcttcgaaaggccaaaatgcagaaattctgcttgagttgttgaagcctgatatctcagttatccatgtggaggacagcaaggggaatagaccattgcatgttgcaactcggaagggaaacaccattatggttcagaccctaatatcagttgaggggattgaaatcaatgcggttaatagagctggagagactgcttttgctattgcagataaacaaggtaatgaagagctcgtcaacatcctgagagaggtcggtggaggaactgcaaaagagcaagtaaatcctcctaatccagcaaagcagcttaagcagacagtcagcgatatcaggcatgatgttcaatcacagatgaagcaaacacgccagaccaagatgcaattccaaaaaatcaagaagaggattcagaagctccacattggtgggctaaacaatgccatcaactccaacactgttgttgcggtgcttattgccaccgttgcctttgctgccatattccaactccccggtaattttctggaggacatgactcaagcacctgacccagacatgaccttggggcaagcattgatagccagtgatccagcctttataatcttcttggttttcgatgctttggctctctttatctcgcttgctgtcgtagtagtccagacatctctaattgttgttgaacagaaggccaagaagaagatggtctttgtgataaacaagttgatgtggctcgcatgcctctgcatctcggcagccttcatagcgctaacctacgttgtcgtgggtcgagacgacgagtggctggcctggtgtactatggcaattggcactgttaccatggtggccactgtcggttccatgtgctactgcgttgtcgctcacaggatggaagagaagagcttgaggaagatcaggaggacctccatgagccagtcatggtccatatcaattgactcggaagcagagctgatgaacagtgagtacaagaagatgtatgccctttaggatgatgtctgttcttgtcggctgagtcttgtatatattggtacccatttgcctgagaccagtccatggcattgagtgggattgactcaatcagaactatatttagtcctagaacatggcacctgtatgtaactgtagtcttgcagcctccagacatgaacataggggtgaagtctaggtgataggtgtagtcactttttttgttggcaaaatacaaatattgccaagcatgatgtcccg

SEQ ID NO: 38849 - protein, 562 aa, Zea mays subsp. mays
  peptide (1)..(562): Ceres Seq. ID no. 12366524
  misc_feature (190)..(222): Pfam Name: Pfam Description:  Ankyrin repeat
  misc_feature (1)..(562): NCBI GI NO: 15225141 NR Description: ankyrin-like protein; protein id: At2g31820.1
  misc_feature (1)..(562): NCBI GI NO: 15220595 NR Description: unknown protein; protein id: At1g05640.1
  misc_feature (39)..(562): NCBI GI NO: 15222993 NR Description: hypothetical protein; protein id: At1g07710.1
  misc_feature (39)..(562): NCBI GI NO: 24796797 NR Description: putative ankyrin repeat containing protein
  misc_feature (42)..(562): NCBI GI NO: 15238604 NR Description: ankyrin-like protein; protein id: At5g60070.1
  misc_feature (42)..(562): NCBI GI NO: 11357168 NR Description: ankyrin-like protein - Arabidopsis thaliana
  misc_feature (42)..(562): NCBI GI NO: 30679697 NR Description: ankyrin repeat protein family
  misc_feature (32)..(562): NCBI GI NO: 15230470 NR Description: ankyrin-like protein; protein id: At3g12360.1
  misc_feature (32)..(562): NCBI GI NO: 21553618 NR Description: ankyrin-like protein [Arabidopsis thaliana]
  misc_feature (46)..(562): NCBI GI NO: 34908074 NR Description: P0506B12.26
MEKQPSVRHGALEKLKSFRGMEKQRSFKFLSMEKQQSFKRNKDSPGKRGDTALHLAARAGSVAHVQKILAECDPELVVELAGRTNQDGETALYVSAEKGHVEVVCEILKASDVQSAGIKASNSFDAFHIAAKQGHLDVLKELLQAFPSLAMTTNSVNATALDTAATQGHVDIVNLLLETDASLARIARNNGKTVLHSAARMGHVEVVTALLNKDPGIGFRTDKKGQTALHMASKGQNAEILLELLKPDISVIHVEDSKGNRPLHVATRKGNTIMVQTLISVEGIEINAVNRAGETAFAIADKQGNEELVNILREVGGGTAKEQVNPPNPAKQLKQTVSDIRHDVQSQMKQTRQTKMQFQKIKKRIQKLHIGGLNNAINSNTVVAVLIATVAFAAIFQLPGNFLEDMTQAPDPDMTLGQALIASDPAFIIFLVFDALALFISLAVVVVQTSLIVVEQKAKKKMVFVINKLMWLACLCISAAFIALTYVVVGRDDEWLAWCTMAIGTVTMVATVGSMCYCVVAHRMEEKSLRKIRRTSMSQSWSISIDSEAELMNSEYKKMYAL

SEQ ID NO: 38850 - protein, 542 aa, Zea mays subsp. mays
  peptide (1)..(542): Ceres Seq. ID no. 12366525
  misc_feature (170)..(202): Pfam Name: Pfam Description:  Ankyrin repeat
  misc_feature (1)..(542): NCBI GI NO: 15225141 NR Description: ankyrin-like protein; protein id: At2g31820.1
  misc_feature (1)..(542): NCBI GI NO: 15220595 NR Description: unknown protein; protein id: At1g05640.1
  misc_feature (19)..(542): NCBI GI NO: 15222993 NR Description: hypothetical protein; protein id: At1g07710.1
  misc_feature (19)..(542): NCBI GI NO: 24796797 NR Description: putative ankyrin repeat containing protein
  misc_feature (22)..(542): NCBI GI NO: 15238604 NR Description: ankyrin-like protein; protein id: At5g60070.1
  misc_feature (22)..(542): NCBI GI NO: 11357168 NR Description: ankyrin-like protein - Arabidopsis thaliana
  misc_feature (22)..(542): NCBI GI NO: 30679697 NR Description: ankyrin repeat protein family
  misc_feature (12)..(542): NCBI GI NO: 15230470 NR Description: ankyrin-like protein; protein id: At3g12360.1
  misc_feature (12)..(542): NCBI GI NO: 21553618 NR Description: ankyrin-like protein [Arabidopsis thaliana]
  misc_feature (26)..(542): NCBI GI NO: 34908074 NR Description: P0506B12.26
MEKQRSFKFLSMEKQQSFKRNKDSPGKRGDTALHLAARAGSVAHVQKILAECDPELVVELAGRTNQDGETALYVSAEKGHVEVVCEILKASDVQSAGIKASNSFDAFHIAAKQGHLDVLKELLQAFPSLAMTTNSVNATALDTAATQGHVDIVNLLLETDASLARIARNNGKTVLHSAARMGHVEVVTALLNKDPGIGFRTDKKGQTALHMASKGQNAEILLELLKPDISVIHVEDSKGNRPLHVATRKGNTIMVQTLISVEGIEINAVNRAGETAFAIADKQGNEELVNILREVGGGTAKEQVNPPNPAKQLKQTVSDIRHDVQSQMKQTRQTKMQFQKIKKRIQKLHIGGLNNAINSNTVVAVLIATVAFAAIFQLPGNFLEDMTQAPDPDMTLGQALIASDPAFIIFLVFDALALFISLAVVVVQTSLIVVEQKAKKKMVFVINKLMWLACLCISAAFIALTYVVVGRDDEWLAWCTMAIGTVTMVATVGSMCYCVVAHRMEEKSLRKIRRTSMSQSWSISIDSEAELMNSEYKKMYAL

SEQ ID NO: 38851 - protein, 531 aa, Zea mays subsp. mays
  peptide (1)..(531): Ceres Seq. ID no. 12366526
  misc_feature (159)..(191): Pfam Name: Pfam Description:  Ankyrin repeat
  misc_feature (1)..(531): NCBI GI NO: 15225141 NR Description: ankyrin-like protein; protein id: At2g31820.1
  misc_feature (1)..(531): NCBI GI NO: 15220595 NR Description: unknown protein; protein id: At1g05640.1
  misc_feature (8)..(531): NCBI GI NO: 15222993 NR Description: hypothetical protein; protein id: At1g07710.1
  misc_feature (8)..(531): NCBI GI NO: 24796797 NR Description: putative ankyrin repeat containing protein
  misc_feature (11)..(531): NCBI GI NO: 15238604 NR Description: ankyrin-like protein; protein id: At5g60070.1
  misc_feature (11)..(531): NCBI GI NO: 11357168 NR Description: ankyrin-like protein - Arabidopsis thaliana
  misc_feature (11)..(531): NCBI GI NO: 30679697 NR Description: ankyrin repeat protein family
  misc_feature (1)..(531): NCBI GI NO: 15230470 NR Description: ankyrin-like protein; protein id: At3g12360.1
  misc_feature (1)..(531): NCBI GI NO: 21553618 NR Description: ankyrin-like protein [Arabidopsis thaliana]
  misc_feature (15)..(531): NCBI GI NO: 34908074 NR Description: P0506B12.26
MEKQQSFKRNKDSPGKRGDTALHLAARAGSVAHVQKILAECDPELVVELAGRTNQDGETALYVSAEKGHVEVVCEILKASDVQSAGIKASNSFDAFHIAAKQGHLDVLKELLQAFPSLAMTTNSVNATALDTAATQGHVDIVNLLLETDASLARIARNNGKTVLHSAARMGHVEVVTALLNKDPGIGFRTDKKGQTALHMASKGQNAEILLELLKPDISVIHVEDSKGNRPLHVATRKGNTIMVQTLISVEGIEINAVNRAGETAFAIADKQGNEELVNILREVGGGTAKEQVNPPNPAKQLKQTVSDIRHDVQSQMKQTRQTKMQFQKIKKRIQKLHIGGLNNAINSNTVVAVLIATVAFAAIFQLPGNFLEDMTQAPDPDMTLGQALIASDPAFIIFLVFDALALFISLAVVVVQTSLIVVEQKAKKKMVFVINKLMWLACLCISAAFIALTYVVVGRDDEWLAWCTMAIGTVTMVATVGSMCYCVVAHRMEEKSLRKIRRTSMSQSWSISIDSEAELMNSEYKKMYAL

SEQ ID NO: 38852 - DNA, 1753 bp, Zea mays subsp. mays
  misc_feature (1)..(1753): Ceres Seq. ID no. 12417068
gcacgagaccattacctagaacatcctaatcgaaaaacagcgacagcaacacagcctcgcaagagaaagcaaagcaaagccaggagggaaagaaagaaatccttttcctacacctaaagagaccaccaaaccctgcgagcccaaaaaaaagccatggagtacaagagatcatcgcatgcggaagaggaagaagaggatgaggaggaagaagaagacgacgagaacgaggaagaagaggaggatgaggatgaggccagaggccttcgctacaccacggcggcggtggcacccgtaggcgctccgcagcagcagcggcagcaggtgcacgcccaagctcttggcctcggctcacacccctcccagctgatggattctgccgccttctcgaggccgctcttgcctcccaactcatctctggtgatgcagccaccgctgcctccaccaggcttcccgccggctcaccgccaacaaccgccgcatgcgcagctccatccgaggaaagcggagagggagagggacagagccgcgggagcgcagccccatgtccggcgccaccaccaagaaccagccaagaatggcgttctcggcggtggcgccgcgccaacgtcggcaccctctacgctcggcctcgtgcccgtggtggaagcggcccagctgtggaggtaccgggagtgcctgcggaaccacgcggcgcggcttggcgcgcacgtgctcgacggctgctgcgagttcatgccgtccgggggcgaaggggccgccgcgctggcctgcgccgcctgcggctgccaccgcagcttccaccggcgcgaggcggtccccggcggcggcgtggcggtgtcgccctcggcggcagtaacccccaccgccggcgccggcgccaactcctcccgcgccattccgctgctgctggccccgccgcacatgcacacgcgcccgccgcaccacgtgccggcgtccccggcgtccgcgcccgccgcgctggccgagtcgtccagcgaggagctgcgcggccccgcgcccccgacgcacgcgcacgcgcacccgccccacgcgcaggtggccgtagtaggagggtcggcctccgctccccccgcgccgagcaagaagcgtttccggaccaagttcacggcggagcagaaggacctcatgcgcgagttcgcgcaccgcgtcgggtggcgcgtccacaagcccgacgccgacgccgtggacgccttctgcgcccaggtcggcgtctcccggcgcgtcctcaaggtgtggatgcacaacaacaagcacctcgccaaggtcccgccctcgcccccatcctcctcctacccacagccactgcctcgccaccacccgcctccacctccgctccacatccaccatcacccgccgccgccgccgcagcagcagccgcagcagcagcagcatgatgcatgagtaccgagtagccgcagagcaacgcgagaggatcagacgatgccattagcttattagctcctttatttatccttcttcttcttcttcccttgtaatttcagtgacatcccagttgttaaggagttgactcatcatgcagcagttaggagggattaatatgattgtgtgacctaatctcatctcagccatactcctactacaagtcatcccctcgtcctcgttgctttcttggacgacctacctccattattaggttattagcatcagtggcgcttgcattggtatcttgcttatggtaatgacctaataatgatcactgtgttttagagct

SEQ ID NO: 38853 - protein, 422 aa, Zea mays subsp. mays
  peptide (1)..(422): Ceres Seq. ID no. 12417069
  misc_feature (166)..(219): Pfam Name: Pfam Description:  ZF-HD protein dimerisation region
  misc_feature (1)..(422): NCBI GI NO: 19387257 NR Description: hypothetical protein
  misc_feature (249)..(385): NCBI GI NO: 18410804 NR Description: expressed protein; protein id: At1g75240
  misc_feature (170)..(219): NCBI GI NO: 18410804 NR Description: expressed protein; protein id: At1g75240
  misc_feature (171)..(377): NCBI GI NO: 15228530 NR Description: unknown protein; protein id: At3g28920
  misc_feature (245)..(373): NCBI GI NO: 15242243 NR Description: putative protein; protein id: At5g15210.1
  misc_feature (164)..(236): NCBI GI NO: 15242243 NR Description: putative protein; protein id: At5g15210.1
  misc_feature (119)..(373): NCBI GI NO: 13277220 NR Description: ZF-HD homeobox protein [Flaveria bidentis]
  misc_feature (256)..(379): NCBI GI NO: 13374061 NR Description: ZF-HD homeobox protein [Flaveria bidentis]
  misc_feature (169)..(219): NCBI GI NO: 13374061 NR Description: ZF-HD homeobox protein [Flaveria bidentis]
  misc_feature (161)..(254): NCBI GI NO: 15230335 NR Description: putative protein; protein id: At3g50890
MEYKRSSHAEEEEEDEEEEEDDENEEEEEDEDEARGLRYTTAAVAPVGAPQQQRQQVHAQALGLGSHPSQLMDSAAFSRPLLPPNSSLVMQPPLPPPGFPPAHRQQPPHAQLHPRKAERERDRAAGAQPHVRRHHQEPAKNGVLGGGAAPTSAPSTLGLVPVVEAAQLWRYRECLRNHAARLGAHVLDGCCEFMPSGGEGAAALACAACGCHRSFHRREAVPGGGVAVSPSAAVTPTAGAGANSSRAIPLLLAPPHMHTRPPHHVPASPASAPAALAESSSEELRGPAPPTHAHAHPPHAQVAVVGGSASAPPAPSKKRFRTKFTAEQKDLMREFAHRVGWRVHKPDADAVDAFCAQVGVSRRVLKVWMHNNKHLAKVPPSPPSSSYPQPLPRHHPPPPPLHIHHHPPPPPQQQPQQQQHDA

SEQ ID NO: 38854 - protein, 351 aa, Zea mays subsp. mays
  peptide (1)..(351): Ceres Seq. ID no. 12417070
  misc_feature (95)..(148): Pfam Name: Pfam Description:  ZF-HD protein dimerisation region
  misc_feature (1)..(351): NCBI GI NO: 19387257 NR Description: hypothetical protein
  misc_feature (178)..(314): NCBI GI NO: 18410804 NR Description: expressed protein; protein id: At1g75240
  misc_feature (99)..(148): NCBI GI NO: 18410804 NR Description: expressed protein; protein id: At1g75240
  misc_feature (100)..(306): NCBI GI NO: 15228530 NR Description: unknown protein; protein id: At3g28920
  misc_feature (174)..(302): NCBI GI NO: 15242243 NR Description: putative protein; protein id: At5g15210.1
  misc_feature (93)..(165): NCBI GI NO: 15242243 NR Description: putative protein; protein id: At5g15210.1
  misc_feature (48)..(302): NCBI GI NO: 13277220 NR Description: ZF-HD homeobox protein [Flaveria bidentis]
  misc_feature (185)..(308): NCBI GI NO: 13374061 NR Description: ZF-HD homeobox protein [Flaveria bidentis]
  misc_feature (98)..(148): NCBI GI NO: 13374061 NR Description: ZF-HD homeobox protein [Flaveria bidentis]
  misc_feature (90)..(183): NCBI GI NO: 15230335 NR Description: putative protein; protein id: At3g50890
MDSAAFSRPLLPPNSSLVMQPPLPPPGFPPAHRQQPPHAQLHPRKAERERDRAAGAQPHVRRHHQEPAKNGVLGGGAAPTSAPSTLGLVPVVEAAQLWRYRECLRNHAARLGAHVLDGCCEFMPSGGEGAAALACAACGCHRSFHRREAVPGGGVAVSPSAAVTPTAGAGANSSRAIPLLLAPPHMHTRPPHHVPASPASAPAALAESSSEELRGPAPPTHAHAHPPHAQVAVVGGSASAPPAPSKKRFRTKFTAEQKDLMREFAHRVGWRVHKPDADAVDAFCAQVGVSRRVLKVWMHNNKHLAKVPPSPPSSSYPQPLPRHHPPPPPLHIHHHPPPPPQQQPQQQQHDA

SEQ ID NO: 38855 - protein, 333 aa, Zea mays subsp. mays
  peptide (1)..(333): Ceres Seq. ID no. 12417071
  misc_feature (77)..(130): Pfam Name: Pfam Description:  ZF-HD protein dimerisation region
  misc_feature (1)..(333): NCBI GI NO: 19387257 NR Description: hypothetical protein
  misc_feature (160)..(296): NCBI GI NO: 18410804 NR Description: expressed protein; protein id: At1g75240
  misc_feature (81)..(130): NCBI GI NO: 18410804 NR Description: expressed protein; protein id: At1g75240
  misc_feature (82)..(288): NCBI GI NO: 15228530 NR Description: unknown protein; protein id: At3g28920
  misc_feature (156)..(284): NCBI GI NO: 15242243 NR Description: putative protein; protein id: At5g15210.1
  misc_feature (75)..(147): NCBI GI NO: 15242243 NR Description: putative protein; protein id: At5g15210.1
  misc_feature (30)..(284): NCBI GI NO: 13277220 NR Description: ZF-HD homeobox protein [Flaveria bidentis]
  misc_feature (167)..(290): NCBI GI NO: 13374061 NR Description: ZF-HD homeobox protein [Flaveria bidentis]
  misc_feature (80)..(130): NCBI GI NO: 13374061 NR Description: ZF-HD homeobox protein [Flaveria bidentis]
  misc_feature (72)..(165): NCBI GI NO: 15230335 NR Description: putative protein; protein id: At3g50890
MQPPLPPPGFPPAHRQQPPHAQLHPRKAERERDRAAGAQPHVRRHHQEPAKNGVLGGGAAPTSAPSTLGLVPVVEAAQLWRYRECLRNHAARLGAHVLDGCCEFMPSGGEGAAALACAACGCHRSFHRREAVPGGGVAVSPSAAVTPTAGAGANSSRAIPLLLAPPHMHTRPPHHVPASPASAPAALAESSSEELRGPAPPTHAHAHPPHAQVAVVGGSASAPPAPSKKRFRTKFTAEQKDLMREFAHRVGWRVHKPDADAVDAFCAQVGVSRRVLKVWMHNNKHLAKVPPSPPSSSYPQPLPRHHPPPPPLHIHHHPPPPPQQQPQQQQHDA

SEQ ID NO: 38856 - DNA, 2248 bp, Zea mays subsp. mays
  misc_feature (1)..(2248): Ceres Seq. ID no. 12368259
gcacgagaccattacctagaacatcctaatcgaaaagagctagcgtctcttgcacagagacaggcccagggaggccgcgatggcgaacctgacgaacggctttgcgagcctccattgcgcaggggcgatgcatgtggacaaagggcacatgcaagcatcgggactgccttttctctctttcagaagatgcgcccagcttgatatctccagactaggtagcgtgcctcgtttcatgggcgcaacatctgctactgtctcccaacatcatgtgaggcagaggatcagcgccatcagagcctctactctttcctgcctgcaagacgatgccacaaaattctttgattttgtggttattggcagcggtgttgctggcctaaggtatgctctggaagtttcaaagcacggctctgttgctattatcaccaaggcagagcctcatgagagcaacacaaactatgcacaaggcggtgttagtgccgttctatgcccctcggattctgtagaaagtcacatgaaagacacaattgttgcaggggcttatttgtgcgatgaagagattgtcagggtagtttgcacagaaggtccagagcgtgtcaaggaactaattgccatgggtgcctcattcgaccatggtgaagatggtaggctgcaccttgcaagggaaggtggtcattctcacaacagaattgtccattctgccgatatgactggaagagagattgaaagagcactgcttcaagcagttcacaatgatgataacatatctttgtttggtcatcactttgctattgatctattgacatgtcagaaaaatggtgaaatctattgctatggagtggattcaatagacattgaaacccagaaggtagtccgcttcatctcgaaagtgacattgcttgcatcaggaggagctggccatatatatcccacaaccaccaatccaccggtagctactggggacggaatcgcaatgtgtcatcgtgctcaggctgtaatatccaatatggagtttgtgcagttccatccaactgcactttcagatgagggcctgccaataaagccaaagacaagaagagagaatgcatttctcataacggaagcggtgagaggagacggaggaattctttacaaccagtccatggagagattcatgccgatgtacgatgaccgctcggagctggcgccgagagacgtggttgcgaggagcatagacgaccagctgaagaaacgaggcgaaaagtatgtcctcctggacatcagccacagaccaagagacaaggttcttgcccacttccccaacatcgccgccgagtgcctgcggtacggcctggacatcacccggcagcccatcccggtggtcccggcggcgcactacatgtgcggcggcgtccgggcagggctgcagggggagaccaacgtgaagggcctctacgtggccggcgaggtcgcgtgcacggggctgcacggtgccaaccggctagcaagcaactcgctgctggaagcgctggtgttcgccaggagggcggtgcagccgtccatcgacctcatggtggatgccgacggagatgccagaccgtcgctggtggcgaggtgggcacggccgacgctgccgcggtcggtgctgggcgacagcgtgctgtcggacatcgtggggcggacgaggcaggccaggatggagctgcaatcagtgatgtgggagtatgtcggcatcgtgcgctcgacggggcggctgaagcaggccgagtggaggatcggtgacctggagtcggagtgggaggagttcctgttccggcgggggtggaagccgaccacggtgggcgtcgaggtctgcgagatgcgcaacctcttctgctgcgccaagctcgtcgtcaggagcgcgctggccaggcgcgagagccgcggcctgcacttcaccgaggacttcccgtacctggaggagagcaggaggaagcctacggtcatcttcccggccgccgtgcaggagctcacgtggagctccaagccgttgcagaggcagctgcaagcagatgacaatgcatgcagttcatccggctgggccttggggattcgttaattcattcattaatttttaagaactctcagtcgacagcatacacaaaatccagacagttaggctgtagtagcctgcgtatctttgcaattcttgccagttccagctgttgcaacttgtaaacggtgttgttggagctgcattatggtttatgaaccttgatccgtagtatatgtt

SEQ ID NO: 38857 - protein, 664 aa, Zea mays subsp. mays
  peptide (1)..(664): Ceres Seq. ID no. 12368260
  misc_feature (184)..(482): Pfam Name: Pfam Description:  FAD binding domain
  misc_feature (71)..(644): NCBI GI NO: 18417469 NR Description: L-aspartate oxidase -like protein
  misc_feature (71)..(644): NCBI GI NO: 11252514 NR Description: L-aspartate oxidase-like protein
  misc_feature (87)..(568): NCBI GI NO: 30249844 NR Description: nadB1; l-aspartate oxidase
  misc_feature (533)..(616): NCBI GI NO: 30249844 NR Description: nadB1; l-aspartate oxidase
  misc_feature (88)..(620): NCBI GI NO: 21673396 NR Description: L-aspartate oxidase [Chlorobium tepidum TLS]
  misc_feature (88)..(616): NCBI GI NO: 39996926 NR Description: L-aspartate oxidase [Geobacter sulfurreducens PCA]
  misc_feature (88)..(628): NCBI GI NO: 24214211 NR Description: L-aspartate oxidase
  misc_feature (87)..(620): NCBI GI NO: 29348593 NR Description: L-aspartate oxidase
  misc_feature (87)..(616): NCBI GI NO: 22983294 NR Description: hypothetical protein [Burkholderia fungorum]
  misc_feature (88)..(628): NCBI GI NO: 22998899 NR Description: hypothetical protein [Magnetococcus sp. MC-1]
MANLTNGFASLHCAGAMHVDKGHMQASGLPFLSFRRCAQLDISRLGSVPRFMGATSATVSQHHVRQRISAIRASTLSCLQDDATKFFDFVVIGSGVAGLRYALEVSKHGSVAIITKAEPHESNTNYAQGGVSAVLCPSDSVESHMKDTIVAGAYLCDEEIVRVVCTEGPERVKELIAMGASFDHGEDGRLHLAREGGHSHNRIVHSADMTGREIERALLQAVHNDDNISLFGHHFAIDLLTCQKNGEIYCYGVDSIDIETQKVVRFISKVTLLASGGAGHIYPTTTNPPVATGDGIAMCHRAQAVISNMEFVQFHPTALSDEGLPIKPKTRRENAFLITEAVRGDGGILYNQSMERFMPMYDDRSELAPRDVVARSIDDQLKKRGEKYVLLDISHRPRDKVLAHFPNIAAECLRYGLDITRQPIPVVPAAHYMCGGVRAGLQGETNVKGLYVAGEVACTGLHGANRLASNSLLEALVFARRAVQPSIDLMVDADGDARPSLVARWARPTLPRSVLGDSVLSDIVGRTRQARMELQSVMWEYVGIVRSTGRLKQAEWRIGDLESEWEEFLFRRGWKPTTVGVEVCEMRNLFCCAKLVVRSALARRESRGLHFTEDFPYLEESRRKPTVIFPAAVQELTWSSKPLQRQLQADDNACSSSGWALGIR

SEQ ID NO: 38858 - protein, 648 aa, Zea mays subsp. mays
  peptide (1)..(648): Ceres Seq. ID no. 12368261
  misc_feature (168)..(466): Pfam Name: Pfam Description:  FAD binding domain
  misc_feature (55)..(628): NCBI GI NO: 18417469 NR Description: L-aspartate oxidase -like protein
  misc_feature (55)..(628): NCBI GI NO: 11252514 NR Description: L-aspartate oxidase-like protein
  misc_feature (71)..(552): NCBI GI NO: 30249844 NR Description: nadB1; l-aspartate oxidase
  misc_feature (517)..(600): NCBI GI NO: 30249844 NR Description: nadB1; l-aspartate oxidase
  misc_feature (72)..(604): NCBI GI NO: 21673396 NR Description: L-aspartate oxidase [Chlorobium tepidum TLS]
  misc_feature (72)..(600): NCBI GI NO: 39996926 NR Description: L-aspartate oxidase [Geobacter sulfurreducens PCA]
  misc_feature (72)..(612): NCBI GI NO: 24214211 NR Description: L-aspartate oxidase
  misc_feature (71)..(604): NCBI GI NO: 29348593 NR Description: L-aspartate oxidase
  misc_feature (71)..(600): NCBI GI NO: 22983294 NR Description: hypothetical protein [Burkholderia fungorum]
  misc_feature (72)..(612): NCBI GI NO: 22998899 NR Description: hypothetical protein [Magnetococcus sp. MC-1]
MHVDKGHMQASGLPFLSFRRCAQLDISRLGSVPRFMGATSATVSQHHVRQRISAIRASTLSCLQDDATKFFDFVVIGSGVAGLRYALEVSKHGSVAIITKAEPHESNTNYAQGGVSAVLCPSDSVESHMKDTIVAGAYLCDEEIVRVVCTEGPERVKELIAMGASFDHGEDGRLHLAREGGHSHNRIVHSADMTGREIERALLQAVHNDDNISLFGHHFAIDLLTCQKNGEIYCYGVDSIDIETQKVVRFISKVTLLASGGAGHIYPTTTNPPVATGDGIAMCHRAQAVISNMEFVQFHPTALSDEGLPIKPKTRRENAFLITEAVRGDGGILYNQSMERFMPMYDDRSELAPRDVVARSIDDQLKKRGEKYVLLDISHRPRDKVLAHFPNIAAECLRYGLDITRQPIPVVPAAHYMCGGVRAGLQGETNVKGLYVAGEVACTGLHGANRLASNSLLEALVFARRAVQPSIDLMVDADGDARPSLVARWARPTLPRSVLGDSVLSDIVGRTRQARMELQSVMWEYVGIVRSTGRLKQAEWRIGDLESEWEEFLFRRGWKPTTVGVEVCEMRNLFCCAKLVVRSALARRESRGLHFTEDFPYLEESRRKPTVIFPAAVQELTWSSKPLQRQLQADDNACSSSGWALGIR

SEQ ID NO: 38859 - protein, 641 aa, Zea mays subsp. mays
  peptide (1)..(641): Ceres Seq. ID no. 12368262
  misc_feature (161)..(459): Pfam Name: Pfam Description:  FAD binding domain
  misc_feature (48)..(621): NCBI GI NO: 18417469 NR Description: L-aspartate oxidase -like protein
  misc_feature (48)..(621): NCBI GI NO: 11252514 NR Description: L-aspartate oxidase-like protein
  misc_feature (64)..(545): NCBI GI NO: 30249844 NR Description: nadB1; l-aspartate oxidase
  misc_feature (510)..(593): NCBI GI NO: 30249844 NR Description: nadB1; l-aspartate oxidase
  misc_feature (65)..(597): NCBI GI NO: 21673396 NR Description: L-aspartate oxidase [Chlorobium tepidum TLS]
  misc_feature (65)..(593): NCBI GI NO: 39996926 NR Description: L-aspartate oxidase [Geobacter sulfurreducens PCA]
  misc_feature (65)..(605): NCBI GI NO: 24214211 NR Description: L-aspartate oxidase
  misc_feature (64)..(597): NCBI GI NO: 29348593 NR Description: L-aspartate oxidase
  misc_feature (64)..(593): NCBI GI NO: 22983294 NR Description: hypothetical protein [Burkholderia fungorum]
  misc_feature (65)..(605): NCBI GI NO: 22998899 NR Description: hypothetical protein [Magnetococcus sp. MC-1]
MQASGLPFLSFRRCAQLDISRLGSVPRFMGATSATVSQHHVRQRISAIRASTLSCLQDDATKFFDFVVIGSGVAGLRYALEVSKHGSVAIITKAEPHESNTNYAQGGVSAVLCPSDSVESHMKDTIVAGAYLCDEEIVRVVCTEGPERVKELIAMGASFDHGEDGRLHLAREGGHSHNRIVHSADMTGREIERALLQAVHNDDNISLFGHHFAIDLLTCQKNGEIYCYGVDSIDIETQKVVRFISKVTLLASGGAGHIYPTTTNPPVATGDGIAMCHRAQAVISNMEFVQFHPTALSDEGLPIKPKTRRENAFLITEAVRGDGGILYNQSMERFMPMYDDRSELAPRDVVARSIDDQLKKRGEKYVLLDISHRPRDKVLAHFPNIAAECLRYGLDITRQPIPVVPAAHYMCGGVRAGLQGETNVKGLYVAGEVACTGLHGANRLASNSLLEALVFARRAVQPSIDLMVDADGDARPSLVARWARPTLPRSVLGDSVLSDIVGRTRQARMELQSVMWEYVGIVRSTGRLKQAEWRIGDLESEWEEFLFRRGWKPTTVGVEVCEMRNLFCCAKLVVRSALARRESRGLHFTEDFPYLEESRRKPTVIFPAAVQELTWSSKPLQRQLQADDNACSSSGWALGIR

SEQ ID NO: 38860 - DNA, 705 bp, Zea mays subsp. mays
  misc_feature (1)..(705): Ceres Seq. ID no. 12354738
atccgcacactgaatcacgaatctctcgagccgcagtccagtccatccggctgcaggctctctgctgattctgagtacgttggcgttccaggcgatagctagcttagcttggcttggcacagtcgatcgtctccgatggcggcggacatgcagattgtcctggccgcggggaggaagatcgaggcgcagtatgtgagatgaaggtgccgctctactcctacggctgcgagaagaagatcaagaaggcactgtcacatctcaaaggtatacattcggttcaggcagactaccacgagcagaaggtgaccgtgtgggggatctgcgaccgcgacgacgtgctcgctgccgtccggaagaagcgccgagccgcgcggttctgggatgatgatggcggcgaactgggtccacgcgagcgtgcgccgacgcccggccgagaagctcccaagcagtacctggcagccttcgccgcgtacaggtggaggaagtcgtggaagaagcttttcccgctgatccgcctctgaagctcaccgtgtgtgcttaagcttattggcttctagcttctccacaagtgagcagtgtgtgtgcctgcgtcttgacgacgtctcaggaaccggaaaaaggggttggaacatggaacttaagttctaacagtagcccgtgcttcttggtagcaaataaacatgcttcgttaccgaagccttttgg

SEQ ID NO: 38861 - protein, 107 aa, Zea mays subsp. mays
  peptide (1)..(107): Ceres Seq. ID no. 12354739
  misc_feature (1)..(107): NCBI GI NO: 38346796 NR Description: OSJNBa0088A01.3
  misc_feature (1)..(62): NCBI GI NO: 7487518 NR Description: hypothetical protein T29A15
  misc_feature (1)..(62): NCBI GI NO: 18417024 NR Description: Expressed protein; protein id: At4g27590
  misc_feature (1)..(62): NCBI GI NO: 21536757 NR Description: unknown [Arabidopsis thaliana]
  misc_feature (1)..(61): NCBI GI NO: 15221451 NR Description: hypothetical protein; protein id: At1g06330.1
  misc_feature (1)..(61): NCBI GI NO: 25406916 NR Description: hypothetical protein
  misc_feature (1)..(93): NCBI GI NO: 37536458 NR Description: hypothetical protein
  misc_feature (1)..(86): NCBI GI NO: 21397273 NR Description: Putative atfp6-like protein
  misc_feature (1)..(84): NCBI GI NO: 11290106 NR Description: copper chaperone homolog CCH [imported] - soybean
  misc_feature (1)..(61): NCBI GI NO: 15235984 NR Description: copper chaperone
MKVPLYSYGCEKKIKKALSHLKGIHSVQADYHEQKVTVWGICDRDDVLAAVRKKRRAARFWDDDGGELGPRERAPTPGREAPKQYLAAFAAYRWRKSWKKLFPLIRL

SEQ ID NO: 38862 - DNA, 2501 bp, Zea mays subsp. mays
  misc_feature (1)..(2501): Ceres Seq. ID no. 12363395
gcacgagaccattacctagaacatcctaatcgaaaaatcggagctctataaatcgccccaaccccctccctcgttctgccaccattgccatatcctcgatcacaagagcagctactagctgcctctagctcgatcggttagtttgtcgtgttgcttacgtacgtcagcagaggccatcgtcgagtgtatccagtggtcgagaagagggaagaaatgtctgcgaacgacggcgccggcgacacgaagatgagggcgatcgtcgtcgtagaggaaggggagatgagcgcgccggcggcgacgccgaagcagggcaagtgctgcgagtacacgctggacggctccgtcgacatgaagggccggccggcggtcaaggggaaatcaggagggtggcttgccggtgctctaatcctcgtgaaccagggcctggcgacgctggctttcttcggcgtgaacgtgaacctggtgctgttccctgacccgggtgctggggcagagcaatggcgacgccgccaacaacgtcagcaagtggacgggcaccgtgtacatgttctccctcatcggcgccttcctcagcgactcctattggggacgctacaagacctgcgccatcttccaggccatctttgtcctcggcctcgcgctgctgtcggtgtcgtcgcacctctacctaatcaggccggacgggtgcggcatggagcacgcgccctgcggcccgcactccggcaaggagctggggatcttctacatcgcgctgtacatgatcgccttcggcaacggcgggtaccagcccaacatcgccaccctgggcgccgaccagttcgacgaggaggaccccgccgaggcgcactccaaggtctccttcttcagctacttctacctcgccctcaacctcggctcgctcttctccaacaccttcctcagctacctcgaggacaagggcagctgggcgctcggcttctgggcctccaccgccgccgccgccacagcgctcctgcttttcctcagcggcacgctccggtaccgctatttccagcccggagggaacccgatcggaaggattggccaggtcgccatcgccgcgtgcaggaactggaaggcgggcgtgtcgaccgaagtggtaagcctgtacgagggcgacgagaaggcggatgccggtggcaggaagcttctgcacacgcaagggttcagtttcttggaccgcgcggcgcacgcggacactgactccaagctcggcgcgcgcgatccctggaagctgtgctcggtgacgcaggtggaggaggtcaagagcatcctgaggctcctccccatctggctctgcaccatcctctactccgttgtcttcacccagatggcctcgctctttgtcgtgcagggcgccgcgatgcgccgcaccaccccgttctccggcttctccgtcccgccctccagcatgtcggccttcgacattctcacagtcgccgccacgattttcctgtaccgccgcactatctgcccgttcctagcgcggctcagcggccgcccggctggccccaccgagctgcagaggatgggcctcggcctggtcgtgggtgccctggccatgaccacggccgggacggtcgagcacttccggaaggccagggccaccgcagcgatgagcagcgacctgcatatcatgtggcaggtgccgcagtatgcgctgatcggcgtgtcggaggtgatgatgtacgtcgggcagctcgagttcttcaacggccagatgcccgacgggctcaaaagcttcggagcgcgctgtgcatgatgtccatgtcgctcggcaactacttcagtgacatcatcgtgagcgcggtgaccaggctcaccacgacgcgagggcggtccgggtggatcccggctgacctcaacgaggggcacctcgacaagttctacttcctgctcgccgtgctggccgtcgcggacttcgcggtgtacctcgtatgcgcgagccgctacgggagcggcaaagtggacgggaggagcagcgacgacgaggaggagggagcggccggtcaggtgacatccccggcttacgcatgaccatcaccggccgcccggccggcgggcatcgtacgtatgttgttcttgtcttcttgaggtggaggctggcaggctgcaaatctcgagggccattggttatttggttgacggagttcttccattgacgacgatagcacaagcatggggcgagcatggacatagtgatatgactaattaaagaataagcacttaagcaggactagctaaacactacatgctgcagcatcatgctcgcggtttttggccagtgtaacaacagacgacgattgttactgaccacgactgttctttgcgtggtctacagagttcgcttctgcaaaattcaataatgggcgagtgctgtatcatataaagtcgcaggttgcgccacgtagctacgatgtgactaacaaacaaatatgtattcaagttatgtattaaacggttaaccgtgtctttttaccgtt

SEQ ID NO: 38863 - protein, 411 aa, Zea mays subsp. mays
  peptide (1)..(411): Ceres Seq. ID no. 12363396
  misc_feature (17)..(410): Pfam Name: Pfam Description:  POT family
  misc_feature (1)..(410): NCBI GI NO: 25513683 NR Description: F5D14.23 protein - Arabidopsis thaliana
  misc_feature (1)..(410): NCBI GI NO: 30692706 NR Description: peptide transporter PTR2-B -related
  misc_feature (1)..(410): NCBI GI NO: 30685529 NR Description: peptide transporter - like protein
  misc_feature (1)..(410): NCBI GI NO: 26451333 NR Description: putative peptide transporter
  misc_feature (1)..(410): NCBI GI NO: 7488004 NR Description: peptide transport protein homolog F17L22
  misc_feature (1)..(411): NCBI GI NO: 15241147 NR Description: peptide transport protein-like
  misc_feature (1)..(405): NCBI GI NO: 15076661 NR Description: peptide transporter
  misc_feature (1)..(405): NCBI GI NO: 7489404 NR Description: peptide transport protein - barley
  misc_feature (1)..(405): NCBI GI NO: 34895718 NR Description: putative peptide transport protein
  misc_feature (1)..(405): NCBI GI NO: 30696666 NR Description: oligopeptide transporter -related
MFSLIGAFLSDSYWGRYKTCAIFQAIFVLGLALLSVSSHLYLIRPDGCGMEHAPCGPHSGKELGIFYIALYMIAFGNGGYQPNIATLGADQFDEEDPAEAHSKVSFFSYFYLALNLGSLFSNTFLSYLEDKGSWALGFWASTAAAATALLLFLSGTLRYRYFQPGGNPIGRIGQVAIAACRNWKAGVSTEVVSLYEGDEKADAGGRKLLHTQGFSFLDRAAHADTDSKLGARDPWKLCSVTQVEEVKSILRLLPIWLCTILYSVVFTQMASLFVVQGAAMRRTTPFSGFSVPPSSMSAFDILTVAATIFLYRRTICPFLARLSGRPAGPTELQRMGLGLVVGALAMTTAGTVEHFRKARATAAMSSDLHIMWQVPQYALIGVSEVMMYVGQLEFFNGQMPDGLKSFGARCA

SEQ ID NO: 38864 - protein, 362 aa, Zea mays subsp. mays
  peptide (1)..(362): Ceres Seq. ID no. 12363397
  misc_feature (1)..(361): Pfam Name: Pfam Description:  POT family
  misc_feature (1)..(361): NCBI GI NO: 25513683 NR Description: F5D14.23 protein - Arabidopsis thaliana
  misc_feature (1)..(361): NCBI GI NO: 30692706 NR Description: peptide transporter PTR2-B -related
  misc_feature (1)..(361): NCBI GI NO: 30685529 NR Description: peptide transporter - like protein
  misc_feature (1)..(361): NCBI GI NO: 26451333 NR Description: putative peptide transporter
  misc_feature (1)..(361): NCBI GI NO: 7488004 NR Description: peptide transport protein homolog F17L22
  misc_feature (1)..(362): NCBI GI NO: 15241147 NR Description: peptide transport protein-like
  misc_feature (1)..(356): NCBI GI NO: 15076661 NR Description: peptide transporter
  misc_feature (1)..(356): NCBI GI NO: 7489404 NR Description: peptide transport protein - barley
  misc_feature (1)..(356): NCBI GI NO: 34895718 NR Description: putative peptide transport protein
  misc_feature (1)..(356): NCBI GI NO: 30696666 NR Description: oligopeptide transporter -related
MEHAPCGPHSGKELGIFYIALYMIAFGNGGYQPNIATLGADQFDEEDPAEAHSKVSFFSYFYLALNLGSLFSNTFLSYLEDKGSWALGFWASTAAAATALLLFLSGTLRYRYFQPGGNPIGRIGQVAIAACRNWKAGVSTEVVSLYEGDEKADAGGRKLLHTQGFSFLDRAAHADTDSKLGARDPWKLCSVTQVEEVKSILRLLPIWLCTILYSVVFTQMASLFVVQGAAMRRTTPFSGFSVPPSSMSAFDILTVAATIFLYRRTICPFLARLSGRPAGPTELQRMGLGLVVGALAMTTAGTVEHFRKARATAAMSSDLHIMWQVPQYALIGVSEVMMYVGQLEFFNGQMPDGLKSFGARCA

SEQ ID NO: 38865 - protein, 340 aa, Zea mays subsp. mays
  peptide (1)..(340): Ceres Seq. ID no. 12363398
  misc_feature (1)..(339): Pfam Name: Pfam Description:  POT family
  misc_feature (1)..(339): NCBI GI NO: 25513683 NR Description: F5D14.23 protein - Arabidopsis thaliana
  misc_feature (1)..(339): NCBI GI NO: 30692706 NR Description: peptide transporter PTR2-B -related
  misc_feature (1)..(339): NCBI GI NO: 30685529 NR Description: peptide transporter - like protein
  misc_feature (1)..(339): NCBI GI NO: 26451333 NR Description: putative peptide transporter
  misc_feature (1)..(339): NCBI GI NO: 7488004 NR Description: peptide transport protein homolog F17L22
  misc_feature (1)..(340): NCBI GI NO: 15241147 NR Description: peptide transport protein-like
  misc_feature (1)..(334): NCBI GI NO: 15076661 NR Description: peptide transporter
  misc_feature (1)..(334): NCBI GI NO: 7489404 NR Description: peptide transport protein - barley
  misc_feature (1)..(334): NCBI GI NO: 34895718 NR Description: putative peptide transport protein
  misc_feature (1)..(334): NCBI GI NO: 30696666 NR Description: oligopeptide transporter -related
MIAFGNGGYQPNIATLGADQFDEEDPAEAHSKVSFFSYFYLALNLGSLFSNTFLSYLEDKGSWALGFWASTAAAATALLLFLSGTLRYRYFQPGGNPIGRIGQVAIAACRNWKAGVSTEVVSLYEGDEKADAGGRKLLHTQGFSFLDRAAHADTDSKLGARDPWKLCSVTQVEEVKSILRLLPIWLCTILYSVVFTQMASLFVVQGAAMRRTTPFSGFSVPPSSMSAFDILTVAATIFLYRRTICPFLARLSGRPAGPTELQRMGLGLVVGALAMTTAGTVEHFRKARATAAMSSDLHIMWQVPQYALIGVSEVMMYVGQLEFFNGQMPDGLKSFGARCA

SEQ ID NO: 38866 - DNA, 903 bp, Zea mays subsp. mays
  misc_feature (1)..(903): Ceres Seq. ID no. 12354714
agttcttgcacctcacgattcgttcggtttcttttcgttctagcatcgtccagctctcacacgcagcctatttgtccctgcgccctctgatgaatataccagctcaaagttagaacaggcatgggtggatcggtttgtgattttaatagttagagcagccatgaataaacaactccggtctctgtcatctgtttatcatggcagtcgctctcgaccagcgtcggggatggagcgaaatggctggtgaacaagctgaagggcaagatgcagaagccgctggcggacctgctcaaggagcacaacctccccgtgggcctgttcccgcgcgaggcgaccaactacgagttcgtgccagagacgcggcgcctgacggtgtacatcccgtccccctgcgaggtcggctaccgcgacggctccgagctgcggttcgacgccacggtgtcgggcacgctgggcgagggccgcctcacggaggtggaagggatcaagaccaaggtgctcgtctgggccagggtcaccgccgtcaaggccgacgccgccaaggtccacttcaccgccgggatcaagaggtcgcgcagccgggacgcctacgaggtcgtcaggggcggcatcaccgtcgacgaattctagcttagttttgctttcgcggctcacatggatggacgggcttcctcttgctcgctgcacgctgagatggacagattgttgctttcagttgcaggaataaattctacacccattagctatgtgggagatctgcgtgcactgtgcatcgtgtgttttgtgctttgttgtgagaatgtaacacctgaaggattcagaacgtgtgctcattgcttatgatatatgtctcgtgtcaggttttagcaacaaaatgtcccgagcagagctcgatgcagctct

SEQ ID NO: 38867 - protein, 145 aa, Zea mays subsp. mays
  peptide (1)..(145): Ceres Seq. ID no. 12354715
MAVALDQRRGWSEMAGEQAEGQDAEAAGGPAQGAQPPRGPVPARGDQLRVRARDAAPDGVHPVPLRGRLPRRLRAAVRRHGVGHAGRGPPHGGGRDQDQGARLGQGHRRQGRRRQGPLHRRDQEVAQPGRLRGRQGRHHRRRILA

SEQ ID NO: 38868 - protein, 132 aa, Zea mays subsp. mays
  peptide (1)..(132): Ceres Seq. ID no. 12354716
MAGEQAEGQDAEAAGGPAQGAQPPRGPVPARGDQLRVRARDAAPDGVHPVPLRGRLPRRLRAAVRRHGVGHAGRGPPHGGGRDQDQGARLGQGHRRQGRRRQGPLHRRDQEVAQPGRLRGRQGRHHRRRILA

SEQ ID NO: 38869 - protein, 121 aa, Zea mays subsp. mays
  peptide (1)..(121): Ceres Seq. ID no. 12354717
  misc_feature (1)..(121): Pfam Name: Pfam Description:  Protein of unknown function, DUF538
  misc_feature (1)..(121): NCBI GI NO: 18398279 NR Description: expressed protein; protein id: At3g08890
  misc_feature (1)..(121): NCBI GI NO: 34914210 NR Description: OSJNBb0049O23.18
  misc_feature (1)..(121): NCBI GI NO: 15240103 NR Description: putative protein; protein id: At5g37070.1
  misc_feature (1)..(121): NCBI GI NO: 15241019 NR Description: putative protein; protein id: At5g01610
  misc_feature (1)..(121): NCBI GI NO: 28466909 NR Description: At5g01610 [Arabidopsis thaliana]
  misc_feature (1)..(121): NCBI GI NO: 40642817 NR Description: cp protein [Celosia cristata]
  misc_feature (1)..(121): NCBI GI NO: 18395537 NR Description: expressed protein; protein id: At2g03350
  misc_feature (1)..(121): NCBI GI NO: 21553803 NR Description: unknown [Arabidopsis thaliana]
  misc_feature (2)..(100): NCBI GI NO: 15235335 NR Description: putative protein; protein id: At4g02360.1
  misc_feature (7)..(100): NCBI GI NO: 9759120 NR Description: gb|AAF02163
MQKPLADLLKEHNLPVGLFPREATNYEFVPETRRLTVYIPSPCEVGYRDGSELRFDATVSGTLGEGRLTEVEGIKTKVLVWARVTAVKADAAKVHFTAGIKRSRSRDAYEVVRGGITVDEF

SEQ ID NO: 38870 - DNA, 1833 bp, Zea mays subsp. mays
  misc_feature (1)..(1833): Ceres Seq. ID no. 12424091
gcacgagaccattacctagaacatcctaatcgaaaaaaaaaatttcaatgcctctctagatctttcaagctatccttgcttcctagctccctttggcgtgctgtaccggacgacaggggtaggtaggtaggtaggtgtagctagctcggcgagcgagggagcaatccggccaacagcacacgcgtcgatcgccatgccgagaagcggcggcggcggcaatggcggtggcattagtagtagtagtagggtgatgcccaacctcccggccgggttccgcttccaccccacggacgaggagctcatggtgcactacctcatgaggcaggccgcctccatgccgtgccccgtccccatcatcgccgaggtcaacatctaccagtgcaacccctgggatctccctgccaaggcattgttcggcgacaaggagtggtttttcttcagcccccgggaccgcaagtaccccaacggcgcccgccccaaccgcgccgccgggtccgggtactggaaggccaccggcaccgacaaggccatcctgtcgtcgtccacgcccacgagccacggcggcgccaacatcgtcgtcggcgtcaagaaggcgctcgtcttctacggcggcaggccgcccaagggcaccaagacggactggatcatgcacgagtaccgcctctcgggcgcggcggacgacgactgcaagggcagcaccaggcgcagagtgtcttcctcctcgtcgtcctccatgaggctggacgactgggtgctgtgcaggatccacaagaagagcaacgatttccagttgtcgtcgtcgtcggagcatgagcacgagcaggaggagccggcggcgggcggctcagcgacgactgtggaggaactagacgctctcgtcgtcgtcgacaacagcagcagcagcgacaccaccaccaccaccaccaccaccaacaacaactctactgaaacagctgcgactcatcacgatcctcagacgatgatgatgctgagcaagtcgtgctcgctcaccgacctcctcgacagcatcgactacgcggcgctctcctcgcagatgctcctcctcgacgcgccccagccccacgctgatgacccgccgccacacatggtctactacccaccggcggcgtcggcgacgatgcaccagcaagcaataatagctaataacaccaacagtaatgactactatgacgacgacaacttgttgccgactgctgcggtagacgcggcgacggcggtgctactcagctcgtcgcctgcagacaccaacggtgtgaacaagaggaagcgagtgacggccgtggactactacggcgccgctgaaccgccgaccttcttccaccaccacctcgatgatggcggcaacagcttcttcagtacgaccaagaagctcaagccgccgccgccaagtgattcgaggcatggcggccatttcggcaccgccacagcgagcagctaccgcgacagccagcagctcgtggacagcgcgagcagcagcggcgtcttcttccatcagtatgggtacggctacagcagcagcaacccgttcttgaacttgaaccagcagcagcagctgctactcaacagccacatcgggatgcagtagagctcgagagatcgagagagagagagagagagagagatgatatatcattggaaggatcagcacgcgtacgtgcagattaattgcagcgagttctatcttgtttgctttcattattatatactccgtatgtgtcgttcatgtaaaattagtttaaattgtaaattagtgtgctgaaattcatgtgcctgctctctgctcatcaatgaatggatgatgacgacccatgc

SEQ ID NO: 38871 - protein, 470 aa, Zea mays subsp. mays
  peptide (1)..(470): Ceres Seq. ID no. 12424092
  misc_feature (23)..(158): Pfam Name: NAM Pfam Description: No apical meristem
  misc_feature (23)..(364): NCBI GI NO: 34902154 NR Description: Putative NAM (no apical meristem) protein
  misc_feature (21)..(286): NCBI GI NO: 34899790 NR Description: OJ1773_H01.21
  misc_feature (21)..(208): NCBI GI NO: 15219110 NR Description: NAM-like protein; protein id: At1g52880
  misc_feature (21)..(208): NCBI GI NO: 20466640 NR Description: NAM-like protein [Arabidopsis thaliana]
  misc_feature (21)..(208): NCBI GI NO: 21554226 NR Description: NAM-like protein [Arabidopsis thaliana]
  misc_feature (22)..(213): NCBI GI NO: 6223651 NR Description: NAM-like protein (no apical meristem)
  misc_feature (21)..(207): NCBI GI NO: 15232606 NR Description: putative jasmonic acid regulatory protein
  misc_feature (12)..(238): NCBI GI NO: 21593425 NR Description: NAM protein, putative [Arabidopsis thaliana]
  misc_feature (22)..(213): NCBI GI NO: 30679026 NR Description: No apical meristem (NAM) protein family
  misc_feature (12)..(238): NCBI GI NO: 18407026 NR Description: NAM protein, putative; protein id: At1g61110
MPRSGGGGNGGGISSSSRVMPNLPAGFRFHPTDEELMVHYLMRQAASMPCPVPIIAEVNIYQCNPWDLPAKALFGDKEWFFFSPRDRKYPNGARPNRAAGSGYWKATGTDKAILSSSTPTSHGGANIVVGVKKALVFYGGRPPKGTKTDWIMHEYRLSGAADDDCKGSTRRRVSSSSSSSMRLDDWVLCRIHKKSNDFQLSSSSEHEHEQEEPAAGGSATTVEELDALVVVDNSSSSDTTTTTTTTNNNSTETAATHHDPQTMMMLSKSCSLTDLLDSIDYAALSSQMLLLDAPQPHADDPPPHMVYYPPAASATMHQQAIIANNTNSNDYYDDDNLLPTAAVDAATAVLLSSSPADTNGVNKRKRVTAVDYYGAAEPPTFFHHHLDDGGNSFFSTTKKLKPPPPSDSRHGGHFGTATASSYRDSQQLVDSASSSGVFFHQYGYGYSSSNPFLNLNQQQQLLLNSHIGMQ

SEQ ID NO: 38872 - protein, 451 aa, Zea mays subsp. mays
  peptide (1)..(451): Ceres Seq. ID no. 12424093
  misc_feature (4)..(139): Pfam Name: NAM Pfam Description: No apical meristem
  misc_feature (4)..(345): NCBI GI NO: 34902154 NR Description: Putative NAM (no apical meristem) protein
  misc_feature (2)..(267): NCBI GI NO: 34899790 NR Description: OJ1773_H01.21
  misc_feature (2)..(189): NCBI GI NO: 15219110 NR Description: NAM-like protein; protein id: At1g52880
  misc_feature (2)..(189): NCBI GI NO: 20466640 NR Description: NAM-like protein [Arabidopsis thaliana]
  misc_feature (2)..(189): NCBI GI NO: 21554226 NR Description: NAM-like protein [Arabidopsis thaliana]
  misc_feature (3)..(194): NCBI GI NO: 6223651 NR Description: NAM-like protein (no apical meristem)
  misc_feature (2)..(188): NCBI GI NO: 15232606 NR Description: putative jasmonic acid regulatory protein
  misc_feature (1)..(219): NCBI GI NO: 21593425 NR Description: NAM protein, putative [Arabidopsis thaliana]
  misc_feature (3)..(194): NCBI GI NO: 30679026 NR Description: No apical meristem (NAM) protein family
  misc_feature (1)..(219): NCBI GI NO: 18407026 NR Description: NAM protein, putative; protein id: At1g61110
MPNLPAGFRFHPTDEELMVHYLMRQAASMPCPVPIIAEVNIYQCNPWDLPAKALFGDKEWFFFSPRDRKYPNGARPNRAAGSGYWKATGTDKAILSSSTPTSHGGANIVVGVKKALVFYGGRPPKGTKTDWIMHEYRLSGAADDDCKGSTRRRVSSSSSSSMRLDDWVLCRIHKKSNDFQLSSSSEHEHEQEEPAAGGSATTVEELDALVVVDNSSSSDTTTTTTTTNNNSTETAATHHDPQTMMMLSKSCSLTDLLDSIDYAALSSQMLLLDAPQPHADDPPPHMVYYPPAASATMHQQAIIANNTNSNDYYDDDNLLPTAAVDAATAVLLSSSPADTNGVNKRKRVTAVDYYGAAEPPTFFHHHLDDGGNSFFSTTKKLKPPPPSDSRHGGHFGTATASSYRDSQQLVDSASSSGVFFHQYGYGYSSSNPFLNLNQQQQLLLNSHIGMQ

SEQ ID NO: 38873 - protein, 434 aa, Zea mays subsp. mays
  peptide (1)..(434): Ceres Seq. ID no. 12424094
  misc_feature (1)..(122): Pfam Name: NAM Pfam Description: No apical meristem
  misc_feature (1)..(328): NCBI GI NO: 34902154 NR Description: Putative NAM (no apical meristem) protein
  misc_feature (1)..(250): NCBI GI NO: 34899790 NR Description: OJ1773_H01.21
  misc_feature (1)..(172): NCBI GI NO: 15219110 NR Description: NAM-like protein; protein id: At1g52880
  misc_feature (1)..(172): NCBI GI NO: 20466640 NR Description: NAM-like protein [Arabidopsis thaliana]
  misc_feature (1)..(172): NCBI GI NO: 21554226 NR Description: NAM-like protein [Arabidopsis thaliana]
  misc_feature (1)..(177): NCBI GI NO: 6223651 NR Description: NAM-like protein (no apical meristem)
  misc_feature (1)..(171): NCBI GI NO: 15232606 NR Description: putative jasmonic acid regulatory protein
  misc_feature (1)..(202): NCBI GI NO: 21593425 NR Description: NAM protein, putative [Arabidopsis thaliana]
  misc_feature (1)..(177): NCBI GI NO: 30679026 NR Description: No apical meristem (NAM) protein family
  misc_feature (1)..(202): NCBI GI NO: 18407026 NR Description: NAM protein, putative; protein id: At1g61110
MVHYLMRQAASMPCPVPIIAEVNIYQCNPWDLPAKALFGDKEWFFFSPRDRKYPNGARPNRAAGSGYWKATGTDKAILSSSTPTSHGGANIVVGVKKALVFYGGRPPKGTKTDWIMHEYRLSGAADDDCKGSTRRRVSSSSSSSMRLDDWVLCRIHKKSNDFQLSSSSEHEHEQEEPAAGGSATTVEELDALVVVDNSSSSDTTTTTTTTNNNSTETAATHHDPQTMMMLSKSCSLTDLLDSIDYAALSSQMLLLDAPQPHADDPPPHMVYYPPAASATMHQQAIIANNTNSNDYYDDDNLLPTAAVDAATAVLLSSSPADTNGVNKRKRVTAVDYYGAAEPPTFFHHHLDDGGNSFFSTTKKLKPPPPSDSRHGGHFGTATASSYRDSQQLVDSASSSGVFFHQYGYGYSSSNPFLNLNQQQQLLLNSHIGMQ

SEQ ID NO: 38874 - DNA, 903 bp, Zea mays subsp. mays
  misc_feature (1)..(903): Ceres Seq. ID no. 12425306
catatagcccacttacttggtacaagactacattttccacaccagtgggaagtgacgcagtgacactgaaccttagtggtatgggtaagggtgaagtatgggtcaatggagagagtatcggacgatattgggtctctttcaaggctcctagtggcaatccttcgcaatcactgtaagtagagttagctccaacttctactctgtcgcactatttcctacaatctcataagcaaatgtctcactgaccggacattcctaaggtatcacataccacgagaatttctaaaccctcaagacaataccctagccctttttgaggaaatgggaggtaacccacagctaataacagtgaacacaatgtcggtatcaagagtgtgtggcaatgtgaatgagctctcagctccatcacttgaatataaggataaggaaccagcagtagatctctggtgtacagaaggcaaacagatatcaacaattgagtttgcaagctatggaagtcctacgggtgactgcaaaaaatttggtttcggaagatgccatgcaggagcatcagaatctgttgtaaaacaggcttgcttgggtaaaagtggatgctcagttcccgtaacacctatcaaatttggaggcgatccatgtcctggaatccaaaaatctcttctagttgtggcgaactgcaggtgacactagacagtcacacaagtatacatcatagaaaagaagttggacgagtataaaaaataaaaagatgagttacaaaatcaacgagcaatagagtggagggaaagtataagtcaaaacatatagtaattgttattaggtaggcaattgatcacttgaggcttagttggtagaccccatgtaccgattgttttgacctggcatagatatatatgtgttatctgt

SEQ ID NO: 38875 - protein, 119 aa, Zea mays subsp. mays
  peptide (1)..(119): Ceres Seq. ID no. 12425307
  misc_feature (41)..(118): Pfam Name: Pfam Description:  Galactose binding lectin domain
  misc_feature (1)..(118): NCBI GI NO: 30699255 NR Description: glycosyl hydrolase family 35 (beta-galactosidase)
  misc_feature (1)..(118): NCBI GI NO: 25326165 NR Description: probable beta-galactosidase
  misc_feature (1)..(118): NCBI GI NO: 4138137 NR Description: ss-galactosidase [Lycopersicon esculentum]
  misc_feature (1)..(101): NCBI GI NO: 26451843 NR Description: unknown protein [Arabidopsis thaliana]
  misc_feature (1)..(118): NCBI GI NO: 14517399 NR Description: At2g32810/F24L7.5 [Arabidopsis thaliana]
  misc_feature (1)..(118): NCBI GI NO: 7939625 NR Description: putative beta-galactosidase
  misc_feature (1)..(118): NCBI GI NO: 18403090 NR Description: glycosyl hydrolase family 35
  misc_feature (1)..(118): NCBI GI NO: 7488064 NR Description: probable beta-galactosidase (EC 3
  misc_feature (1)..(118): NCBI GI NO: 34913072 NR Description: putative beta-galactosidase
  misc_feature (1)..(118): NCBI GI NO: 18419821 NR Description: glycosyl hydrolase family 35
MGGNPQLITVNTMSVSRVCGNVNELSAPSLEYKDKEPAVDLWCTEGKQISTIEFASYGSPTGDCKKFGFGRCHAGASESVVKQACLGKSGCSVPVTPIKFGGDPCPGIQKSLLVVANCR

SEQ ID NO: 38876 - protein, 107 aa, Zea mays subsp. mays
  peptide (1)..(107): Ceres Seq. ID no. 12425308
  misc_feature (29)..(106): Pfam Name: Pfam Description:  Galactose binding lectin domain
  misc_feature (1)..(106): NCBI GI NO: 30699255 NR Description: glycosyl hydrolase family 35 (beta-galactosidase)
  misc_feature (1)..(106): NCBI GI NO: 25326165 NR Description: probable beta-galactosidase
  misc_feature (1)..(106): NCBI GI NO: 4138137 NR Description: ss-galactosidase [Lycopersicon esculentum]
  misc_feature (1)..(89): NCBI GI NO: 26451843 NR Description: unknown protein [Arabidopsis thaliana]
  misc_feature (1)..(106): NCBI GI NO: 14517399 NR Description: At2g32810/F24L7.5 [Arabidopsis thaliana]
  misc_feature (1)..(106): NCBI GI NO: 7939625 NR Description: putative beta-galactosidase
  misc_feature (1)..(106): NCBI GI NO: 18403090 NR Description: glycosyl hydrolase family 35
  misc_feature (1)..(106): NCBI GI NO: 7488064 NR Description: probable beta-galactosidase (EC 3
  misc_feature (1)..(106): NCBI GI NO: 34913072 NR Description: putative beta-galactosidase
  misc_feature (1)..(106): NCBI GI NO: 18419821 NR Description: glycosyl hydrolase family 35
MSVSRVCGNVNELSAPSLEYKDKEPAVDLWCTEGKQISTIEFASYGSPTGDCKKFGFGRCHAGASESVVKQACLGKSGCSVPVTPIKFGGDPCPGIQKSLLVVANCR

SEQ ID NO: 38877 - DNA, 2275 bp, Zea mays subsp. mays
  misc_feature (1)..(2275): Ceres Seq. ID no. 13495441
aatgtcccttggtcctctctctgacatctcttgtctcctcttcattgcaaatgtttctcttcctctctcccacctctcctctcctctccattgcaaaccttcgggatgaaggttgagagcctgctctgaaacgacgtacgtaaagggaacaaggaaccggagagcgtgcggcgggcttctggattttagagtaggcacctgtcgcttggacgtgcttcggaggagtaggtgtccaaaagttgcctacagtgggtccagaggtcatgatatagactgtcatggaggcagctgcagatgaggagaggccactgattcagtacctggctccagaggatgatgaagcttcctcacgatacactagcgacggaacgctcgatatcaacaatcagcgtgctctgaagaagagcaccgggaactggagagcatgcttcatgattctgggtaccgagttcgccgaatgcctggcattttacgcgaccgcaaagaacctggtcacctacctcacggctgagcttggtgagagcaacatcgatgccgcgacgaacgtgtccacctcgattggcagctgctacctcacgccgctcatcggcgccttcttggccgacacgtactggggaagatacaagacgatgatagtcttcctcttgctctacatcgttgggatgcttactctgacagcgtcggcgtggctccccttggccatggaggacgactcgcctaacaacagcggacttcggcgtgccacagcgtacctggggctctacctcgtttccctaggcacaggaggcatcaagccctgcacggcggccctcggggccgaccagttcgacggcggcgacgcggcggagcgggtcaccaaggcctccttcttcaactggtactacttctgcaccaacatcggctccctgctgtcggggaccgtgctcgtctgggtgcaggaaaatattggatggggagtcgggtttacggtgcagacggtgttcatgctgttcggcctcgccgtgttcgtcgccggtcgcaaggtgtataggtacaagaagctgggcgggagccctctcacaagggtagcccaggtggttgtcgcggcggtgaggaactgccatctcgtgctgcctgatgatacgtcagccctgtaccacgataagcttctaccaactgaaccaaatttcaggattgagtctgccagacaattcagattctttgacaaggctgccataatcaccggcgagaagggtgcagcagcgccgacgagcccttggagactgtgcacggtgtcccaggtggaggagctgaagatgctgctccggttgctgccggtctgggcatccatggtgctcttcttcgccgtcagtgcgcagacggtaaccacgttcattgagcaggctagggtaatggacaaccgcatcggcccgttcatcattcctccggcgtcgatagcgaccttcgacgtgatcagcgtcatggtctgtgtccccgtctacgacgccgtgctggtgcctctggcccggcgtgccactggcaacgaccgcggcctgtcgcagctgcaccggctctccatcgggatcgcgctgtccgtggtcgtcatggtgtacgcggcgctgctcgagggcaggcgcctggccctcgcgcgggccaacatgcccgccatgaacatcgcgtggcaggcgcccatgttcgccgtgcacggcgcggcggcggtcttcgccaccgtcggcgtgctcgagttcttctacgaccagtcgccggacgggatgaagagcctcggcaacgcgctcgcgctgctctccatggcggccgggagctatttcaactcgcttgcgctcagcactgtcggggtgatcacggcgagcggcggggaacgcgggtggctcccggacgacctgaacaagggtcatatggactatttcttctggatgatggccgctctaggaacgctcaacctgctgcacttcttgcactactgcaacagacgatacacaggcaacaacaacaccacttcttgacgtgtgctgtcatgctgtgtgcaccatgtttctcaaaataatagtttgacaatactacactttgtaattattgttgagtttgtgatctaaattctgaagaaggcggccaagttaatgagcgaagcggaggcccgtcgccgggaggctttccctactcattttagggtttcacctctataaatatctttgtaagccgtaggagataattatctcaattgtaaatctcctgcgatctgtaaccacccgaaaatagtgagaagttgttggccggc

SEQ ID NO: 38878 - protein, 574 aa, Zea mays subsp. mays
  peptide (1)..(574): Ceres Seq. ID no. 13495442
  misc_feature (115)..(504): Pfam Name: Pfam Description:  POT family
  misc_feature (1)..(548): NCBI GI NO: 37530496 NR Description: putative LeOPT1 - oligopeptide transporter
  misc_feature (1)..(574): NCBI GI NO: 37530498 NR Description: putative LeOPT1 - oligopeptide transporter
  misc_feature (1)..(566): NCBI GI NO: 15076661 NR Description: peptide transporter
  misc_feature (19)..(562): NCBI GI NO: 4102839 NR Description: LeOPT1 [Lycopersicon esculentum]
  misc_feature (1)..(566): NCBI GI NO: 15226861 NR Description: histidine transport protein (PTR2-B)
  misc_feature (24)..(562): NCBI GI NO: 30696666 NR Description: oligopeptide transporter -related
  misc_feature (1)..(566): NCBI GI NO: 31088360 NR Description: peptide transporter 1 [Vicia faba]
  misc_feature (42)..(567): NCBI GI NO: 38567969 NR Description: OSJNBa0093F12.10
  misc_feature (20)..(574): NCBI GI NO: 30687920 NR Description: oligopeptide transporter -related
  misc_feature (21)..(559): NCBI GI NO: 30683214 NR Description: nitrate transporter -related
MEAAADEERPLIQYLAPEDDEASSRYTSDGTLDINNQRALKKSTGNWRACFMILGTEFAECLAFYATAKNLVTYLTAELGESNIDAATNVSTSIGSCYLTPLIGAFLADTYWGRYKTMIVFLLLYIVGMLTLTASAWLPLAMEDDSPNNSGLRRATAYLGLYLVSLGTGGIKPCTAALGADQFDGGDAAERVTKASFFNWYYFCTNIGSLLSGTVLVWVQENIGWGVGFTVQTVFMLFGLAVFVAGRKVYRYKKLGGSPLTRVAQVVVAAVRNCHLVLPDDTSALYHDKLLPTEPNFRIESARQFRFFDKAAIITGEKGAAAPTSPWRLCTVSQVEELKMLLRLLPVWASMVLFFAVSAQTVTTFIEQARVMDNRIGPFIIPPASIATFDVISVMVCVPVYDAVLVPLARRATGNDRGLSQLHRLSIGIALSVVVMVYAALLEGRRLALARANMPAMNIAWQAPMFAVHGAAAVFATVGVLEFFYDQSPDGMKSLGNALALLSMAAGSYFNSLALSTVGVITASGGERGWLPDDLNKGHMDYFFWMMAALGTLNLLHFLHYCNRRYTGNNNTTS

SEQ ID NO: 38879 - protein, 523 aa, Zea mays subsp. mays
  peptide (1)..(523): Ceres Seq. ID no. 13495443
  misc_feature (64)..(453): Pfam Name: Pfam Description:  POT family
  misc_feature (1)..(497): NCBI GI NO: 37530496 NR Description: putative LeOPT1 - oligopeptide transporter
  misc_feature (1)..(523): NCBI GI NO: 37530498 NR Description: putative LeOPT1 - oligopeptide transporter
  misc_feature (1)..(515): NCBI GI NO: 15076661 NR Description: peptide transporter
  misc_feature (1)..(511): NCBI GI NO: 4102839 NR Description: LeOPT1 [Lycopersicon esculentum]
  misc_feature (1)..(515): NCBI GI NO: 15226861 NR Description: histidine transport protein (PTR2-B)
  misc_feature (1)..(511): NCBI GI NO: 30696666 NR Description: oligopeptide transporter -related
  misc_feature (1)..(515): NCBI GI NO: 31088360 NR Description: peptide transporter 1 [Vicia faba]
  misc_feature (1)..(516): NCBI GI NO: 38567969 NR Description: OSJNBa0093F12.10
  misc_feature (1)..(523): NCBI GI NO: 30687920 NR Description: oligopeptide transporter -related
  misc_feature (1)..(508): NCBI GI NO: 30683214 NR Description: nitrate transporter -related
MILGTEFAECLAFYATAKNLVTYLTAELGESNIDAATNVSTSIGSCYLTPLIGAFLADTYWGRYKTMIVFLLLYIVGMLTLTASAWLPLAMEDDSPNNSGLRRATAYLGLYLVSLGTGGIKPCTAALGADQFDGGDAAERVTKASFFNWYYFCTNIGSLLSGTVLVWVQENIGWGVGFTVQTVFMLFGLAVFVAGRKVYRYKKLGGSPLTRVAQVVVAAVRNCHLVLPDDTSALYHDKLLPTEPNFRIESARQFRFFDKAAIITGEKGAAAPTSPWRLCTVSQVEELKMLLRLLPVWASMVLFFAVSAQTVTTFIEQARVMDNRIGPFIIPPASIATFDVISVMVCVPVYDAVLVPLARRATGNDRGLSQLHRLSIGIALSVVVMVYAALLEGRRLALARANMPAMNIAWQAPMFAVHGAAAVFATVGVLEFFYDQSPDGMKSLGNALALLSMAAGSYFNSLALSTVGVITASGGERGWLPDDLNKGHMDYFFWMMAALGTLNLLHFLHYCNRRYTGNNNTTS

SEQ ID NO: 38880 - protein, 457 aa, Zea mays subsp. mays
  peptide (1)..(457): Ceres Seq. ID no. 13495444
  misc_feature (1)..(387): Pfam Name: Pfam Description:  POT family
  misc_feature (1)..(431): NCBI GI NO: 37530496 NR Description: putative LeOPT1 - oligopeptide transporter
  misc_feature (1)..(457): NCBI GI NO: 37530498 NR Description: putative LeOPT1 - oligopeptide transporter
  misc_feature (1)..(449): NCBI GI NO: 15076661 NR Description: peptide transporter
  misc_feature (1)..(445): NCBI GI NO: 4102839 NR Description: LeOPT1 [Lycopersicon esculentum]
  misc_feature (1)..(449): NCBI GI NO: 15226861 NR Description: histidine transport protein (PTR2-B)
  misc_feature (1)..(445): NCBI GI NO: 30696666 NR Description: oligopeptide transporter -related
  misc_feature (1)..(449): NCBI GI NO: 31088360 NR Description: peptide transporter 1 [Vicia faba]
  misc_feature (1)..(450): NCBI GI NO: 38567969 NR Description: OSJNBa0093F12.10
  misc_feature (1)..(457): NCBI GI NO: 30687920 NR Description: oligopeptide transporter -related
  misc_feature (1)..(442): NCBI GI NO: 30683214 NR Description: nitrate transporter -related
MIVFLLLYIVGMLTLTASAWLPLAMEDDSPNNSGLRRATAYLGLYLVSLGTGGIKPCTAALGADQFDGGDAAERVTKASFFNWYYFCTNIGSLLSGTVLVWVQENIGWGVGFTVQTVFMLFGLAVFVAGRKVYRYKKLGGSPLTRVAQVVVAAVRNCHLVLPDDTSALYHDKLLPTEPNFRIESARQFRFFDKAAIITGEKGAAAPTSPWRLCTVSQVEELKMLLRLLPVWASMVLFFAVSAQTVTTFIEQARVMDNRIGPFIIPPASIATFDVISVMVCVPVYDAVLVPLARRATGNDRGLSQLHRLSIGIALSVVVMVYAALLEGRRLALARANMPAMNIAWQAPMFAVHGAAAVFATVGVLEFFYDQSPDGMKSLGNALALLSMAAGSYFNSLALSTVGVITASGGERGWLPDDLNKGHMDYFFWMMAALGTLNLLHFLHYCNRRYTGNNNTTS

SEQ ID NO: 38881 - DNA, 2121 bp, Zea mays subsp. mays
  misc_feature (1)..(2121): Ceres Seq. ID no. 12362506
ctagaacatcctaatcgaaaaacagtcaaaagctccccattcctcttccccttctcacccggcactcgaactctgcggccctgcaaaccctagctttcgctccatggccgacggcgatccggagccggcgccagcgccggcaccggcactggctaacgagaagctccatgtccgggcggcggcctacgtggatgagacgcgcccgccgccaccgctggagccctccgggggtccggacgaggagaagcgcccgcccgaagaggtagaagcggaggtggagatccacccgccgcgggaaccaaccggggagccgcccgttgatcgcccgggggtggaggtggtggcggacatgaaggcgaacgaagtggagaaggaaaggggggatcgggcaaaggagaagcgggagaaggataaagggaaggggaaggaggagaaagagaaggtggacgaagaggcgaaggggaaagtgactgcggtgatgaaggtggatgggacggagaaggaggtcaagccgacccggcgggccagctggggccagcgcggagacgcccatcctagcggtgccggtggtggccgtgccttgcttcatcgcgcctccagggtttgcgggccagtttgcaatgactcatcaagcagctttggcaagtgttacagcacaggcacaaatgcacttgcagtcaccaactccatctgcatgttcggaagtgccatcaagtccattttatatgacaccaagatctctagtgccattgcagcattcaccatcagtaactgaaggaaatatttgtacaccaattgctgacaagtcattttcatctgattcaaaatcacaccatgttgtaaatatggtagctgatggcttcaactggaggaaatatggtcagaagcaggtgaagagtagtgataattccaggagctactatagatgcacaaactctggttgtctcgctaaaaagaaggttgagcatttccctgatggccgcgttgtggaaatcatttacagaggagcccataatcatgaaccaccacagaagaccagatttgcaaaggaaagagtgactcctattagtgttccctctggaggcgaaaccttgaggcttgtgaacacagaaattgtagaatctagcacgcctacctgtgaattggaacggagtgccatctcagaaacttctgagcagcatctcttttgctcaagtgactgcgaaggggatgctggtaacaaatctgaagatgaacatcctagcgcggaagccctgccaaagcgaagaacacttgaggctacagcaccaaatttaacgccggttcgcagaactgttagagagcaaaagattattgtgcaggctggaaagatgagtgatggatacagatggcgtaagtatggacagaaaattgtgaagggaaatccaaaccccaggagttattaccgctgcacgcacggtggatgccctgtccgtaagcatgtggagaaggcgccagatgatgttaacaatattgttgtaacgtatgaaggcaaacacaaccacgacgaacctttcagaagcagcagcataccagtttctgtaatcagtccatcagcgacagccactgagcaacccaacacatcaagtacgtcagatgagagacctccaaccattacccagaaggacgccaacagtgagtctgataaggagacaaccttgaaatttggaggcgagaaggcactcgaatctgcgcaaacgctgctcagcatcaaaactaactccgatgacatgaagaactctgtcctgaaggaaacttctgctgcagttccagtccaaaacaattgagcatgctgagatagggtgattctattgacatctcttaggctgtcatatttattggttgagtgatatgctattatgttaacttgtatgacgtgaggcttggtgttcggtattccgtgtggagcatttgaggaagcattaggtttcaggaagccacgactggttgtttctgcctgtatagattcccattccctagtgtgtacaggtactgtattttatctgaggccagataacatgtgtggggtggttcttgagaacctgtgtgtgctgtattgttctagctcgatctattgcaatagctgatacgagattgtcattt

SEQ ID NO: 38882 - protein, 438 aa, Zea mays subsp. mays
  peptide (1)..(438): Ceres Seq. ID no. 12362507
  misc_feature (288)..(346): Pfam Name: Pfam Description:  WRKY DNA -binding domain
  misc_feature (18)..(386): NCBI GI NO: 7484759 NR Description: SP8 binding protein homolog - cucumber
  misc_feature (13)..(353): NCBI GI NO: 8778394 NR Description: F16A14.18 [Arabidopsis thaliana]
  misc_feature (41)..(353): NCBI GI NO: 15223004 NR Description: WRKY family transcription factor
  misc_feature (41)..(353): NCBI GI NO: 30683544 NR Description: WRKY family transcription factor
  misc_feature (123)..(384): NCBI GI NO: 4760692 NR Description: transcription factor NtWRKY2 [Nicotiana tabacum]
  misc_feature (123)..(414): NCBI GI NO: 29839502 NR Description: Probable WRKY transcription factor 32
  misc_feature (109)..(381): NCBI GI NO: 3420906 NR Description: zinc finger protein; WRKY1
  misc_feature (123)..(379): NCBI GI NO: 14530685 NR Description: WRKY DNA-binding protein [Nicotiana tabacum]
  misc_feature (41)..(353): NCBI GI NO: 15227612 NR Description: WRKY family transcription factor
  misc_feature (123)..(414): NCBI GI NO: 22329039 NR Description: WRKY family transcription factor
MGRRRRSSRPGGPAGASAETPILAVPVVAVPCFIAPPGFAGQFAMTHQAALASVTAQAQMHLQSPTPSACSEVPSSPFYMTPRSLVPLQHSPSVTEGNICTPIADKSFSSDSKSHHVVNMVADGFNWRKYGQKQVKSSDNSRSYYRCTNSGCLAKKKVEHFPDGRVVEIIYRGAHNHEPPQKTRFAKERVTPISVPSGGETLRLVNTEIVESSTPTCELERSAISETSEQHLFCSSDCEGDAGNKSEDEHPSAEALPKRRTLEATAPNLTPVRRTVREQKIIVQAGKMSDGYRWRKYGQKIVKGNPNPRSYYRCTHGGCPVRKHVEKAPDDVNNIVVTYEGKHNHDEPFRSSSIPVSVISPSATATEQPNTSSTSDERPPTITQKDANSESDKETTLKFGGEKALESAQTLLSIKTNSDDMKNSVLKETSAAVPVQNN

SEQ ID NO: 38883 - protein, 394 aa, Zea mays subsp. mays
  peptide (1)..(394): Ceres Seq. ID no. 12362508
  misc_feature (244)..(302): Pfam Name: Pfam Description:  WRKY DNA -binding domain
  misc_feature (1)..(342): NCBI GI NO: 7484759 NR Description: SP8 binding protein homolog - cucumber
  misc_feature (1)..(309): NCBI GI NO: 8778394 NR Description: F16A14.18 [Arabidopsis thaliana]
  misc_feature (1)..(309): NCBI GI NO: 15223004 NR Description: WRKY family transcription factor
  misc_feature (1)..(309): NCBI GI NO: 30683544 NR Description: WRKY family transcription factor
  misc_feature (79)..(340): NCBI GI NO: 4760692 NR Description: transcription factor NtWRKY2 [Nicotiana tabacum]
  misc_feature (79)..(370): NCBI GI NO: 29839502 NR Description: Probable WRKY transcription factor 32
  misc_feature (65)..(337): NCBI GI NO: 3420906 NR Description: zinc finger protein; WRKY1
  misc_feature (79)..(335): NCBI GI NO: 14530685 NR Description: WRKY DNA-binding protein [Nicotiana tabacum]
  misc_feature (1)..(309): NCBI GI NO: 15227612 NR Description: WRKY family transcription factor
  misc_feature (79)..(370): NCBI GI NO: 22329039 NR Description: WRKY family transcription factor
MTHQAALASVTAQAQMHLQSPTPSACSEVPSSPFYMTPRSLVPLQHSPSVTEGNICTPIADKSFSSDSKSHHVVNMVADGFNWRKYGQKQVKSSDNSRSYYRCTNSGCLAKKKVEHFPDGRVVEIIYRGAHNHEPPQKTRFAKERVTPISVPSGGETLRLVNTEIVESSTPTCELERSAISETSEQHLFCSSDCEGDAGNKSEDEHPSAEALPKRRTLEATAPNLTPVRRTVREQKIIVQAGKMSDGYRWRKYGQKIVKGNPNPRSYYRCTHGGCPVRKHVEKAPDDVNNIVVTYEGKHNHDEPFRSSSIPVSVISPSATATEQPNTSSTSDERPPTITQKDANSESDKETTLKFGGEKALESAQTLLSIKTNSDDMKNSVLKETSAAVPVQNN

SEQ ID NO: 38884 - protein, 379 aa, Zea mays subsp. mays
  peptide (1)..(379): Ceres Seq. ID no. 12362509
  misc_feature (229)..(287): Pfam Name: Pfam Description:  WRKY DNA -binding domain
  misc_feature (1)..(327): NCBI GI NO: 7484759 NR Description: SP8 binding protein homolog - cucumber
  misc_feature (1)..(294): NCBI GI NO: 8778394 NR Description: F16A14.18 [Arabidopsis thaliana]
  misc_feature (1)..(294): NCBI GI NO: 15223004 NR Description: WRKY family transcription factor
  misc_feature (1)..(294): NCBI GI NO: 30683544 NR Description: WRKY family transcription factor
  misc_feature (64)..(325): NCBI GI NO: 4760692 NR Description: transcription factor NtWRKY2 [Nicotiana tabacum]
  misc_feature (64)..(355): NCBI GI NO: 29839502 NR Description: Probable WRKY transcription factor 32
  misc_feature (50)..(322): NCBI GI NO: 3420906 NR Description: zinc finger protein; WRKY1
  misc_feature (64)..(320): NCBI GI NO: 14530685 NR Description: WRKY DNA-binding protein [Nicotiana tabacum]
  misc_feature (1)..(294): NCBI GI NO: 15227612 NR Description: WRKY family transcription factor
  misc_feature (64)..(355): NCBI GI NO: 22329039 NR Description: WRKY family transcription factor
MHLQSPTPSACSEVPSSPFYMTPRSLVPLQHSPSVTEGNICTPIADKSFSSDSKSHHVVNMVADGFNWRKYGQKQVKSSDNSRSYYRCTNSGCLAKKKVEHFPDGRVVEIIYRGAHNHEPPQKTRFAKERVTPISVPSGGETLRLVNTEIVESSTPTCELERSAISETSEQHLFCSSDCEGDAGNKSEDEHPSAEALPKRRTLEATAPNLTPVRRTVREQKIIVQAGKMSDGYRWRKYGQKIVKGNPNPRSYYRCTHGGCPVRKHVEKAPDDVNNIVVTYEGKHNHDEPFRSSSIPVSVISPSATATEQPNTSSTSDERPPTITQKDANSESDKETTLKFGGEKALESAQTLLSIKTNSDDMKNSVLKETSAAVPVQNN

SEQ ID NO: 38885 - DNA, 516 bp, Zea mays subsp. mays
  misc_feature (1)..(516): Ceres Seq. ID no. 2789554
cagctggaaatgatgaatttgttgggactatgatcgccgaagctattgacaaggttggccctgatggtgtcctctcaattgagtcgtcatcgtcgtttgagaccacagttgaagttgaagaagggatggagcttgacagaggatatatctcccctcagtttgtcactaaccttgaaaaatctattgttgagttcgaaaatgctcggattcttgtcactgatcagaagatatcatcgataaaagaaattattcctctgttggagcagacaacacagttaagagcaccacttcttataattgcagaggatgtaagtggcgaggcgctggcaacattagtcataaacaagcttagaggaattttaaatgtggctgcaatcaaagctcctggttttggtgagaggcgtaaagctcttcttcaggacattgccattgttacaggtgctgaatatcaatccaaagatcttggtctactagttgaggatacaacagtggagcagcttggcatagctccgaaag

SEQ ID NO: 38886 - protein, 171 aa, Zea mays subsp. mays
  peptide (1)..(171): Ceres Seq. ID no. 2789555
  misc_feature (1)..(170): Pfam Name: Pfam Description:  TCP-1/cpn60 chaperonin family
  misc_feature (1)..(170): NCBI GI NO: 31193919 NR Description: putative rubisco subunit binding-protein alphasubunit precursor
  misc_feature (1)..(170): NCBI GI NO: 1710807 NR Description: RuBisCO subunit binding-protein alpha subunit
  misc_feature (1)..(170): NCBI GI NO: 134101 NR Description: RUBISCO SUBUNIT BINDING-PROTEIN ALPHA SUBUNIT
  misc_feature (1)..(170): NCBI GI NO: 5650721 NR Description: rubisco subunit binding-protein alpha subunit
  misc_feature (1)..(170): NCBI GI NO: 134102 NR Description: RuBisCO subunit binding-protein alpha subunit
  misc_feature (1)..(170): NCBI GI NO: 1351030 NR Description: RuBisCO subunit binding-protein alpha subunit
  misc_feature (1)..(170): NCBI GI NO: 3790441 NR Description: chaperonin 60 alpha subunit [Canavalia lineata]
  misc_feature (1)..(170): NCBI GI NO: 15226314 NR Description: putative rubisco subunit binding-protein alphasubunit
  misc_feature (1)..(170): NCBI GI NO: 21554572 NR Description: putative rubisco subunit binding-protein alphasubunit
  misc_feature (1)..(170): NCBI GI NO: 99801 NR Description: chaperonine 60K alpha chain - rape (fragment)
AGNDEFVGTMIAEAIDKVGPDGVLSIESSSSFETTVEVEEGMELDRGYISPQFVTNLEKSIVEFENARILVTDQKISSIKEIIPLLEQTTQLRAPLLIIAEDVSGEALATLVINKLRGILNVAAIKAPGFGERRKALLQDIAIVTGAEYQSKDLGLLVEDTTVEQLGIAPK

SEQ ID NO: 38887 - protein, 162 aa, Zea mays subsp. mays
  peptide (1)..(162): Ceres Seq. ID no. 2789556
  misc_feature (1)..(161): Pfam Name: Pfam Description:  TCP-1/cpn60 chaperonin family
  misc_feature (1)..(161): NCBI GI NO: 31193919 NR Description: putative rubisco subunit binding-protein alphasubunit precursor
  misc_feature (1)..(161): NCBI GI NO: 1710807 NR Description: RuBisCO subunit binding-protein alpha subunit
  misc_feature (1)..(161): NCBI GI NO: 134101 NR Description: RUBISCO SUBUNIT BINDING-PROTEIN ALPHA SUBUNIT
  misc_feature (1)..(161): NCBI GI NO: 5650721 NR Description: rubisco subunit binding-protein alpha subunit
  misc_feature (1)..(161): NCBI GI NO: 134102 NR Description: RuBisCO subunit binding-protein alpha subunit
  misc_feature (1)..(161): NCBI GI NO: 1351030 NR Description: RuBisCO subunit binding-protein alpha subunit
  misc_feature (1)..(161): NCBI GI NO: 3790441 NR Description: chaperonin 60 alpha subunit [Canavalia lineata]
  misc_feature (1)..(161): NCBI GI NO: 15226314 NR Description: putative rubisco subunit binding-protein alphasubunit
  misc_feature (1)..(161): NCBI GI NO: 21554572 NR Description: putative rubisco subunit binding-protein alphasubunit
  misc_feature (1)..(161): NCBI GI NO: 99801 NR Description: chaperonine 60K alpha chain - rape (fragment)
MIAEAIDKVGPDGVLSIESSSSFETTVEVEEGMELDRGYISPQFVTNLEKSIVEFENARILVTDQKISSIKEIIPLLEQTTQLRAPLLIIAEDVSGEALATLVINKLRGILNVAAIKAPGFGERRKALLQDIAIVTGAEYQSKDLGLLVEDTTVEQLGIAPK

SEQ ID NO: 38888 - protein, 130 aa, Zea mays subsp. mays
  peptide (1)..(130): Ceres Seq. ID no. 2789557
  misc_feature (1)..(129): Pfam Name: Pfam Description:  TCP-1/cpn60 chaperonin family
  misc_feature (1)..(129): NCBI GI NO: 31193919 NR Description: putative rubisco subunit binding-protein alphasubunit precursor
  misc_feature (1)..(129): NCBI GI NO: 1710807 NR Description: RuBisCO subunit binding-protein alpha subunit
  misc_feature (1)..(129): NCBI GI NO: 134101 NR Description: RUBISCO SUBUNIT BINDING-PROTEIN ALPHA SUBUNIT
  misc_feature (1)..(129): NCBI GI NO: 5650721 NR Description: rubisco subunit binding-protein alpha subunit
  misc_feature (1)..(129): NCBI GI NO: 134102 NR Description: RuBisCO subunit binding-protein alpha subunit
  misc_feature (1)..(129): NCBI GI NO: 1351030 NR Description: RuBisCO subunit binding-protein alpha subunit
  misc_feature (1)..(129): NCBI GI NO: 3790441 NR Description: chaperonin 60 alpha subunit [Canavalia lineata]
  misc_feature (1)..(129): NCBI GI NO: 15226314 NR Description: putative rubisco subunit binding-protein alphasubunit
  misc_feature (1)..(129): NCBI GI NO: 21554572 NR Description: putative rubisco subunit binding-protein alphasubunit
  misc_feature (1)..(129): NCBI GI NO: 99801 NR Description: chaperonine 60K alpha chain - rape (fragment)
MELDRGYISPQFVTNLEKSIVEFENARILVTDQKISSIKEIIPLLEQTTQLRAPLLIIAEDVSGEALATLVINKLRGILNVAAIKAPGFGERRKALLQDIAIVTGAEYQSKDLGLLVEDTTVEQLGIAPK

SEQ ID NO: 38889 - DNA, 499 bp, Zea mays subsp. mays
  misc_feature (1)..(499): Ceres Seq. ID no. 1940669
  misc_feature (417)..(417): n is a, c, t, g, unknown, or other
acaccacgcgctgcagctgctcacacacagtgcaacagaccccctccacctccacgcgatcggacgacacgaagcggccatcggggatcccctccgctacgcctctcgatggtctcctccagcgcgccgccgccgcaggcccagtccgacgcggccgggtcgggggaggaagcgagcaagaaggtgcggaagccgtacacaatcaccaagtcccgggagagctggacggagcaggagcacgacaagttcctcgaggccctgcagctctttgatcgtgactggaagaagatagaggcttttgttggctccaagactgtcatccagattaggagccatgcacagaagtaccttttgaaggttcagaaaaatggaaccagcgaacatgtcccacctccacgaccaaagcgaaaagctgcncatccatatcctcagaaggcttccaagaatgttatgccagattttgcgggagtgtacagcttcttaggtagtgtttcgatcc

SEQ ID NO: 38890 - protein, 166 aa, Zea mays subsp. mays
  peptide (1)..(166): Ceres Seq. ID no. 1940670
  misc_feature (72)..(116): Pfam Name: Pfam Description:  Myb-like DNA-binding domain
  misc_feature (30)..(152): NCBI GI NO: 30680926 NR Description: myb family transcription factor
  misc_feature (30)..(149): NCBI GI NO: 6682239 NR Description: putative MYB-related protein
  misc_feature (29)..(158): NCBI GI NO: 8953721 NR Description: contains similarity to MYB-related DNA-bindingprotein~gene_id:F6N7
  misc_feature (29)..(158): NCBI GI NO: 30696221 NR Description: myb family transcription factor
  misc_feature (29)..(158): NCBI GI NO: 30696225 NR Description: myb family transcription factor
  misc_feature (54)..(149): NCBI GI NO: 11357907 NR Description: hypothetical protein F9G14
  misc_feature (54)..(149): NCBI GI NO: 18414039 NR Description: myb family transcription factor
  misc_feature (54)..(149): NCBI GI NO: 14596213 NR Description: putative protein [Arabidopsis thaliana]
  misc_feature (56)..(152): NCBI GI NO: 2505876 NR Description: MYB-related protein [Arabidopsis thaliana]
  misc_feature (56)..(148): NCBI GI NO: 15223419 NR Description: myb family transcription factor
  misc_feature (139)..(139): Xaa is any aa, unknown or other
TPRAAAAHTQCNRPPPPPRDRTTRSGHRGSPPLRLSMVSSSAPPPQAQSDAAGSGEEASKKVRKPYTITKSRESWTEQEHDKFLEALQLFDRDWKKIEAFVGSKTVIQIRSHAQKYLLKVQKNGTSEHVPPPRPKRKAXHPYPQKASKNVMPDFAGVYSFLGSVSI

SEQ ID NO: 38891 - protein, 96 aa, Zea mays subsp. mays
  peptide (1)..(96): Ceres Seq. ID no. 1940671
HHALQLLTHSATDPLHLHAIGRHEAAIGDPLRYASRWSPPARRRRRPSPTRPGRGRKRARRCGSRTQSPSPGRAGRSRSTTSSSRPCSSLIVTGRR

SEQ ID NO: 38892 - protein, 130 aa, Zea mays subsp. mays
  peptide (1)..(130): Ceres Seq. ID no. 1940672
  misc_feature (36)..(80): Pfam Name: Pfam Description:  Myb-like DNA-binding domain
  misc_feature (1)..(116): NCBI GI NO: 30680926 NR Description: myb family transcription factor
  misc_feature (1)..(113): NCBI GI NO: 6682239 NR Description: putative MYB-related protein
  misc_feature (1)..(122): NCBI GI NO: 8953721 NR Description: contains similarity to MYB-related DNA-bindingprotein~gene_id:F6N7
  misc_feature (1)..(122): NCBI GI NO: 30696221 NR Description: myb family transcription factor
  misc_feature (1)..(122): NCBI GI NO: 30696225 NR Description: myb family transcription factor
  misc_feature (18)..(113): NCBI GI NO: 11357907 NR Description: hypothetical protein F9G14
  misc_feature (18)..(113): NCBI GI NO: 18414039 NR Description: myb family transcription factor
  misc_feature (18)..(113): NCBI GI NO: 14596213 NR Description: putative protein [Arabidopsis thaliana]
  misc_feature (20)..(116): NCBI GI NO: 2505876 NR Description: MYB-related protein [Arabidopsis thaliana]
  misc_feature (20)..(112): NCBI GI NO: 15223419 NR Description: myb family transcription factor
  misc_feature (103)..(103): Xaa is any aa, unknown or other
MVSSSAPPPQAQSDAAGSGEEASKKVRKPYTITKSRESWTEQEHDKFLEALQLFDRDWKKIEAFVGSKTVIQIRSHAQKYLLKVQKNGTSEHVPPPRPKRKAXHPYPQKASKNVMPDFAGVYSFLGSVSI

SEQ ID NO: 38893 - DNA, 2378 bp, Zea mays subsp. mays
  misc_feature (1)..(2378): Ceres Seq. ID no. 12362946
gcacgagaccattacctagaacatcctaatcgaaaagcactctcctccccgctctcgacttcccatcccctgcggccccgccccccggactcttctcgtcgcggcgcgcccaatcggctcggtggcaggcttgcgcaccggctcggctcgggtccggttctaccgccaacgcgggccgccgcgctcccggatctcggtctagtcagagagttagcagacaaagatggcgacttatgagcccaagaacattctcataactggtgctgctggtttcattgcatcgcatgtcgccaaccgtctggtcaggaactatccccaatacaagatcgttgtccttgacaagattgactactgctccaacctaaagaacctcaatccttcacggtcttcaccaaatttcaaatttgtcaagggtgatattgcaagtgctgacctggtgaattaccttctgatcaccgagtcaattgacaccatcatgcactttgctgcccagacgcatgttgataattcttttggcaattcatttgagttcacaaaaaacaatatatatggcacccatgttcttcttgaggcttgcaaggttactggtcagatcaggaggtttattcatgtcagtaccgacgaggtgtatggtgaaactgatgaagatgctgtggttggtaaccatgaggcctcacagctgcttccaacaaatccatattcagctacaaaggctggggctgaaatgcttgtgatggcatacggaaggtcttatggtcttcctgtgattaccactcgtggcaacaatgtgtatgggccaaatcaatttcctgagaaactcattcccaaattcattcttttggccatgcaaggtctgcctcttccaattcatggagatggctccaacgtcaggagctacctgtactgtgaggatgtggccgaagcttttgaggtggtccttcacaaaggagaagttggacatgtgtataatattggtactgtgaaggagaggagggtgattgatgtagccaaggacatatgcaagctctttggcttggatactgagaaagtcatcaggtttgttgagaacaggcccttcaatgaccagaggtacttcttagatgatcagaagctaaagagattgggatgggcagagcgcacaccatgggaagagggcttgaagaagacgatggagtggtacaccaccaatcctgattactggggagatgtcactggtgcgctgcttcctcatccaaggatgttgatgactcctggagttgaaaggcataactgggctgaagaaatcaagtctctggcttcttcgccagctgaagctagtacaatagctccagcaaccagtaccaaaagcatctctgatgcccctcagaagccttcctacaggtttttaatctatggtaggactggatggattggtggcctccttggaaagatttgtgaaaagcaagggataccatatgagtatgggaaaggacgcttggaagagcgctctcagctgttggaggatattaggaatgtgaagccgactcatgttttcaatgctgccggagtcactgggagaccaaatgttgactggtgcgagacccataaacaggacactatccgcaccaatgttgtaggcactttgaatcttgctgatgtctgtcgcaagcagggtctgctcatgattaattatgctacaggctgtatatttgagtatgatgctaagcaccctgaagggtctggtattggctttaaagaggaagacacgcccaactttattggttccttttattccaaaactaaagcaatggtggaagagctattgaaggagtatgataatgtctgtactcttagggtcaggatgcctatatcatcagatctaagcaaccctcgtaacttcatcacaaagatagctcgttacgacaaggtggtgaacattcccaacagcatgacaatcttggatgagcttctgcctatctccattgagatggcgaaacgggactgcaggggcatatggaacttcaccaaccctggcgctgtaagccacaacgagattctagagatgtacaagaaatacatcaatcctgatttcaagtggaccaatttcacactcgaagaacaggccaaggtgatagtcgcgcctagaagcaacaacgagatggacacgtcgaaactgaaggccgagttccctcagctgctgtccatcaaggattctttgatcaagtacgtctttgagcccaacaggaaggttcctgttaattgaggatttacgttgcgtggatgcggaggttatttgtgttggttattggactctaaattagctaatgttgcaccgtggtgcgtactagttgtgttcgattcttttgggacaatagcaagcatacctctttctggtcgtc

SEQ ID NO: 38894 - protein, 672 aa, Zea mays subsp. mays
  peptide (1)..(672): Ceres Seq. ID no. 12362947
  misc_feature (9)..(323): Pfam Name: Pfam Description:  NAD dependent epimerase/dehydratase family
  misc_feature (1)..(668): NCBI GI NO: 15218420 NR Description: dTDP-glucose 4,6-dehydratase, putative
  misc_feature (1)..(668): NCBI GI NO: 15231926 NR Description: dTDP-glucose 4,6-dehydratase, putative
  misc_feature (3)..(668): NCBI GI NO: 25405640 NR Description: hypothetical protein F22G10.13
  misc_feature (168)..(668): NCBI GI NO: 18404494 NR Description: dTDP-D-glucose 4,6-dehydratase, putative
  misc_feature (168)..(668): NCBI GI NO: 15081769 NR Description: At1g53500/F22G10_13 [Arabidopsis thaliana]
  misc_feature (376)..(671): NCBI GI NO: 18407710 NR Description: expressed protein; protein id: At1g63000
  misc_feature (376)..(671): NCBI GI NO: 21593701 NR Description: unknown [Arabidopsis thaliana]
  misc_feature (376)..(671): NCBI GI NO: 14423536 NR Description: Unknown protein [Arabidopsis thaliana]
  misc_feature (402)..(670): NCBI GI NO: 2982303 NR Description: hypothetical protein [Picea mariana]
  misc_feature (4)..(316): NCBI GI NO: 17531421 NR Description: 4 6-dehydratase (71.1 kD) [Caenorhabditis elegans]
MATYEPKNILITGAAGFIASHVANRLVRNYPQYKIVVLDKIDYCSNLKNLNPSRSSPNFKFVKGDIASADLVNYLLITESIDTIMHFAAQTHVDNSFGNSFEFTKNNIYGTHVLLEACKVTGQIRRFIHVSTDEVYGETDEDAVVGNHEASQLLPTNPYSATKAGAEMLVMAYGRSYGLPVITTRGNNVYGPNQFPEKLIPKFILLAMQGLPLPIHGDGSNVRSYLYCEDVAEAFEVVLHKGEVGHVYNIGTVKERRVIDVAKDICKLFGLDTEKVIRFVENRPFNDQRYFLDDQKLKRLGWAERTPWEEGLKKTMEWYTTNPDYWGDVTGALLPHPRMLMTPGVERHNWAEEIKSLASSPAEASTIAPATSTKSISDAPQKPSYRFLIYGRTGWIGGLLGKICEKQGIPYEYGKGRLEERSQLLEDIRNVKPTHVFNAAGVTGRPNVDWCETHKQDTIRTNVVGTLNLADVCRKQGLLMINYATGCIFEYDAKHPEGSGIGFKEEDTPNFIGSFYSKTKAMVEELLKEYDNVCTLRVRMPISSDLSNPRNFITKIARYDKVVNIPNSMTILDELLPISIEMAKRDCRGIWNFTNPGAVSHNEILEMYKKYINPDFKWTNFTLEEQAKVIVAPRSNNEMDTSKLKAEFPQLLSIKDSLIKYVFEPNRKVPVN

SEQ ID NO: 38895 - protein, 588 aa, Zea mays subsp. mays
  peptide (1)..(588): Ceres Seq. ID no. 12362948
  misc_feature (1)..(239): Pfam Name: Pfam Description:  NAD dependent epimerase/dehydratase family
  misc_feature (1)..(584): NCBI GI NO: 15218420 NR Description: dTDP-glucose 4,6-dehydratase, putative
  misc_feature (1)..(584): NCBI GI NO: 15231926 NR Description: dTDP-glucose 4,6-dehydratase, putative
  misc_feature (1)..(584): NCBI GI NO: 25405640 NR Description: hypothetical protein F22G10.13
  misc_feature (84)..(584): NCBI GI NO: 18404494 NR Description: dTDP-D-glucose 4,6-dehydratase, putative
  misc_feature (84)..(584): NCBI GI NO: 15081769 NR Description: At1g53500/F22G10_13 [Arabidopsis thaliana]
  misc_feature (292)..(587): NCBI GI NO: 18407710 NR Description: expressed protein; protein id: At1g63000
  misc_feature (292)..(587): NCBI GI NO: 21593701 NR Description: unknown [Arabidopsis thaliana]
  misc_feature (292)..(587): NCBI GI NO: 14423536 NR Description: Unknown protein [Arabidopsis thaliana]
  misc_feature (318)..(586): NCBI GI NO: 2982303 NR Description: hypothetical protein [Picea mariana]
  misc_feature (1)..(232): NCBI GI NO: 17531421 NR Description: 4 6-dehydratase (71.1 kD) [Caenorhabditis elegans]
MHFAAQTHVDNSFGNSFEFTKNNIYGTHVLLEACKVTGQIRRFIHVSTDEVYGETDEDAVVGNHEASQLLPTNPYSATKAGAEMLVMAYGRSYGLPVITTRGNNVYGPNQFPEKLIPKFILLAMQGLPLPIHGDGSNVRSYLYCEDVAEAFEVVLHKGEVGHVYNIGTVKERRVIDVAKDICKLFGLDTEKVIRFVENRPFNDQRYFLDDQKLKRLGWAERTPWEEGLKKTMEWYTTNPDYWGDVTGALLPHPRMLMTPGVERHNWAEEIKSLASSPAEASTIAPATSTKSISDAPQKPSYRFLIYGRTGWIGGLLGKICEKQGIPYEYGKGRLEERSQLLEDIRNVKPTHVFNAAGVTGRPNVDWCETHKQDTIRTNVVGTLNLADVCRKQGLLMINYATGCIFEYDAKHPEGSGIGFKEEDTPNFIGSFYSKTKAMVEELLKEYDNVCTLRVRMPISSDLSNPRNFITKIARYDKVVNIPNSMTILDELLPISIEMAKRDCRGIWNFTNPGAVSHNEILEMYKKYINPDFKWTNFTLEEQAKVIVAPRSNNEMDTSKLKAEFPQLLSIKDSLIKYVFEPNRKVPVN

SEQ ID NO: 38896 - protein, 505 aa, Zea mays subsp. mays
  peptide (1)..(505): Ceres Seq. ID no. 12362949
  misc_feature (1)..(156): Pfam Name: Pfam Description:  NAD dependent epimerase/dehydratase family
  misc_feature (1)..(501): NCBI GI NO: 15218420 NR Description: dTDP-glucose 4,6-dehydratase, putative
  misc_feature (1)..(501): NCBI GI NO: 15231926 NR Description: dTDP-glucose 4,6-dehydratase, putative
  misc_feature (1)..(501): NCBI GI NO: 25405640 NR Description: hypothetical protein F22G10.13
  misc_feature (1)..(501): NCBI GI NO: 18404494 NR Description: dTDP-D-glucose 4,6-dehydratase, putative
  misc_feature (1)..(501): NCBI GI NO: 15081769 NR Description: At1g53500/F22G10_13 [Arabidopsis thaliana]
  misc_feature (209)..(504): NCBI GI NO: 18407710 NR Description: expressed protein; protein id: At1g63000
  misc_feature (209)..(504): NCBI GI NO: 21593701 NR Description: unknown [Arabidopsis thaliana]
  misc_feature (209)..(504): NCBI GI NO: 14423536 NR Description: Unknown protein [Arabidopsis thaliana]
  misc_feature (235)..(503): NCBI GI NO: 2982303 NR Description: hypothetical protein [Picea mariana]
  misc_feature (1)..(149): NCBI GI NO: 17531421 NR Description: 4 6-dehydratase (71.1 kD) [Caenorhabditis elegans]
MLVMAYGRSYGLPVITTRGNNVYGPNQFPEKLIPKFILLAMQGLPLPIHGDGSNVRSYLYCEDVAEAFEVVLHKGEVGHVYNIGTVKERRVIDVAKDICKLFGLDTEKVIRFVENRPFNDQRYFLDDQKLKRLGWAERTPWEEGLKKTMEWYTTNPDYWGDVTGALLPHPRMLMTPGVERHNWAEEIKSLASSPAEASTIAPATSTKSISDAPQKPSYRFLIYGRTGWIGGLLGKICEKQGIPYEYGKGRLEERSQLLEDIRNVKPTHVFNAAGVTGRPNVDWCETHKQDTIRTNVVGTLNLADVCRKQGLLMINYATGCIFEYDAKHPEGSGIGFKEEDTPNFIGSFYSKTKAMVEELLKEYDNVCTLRVRMPISSDLSNPRNFITKIARYDKVVNIPNSMTILDELLPISIEMAKRDCRGIWNFTNPGAVSHNEILEMYKKYINPDFKWTNFTLEEQAKVIVAPRSNNEMDTSKLKAEFPQLLSIKDSLIKYVFEPNRKVPVN

SEQ ID NO: 38897 - DNA, 493 bp, Zea mays subsp. mays
  misc_feature (1)..(493): Ceres Seq. ID no. 1671328
cggtgtctgctaatatattcatattaacaaaggtctgtctgctgtttattggtatttacacttgtgtcaccagcttctttacaaatacgctcattctgcctacaataaatggaccaacggagggcctgatgctgatctatgtatcacatttgtttacattttttactggcgctgaatggtgggcacaggattttcggaaatcactaccctttttcggttggattccacttccatttctttctgaaattgaaattcctttatatgttcttgtgctgattcttatgatcgtatgtgctgttatacctactgttagatccaatgtcagtaatgtccaagaggtagttgaggcacgaaaaggaagcatggcattagcattagccatgatccttccttttattgtactgttagctggagttgctatctggtgttatctttctccttcaagtataatgaggaaccagccacatttgctcgtgattggaactggcttaat

SEQ ID NO: 38898 - protein, 163 aa, Zea mays subsp. mays
  peptide (1)..(163): Ceres Seq. ID no. 1671329
  misc_feature (25)..(90): Pfam Name: Pfam Description:  CDP-alcohol phosphatidyltransferase
  misc_feature (25)..(162): NCBI GI NO: 18390098 NR Description: aminoalcoholphosphotransferase [Sorghum bicolor]
  misc_feature (25)..(162): NCBI GI NO: 3927806 NR Description: aminoalcoholphosphotransferase
  misc_feature (25)..(162): NCBI GI NO: 7488701 NR Description: probable ethanolaminephosphotransferase (EC2
  misc_feature (25)..(162): NCBI GI NO: 30313359 NR Description: aminoalcoholphosphotransferase
  misc_feature (25)..(162): NCBI GI NO: 7488522 NR Description: ethanolaminephosphotransferase homolog - turnip
  misc_feature (25)..(162): NCBI GI NO: 15222885 NR Description: aminoalcoholphosphotransferase
  misc_feature (25)..(162): NCBI GI NO: 15229490 NR Description: hypothetical protein; protein id: At3g25585
  misc_feature (25)..(162): NCBI GI NO: 5917787 NR Description: aminoalcoholphosphotransferase [Brassica rapa]
  misc_feature (15)..(162): NCBI GI NO: 27762264 NR Description: aminoalcoholphosphotransferase [Brassica napus]
VSANIFILTKVCLLFIGIYTCVTSFFTNTLILPTINGPTEGLMLIYVSHLFTFFTGAEWWAQDFRKSLPFFGWIPLPFLSEIEIPLYVLVLILMIVCAVIPTVRSNVSNVQEVVEARKGSMALALAMILPFIVLLAGVAIWCYLSPSSIMRNQPHLLVIGTGL

SEQ ID NO: 38899 - protein, 121 aa, Zea mays subsp. mays
  peptide (1)..(121): Ceres Seq. ID no. 1671330
  misc_feature (1)..(120): NCBI GI NO: 18390098 NR Description: aminoalcoholphosphotransferase [Sorghum bicolor]
  misc_feature (1)..(120): NCBI GI NO: 3927806 NR Description: aminoalcoholphosphotransferase
  misc_feature (1)..(120): NCBI GI NO: 7488701 NR Description: probable ethanolaminephosphotransferase (EC2
  misc_feature (1)..(120): NCBI GI NO: 30313359 NR Description: aminoalcoholphosphotransferase
  misc_feature (1)..(120): NCBI GI NO: 7488522 NR Description: ethanolaminephosphotransferase homolog - turnip
  misc_feature (1)..(120): NCBI GI NO: 15222885 NR Description: aminoalcoholphosphotransferase
  misc_feature (1)..(120): NCBI GI NO: 15229490 NR Description: hypothetical protein; protein id: At3g25585
  misc_feature (1)..(120): NCBI GI NO: 5917787 NR Description: aminoalcoholphosphotransferase [Brassica rapa]
  misc_feature (1)..(120): NCBI GI NO: 27762264 NR Description: aminoalcoholphosphotransferase [Brassica napus]
MLIYVSHLFTFFTGAEWWAQDFRKSLPFFGWIPLPFLSEIEIPLYVLVLILMIVCAVIPTVRSNVSNVQEVVEARKGSMALALAMILPFIVLLAGVAIWCYLSPSSIMRNQPHLLVIGTGL

SEQ ID NO: 38900 - DNA, 1953 bp, Zea mays subsp. mays
  misc_feature (1)..(1953): Ceres Seq. ID no. 12387587
gcacgagaccattacctagaacatcctaatcgaaaaaagcgaggaggcagtgcggagacgggagccagtggccagtgacagtgagcggcgacgttccagtgtccactgtccagtaggcgagcgaggaggtggtccattggccggccatggctcgtctccgctgcgtcttcgtcgtcttcgtcctgctctcgtctgccctccgccttccaggcgacgccattgcctcccgggggcaccatggccccgccgcacacgactacagggactcgctcgtcaagtccatcctcttcttcgagggccagcggtcgggcaagctgccgccgtcgcagcgcgtgtcctggcgcagggactcgggactctccgacggtcactccgccaaggtggacctggtgggcgggtaccacgacgctggtgacaacgtcaagttcgggttcccgatggcgttcagcatgacgatgctggcgtggagcgtggtggagtttggcggcctcatgaagtcggagctgcagcacgccagggacgccgtccgctggggcgccgactacctgctcaaggccacggcgcacccggacaccatctacgtccaggtcggtgacgcgaccaaggaccacgcgtgctgggagcggccggaggacatggacacccccaggacggtgtacaaggtggaccgtggcaccccgggatccgacgtcgccgccgagactgccgcggctctcgccgccgcctccctcgtcttccgcaagtccgacccggcctacgccagccgccttgtcgccagggccaagagggtgttcgagttcgcggacaagcaccgcggctcctacagcaccgggctggcggcggacgtgtgcccgtactactgctcctactccgggtaccaggacgagctcctgtggggcgcggcgtggcttcaccgcgccaccaagagcccctcttacctgagctacatccagacgaacgggcaggtgctgggcgcggacgagtcggacaacacgttcgggtgggacaacaagcacgcgggcgcgcgggtgctcatctccaagtcgttcctggtgcagcgcctgggcgcgctccacgagtacaagggccacgccgacggcttcatttgctccatggtgcccggcacggccacggaccagacgcagtacacccggggcgggctgctgttcaggcttagcgacagcaacatgcagtacgtgacgtcgagctctttcctcctgctcacctacgccaagtacctggcgttcgccaagcagacggtgcgctgcggcggcgtggcggtcacgccgcagcggctgcgcgccatcgcgcgcaggcaggtggactacctgctggggagcaacccgatggggatgtcctacatggtgggctacggcgccaagtacccgcgccgcatccaccaccgcgcttcgtcgctgccgtccgtggcggcgcacccggctaggatcggttgctcgcaggggttcaccgcgctgtacgcgggtggggccaatcccaacctgctcgtcggtgccgtcgtcgggggacccgacatgcaggacaggttccccgacgagcggaacgaccacgagcactcggagccggccacctacatcaacgcgccgctcgtcggcgcgctcgcctacctcgcgcactcctacggccagctctaagctccctagcgttaattgttgccgtgttgattgattgttcggaaattagagcatcgcgatttgacgaccccagtgcaagcaaaaccaaggaccttcgcttgtgggtcttaatatattgccactagtactcgtaggcgtgatttgtttgttacgcgacgccgctgctggcgcacgtatgtaagcgcggagacaaactgtgctccacggctccaccaagtgtactgctactaaggttgcagctcgcaactctatctgatgctatctactgttttgtttaattacatccacgaacctatccgcc

SEQ ID NO: 38901 - protein, 501 aa, Zea mays subsp. mays
  peptide (1)..(501): Ceres Seq. ID no. 12387588
  misc_feature (37)..(494): Pfam Name: Pfam Description:  Glycosyl hydrolase family 9
  misc_feature (4)..(501): NCBI GI NO: 11358947 NR Description: endo-1,3(4)-beta-glucanase (EC 3
  misc_feature (30)..(501): NCBI GI NO: 1362091 NR Description: cellulase (EC 3.2.1.4) precursor - tomato
  misc_feature (4)..(501): NCBI GI NO: 6009979 NR Description: endo-1,4-beta-glucanase [Pisum sativum]
  misc_feature (30)..(501): NCBI GI NO: 15235301 NR Description: glycosyl hydrolase family 9; protein id:At4g02290
  misc_feature (31)..(497): NCBI GI NO: 7484476 NR Description: cellulase (EC 3.2.1.4) 1 precursor - Monterey pine
  misc_feature (8)..(497): NCBI GI NO: 25350173 NR Description: cellulase (EC 3.2.1.4)
  misc_feature (8)..(497): NCBI GI NO: 15218612 NR Description: glycosyl hydrolase family 9
  misc_feature (29)..(498): NCBI GI NO: 11357128 NR Description: cellulase (EC 3.2.1.4) 2 precursor - Monterey pine
  misc_feature (1)..(500): NCBI GI NO: 12957206 NR Description: beta-1,4-glucanase [Atriplex lentiformis]
  misc_feature (13)..(495): NCBI GI NO: 34904062 NR Description: putative endo-beta-1,4-glucanase
MARLRCVFVVFVLLSSALRLPGDAIASRGHHGPAAHDYRDSLVKSILFFEGQRSGKLPPSQRVSWRRDSGLSDGHSAKVDLVGGYHDAGDNVKFGFPMAFSMTMLAWSVVEFGGLMKSELQHARDAVRWGADYLLKATAHPDTIYVQVGDATKDHACWERPEDMDTPRTVYKVDRGTPGSDVAAETAAALAAASLVFRKSDPAYASRLVARAKRVFEFADKHRGSYSTGLAADVCPYYCSYSGYQDELLWGAAWLHRATKSPSYLSYIQTNGQVLGADESDNTFGWDNKHAGARVLISKSFLVQRLGALHEYKGHADGFICSMVPGTATDQTQYTRGGLLFRLSDSNMQYVTSSSFLLLTYAKYLAFAKQTVRCGGVAVTPQRLRAIARRQVDYLLGSNPMGMSYMVGYGAKYPRRIHHRASSLPSVAAHPARIGCSQGFTALYAGGANPNLLVGAVVGGPDMQDRFPDERNDHEHSEPATYINAPLVGALAYLAHSYGQL

SEQ ID NO: 38902 - protein, 404 aa, Zea mays subsp. mays
  peptide (1)..(404): Ceres Seq. ID no. 12387589
  misc_feature (1)..(397): Pfam Name: Pfam Description:  Glycosyl hydrolase family 9
  misc_feature (1)..(404): NCBI GI NO: 11358947 NR Description: endo-1,3(4)-beta-glucanase (EC 3
  misc_feature (1)..(404): NCBI GI NO: 1362091 NR Description: cellulase (EC 3.2.1.4) precursor - tomato
  misc_feature (1)..(404): NCBI GI NO: 6009979 NR Description: endo-1,4-beta-glucanase [Pisum sativum]
  misc_feature (1)..(404): NCBI GI NO: 15235301 NR Description: glycosyl hydrolase family 9; protein id:At4g02290
  misc_feature (1)..(400): NCBI GI NO: 7484476 NR Description: cellulase (EC 3.2.1.4) 1 precursor - Monterey pine
  misc_feature (1)..(400): NCBI GI NO: 25350173 NR Description: cellulase (EC 3.2.1.4)
  misc_feature (1)..(400): NCBI GI NO: 15218612 NR Description: glycosyl hydrolase family 9
  misc_feature (1)..(401): NCBI GI NO: 11357128 NR Description: cellulase (EC 3.2.1.4) 2 precursor - Monterey pine
  misc_feature (1)..(403): NCBI GI NO: 12957206 NR Description: beta-1,4-glucanase [Atriplex lentiformis]
  misc_feature (1)..(398): NCBI GI NO: 34904062 NR Description: putative endo-beta-1,4-glucanase
MAFSMTMLAWSVVEFGGLMKSELQHARDAVRWGADYLLKATAHPDTIYVQVGDATKDHACWERPEDMDTPRTVYKVDRGTPGSDVAAETAAALAAASLVFRKSDPAYASRLVARAKRVFEFADKHRGSYSTGLAADVCPYYCSYSGYQDELLWGAAWLHRATKSPSYLSYIQTNGQVLGADESDNTFGWDNKHAGARVLISKSFLVQRLGALHEYKGHADGFICSMVPGTATDQTQYTRGGLLFRLSDSNMQYVTSSSFLLLTYAKYLAFAKQTVRCGGVAVTPQRLRAIARRQVDYLLGSNPMGMSYMVGYGAKYPRRIHHRASSLPSVAAHPARIGCSQGFTALYAGGANPNLLVGAVVGGPDMQDRFPDERNDHEHSEPATYINAPLVGALAYLAHSYGQL

SEQ ID NO: 38903 - protein, 400 aa, Zea mays subsp. mays
  peptide (1)..(400): Ceres Seq. ID no. 12387590
  misc_feature (1)..(393): Pfam Name: Pfam Description:  Glycosyl hydrolase family 9
  misc_feature (1)..(400): NCBI GI NO: 11358947 NR Description: endo-1,3(4)-beta-glucanase (EC 3
  misc_feature (1)..(400): NCBI GI NO: 1362091 NR Description: cellulase (EC 3.2.1.4) precursor - tomato
  misc_feature (1)..(400): NCBI GI NO: 6009979 NR Description: endo-1,4-beta-glucanase [Pisum sativum]
  misc_feature (1)..(400): NCBI GI NO: 15235301 NR Description: glycosyl hydrolase family 9; protein id:At4g02290
  misc_feature (1)..(396): NCBI GI NO: 7484476 NR Description: cellulase (EC 3.2.1.4) 1 precursor - Monterey pine
  misc_feature (1)..(396): NCBI GI NO: 25350173 NR Description: cellulase (EC 3.2.1.4)
  misc_feature (1)..(396): NCBI GI NO: 15218612 NR Description: glycosyl hydrolase family 9
  misc_feature (1)..(397): NCBI GI NO: 11357128 NR Description: cellulase (EC 3.2.1.4) 2 precursor - Monterey pine
  misc_feature (1)..(399): NCBI GI NO: 12957206 NR Description: beta-1,4-glucanase [Atriplex lentiformis]
  misc_feature (1)..(394): NCBI GI NO: 34904062 NR Description: putative endo-beta-1,4-glucanase
MTMLAWSVVEFGGLMKSELQHARDAVRWGADYLLKATAHPDTIYVQVGDATKDHACWERPEDMDTPRTVYKVDRGTPGSDVAAETAAALAAASLVFRKSDPAYASRLVARAKRVFEFADKHRGSYSTGLAADVCPYYCSYSGYQDELLWGAAWLHRATKSPSYLSYIQTNGQVLGADESDNTFGWDNKHAGARVLISKSFLVQRLGALHEYKGHADGFICSMVPGTATDQTQYTRGGLLFRLSDSNMQYVTSSSFLLLTYAKYLAFAKQTVRCGGVAVTPQRLRAIARRQVDYLLGSNPMGMSYMVGYGAKYPRRIHHRASSLPSVAAHPARIGCSQGFTALYAGGANPNLLVGAVVGGPDMQDRFPDERNDHEHSEPATYINAPLVGALAYLAHSYGQL

SEQ ID NO: 38904 - DNA, 1959 bp, Zea mays subsp. mays; identical to SEQ ID NO: 32272
  misc_feature (1)..(1959): Ceres Seq. ID no. 12387609
  misc_feature (1764)..(1764): n is a, c, t, g, unknown, or other
  misc_feature (1886)..(1886): n is a, c, t, g, unknown, or other

SEQ ID NO: 38905 - protein, 350 aa, Zea mays subsp. mays; identical to SEQ ID NO: 32273
  peptide (1)..(350): Ceres Seq. ID no. 12387610
  misc_feature (1)..(297): Pfam Name: glycosyl hydrolase family 5 Pfam Description: Cellulase
  misc_feature (1)..(346): NCBI GI NO: 34909462 NR Description: putative (1-4)-beta-mannan endohydrolase
  misc_feature (1)..(346): NCBI GI NO: 30681096 NR Description: glycosyl hydrolase family 5/cellulase
  misc_feature (1)..(342): NCBI GI NO: 15235255 NR Description: glycosyl hydrolase family 5/cellulase
  misc_feature (75)..(346): NCBI GI NO: 25354515 NR Description: (1-4)-beta-mannan endohydrolase
  misc_feature (1)..(46): NCBI GI NO: 25354515 NR Description: (1-4)-beta-mannan endohydrolase
  misc_feature (1)..(332): NCBI GI NO: 10129675 NR Description: (1-4)-beta-mannan endohydrolase [Coffea arabica]
  misc_feature (1)..(327): NCBI GI NO: 34912090 NR Description: putative mannan endo-1,4-beta-mannosidase
  misc_feature (1)..(331): NCBI GI NO: 15239973 NR Description: glycosyl hydrolase family 5/cellulase
  misc_feature (1)..(328): NCBI GI NO: 15241093 NR Description: glycosyl hydrolase family 5/cellulase
  misc_feature (3)..(339): NCBI GI NO: 15228393 NR Description: glycosyl hydrolase family 5/cellulase

SEQ ID NO: 38906 - protein, 275 aa, Zea mays subsp. mays; identical to SEQ ID NO: 32274
  peptide (1)..(275): Ceres Seq. ID no. 12387611
  misc_feature (1)..(222): Pfam Name: glycosyl hydrolase family 5 Pfam Description: Cellulase
  misc_feature (1)..(271): NCBI GI NO: 34909462 NR Description: putative (1-4)-beta-mannan endohydrolase
  misc_feature (1)..(271): NCBI GI NO: 30681096 NR Description: glycosyl hydrolase family 5/cellulase
  misc_feature (1)..(267): NCBI GI NO: 15235255 NR Description: glycosyl hydrolase family 5/cellulase
  misc_feature (1)..(271): NCBI GI NO: 25354515 NR Description: (1-4)-beta-mannan endohydrolase
  misc_feature (1)..(257): NCBI GI NO: 10129675 NR Description: (1-4)-beta-mannan endohydrolase [Coffea arabica]
  misc_feature (1)..(252): NCBI GI NO: 34912090 NR Description: putative mannan endo-1,4-beta-mannosidase
  misc_feature (1)..(256): NCBI GI NO: 15239973 NR Description: glycosyl hydrolase family 5/cellulase
  misc_feature (1)..(253): NCBI GI NO: 15241093 NR Description: glycosyl hydrolase family 5/cellulase
  misc_feature (1)..(264): NCBI GI NO: 15228393 NR Description: glycosyl hydrolase family 5/cellulase
  misc_feature (1)..(259): NCBI GI NO: 23477717 NR Description: endo-beta-mannanase [Daucus carota]

SEQ ID NO: 38907 - protein, 227 aa, Zea mays subsp. mays; identical to SEQ ID NO: 32275
  peptide (1)..(227): Ceres Seq. ID no. 12387612
  misc_feature (1)..(174): Pfam Name: glycosyl hydrolase family 5 Pfam Description: Cellulase
  misc_feature (1)..(223): NCBI GI NO: 34909462 NR Description: putative (1-4)-beta-mannan endohydrolase
  misc_feature (1)..(223): NCBI GI NO: 30681096 NR Description: glycosyl hydrolase family 5/cellulase
  misc_feature (1)..(219): NCBI GI NO: 15235255 NR Description: glycosyl hydrolase family 5/cellulase
  misc_feature (1)..(223): NCBI GI NO: 25354515 NR Description: (1-4)-beta-mannan endohydrolase
  misc_feature (1)..(209): NCBI GI NO: 10129675 NR Description: (1-4)-beta-mannan endohydrolase [Coffea arabica]
  misc_feature (1)..(204): NCBI GI NO: 34912090 NR Description: putative mannan endo-1,4-beta-mannosidase
  misc_feature (1)..(208): NCBI GI NO: 15239973 NR Description: glycosyl hydrolase family 5/cellulase
  misc_feature (1)..(205): NCBI GI NO: 15241093 NR Description: glycosyl hydrolase family 5/cellulase
  misc_feature (1)..(216): NCBI GI NO: 15228393 NR Description: glycosyl hydrolase family 5/cellulase
  misc_feature (1)..(211): NCBI GI NO: 23477717 NR Description: endo-beta-mannanase [Daucus carota]

SEQ ID NO: 38908 - DNA, 2051 bp, Zea mays subsp. mays
  misc_feature (1)..(2051): Ceres Seq. ID no. 12417588
gcacgagaccattacctagaacatcctaatcgaaaacaccccaaccaaaaccccacggacggaacccaagaaagaagagaggggcacgagtccccatgaacgacgccggcgaggccgaggcgcaagaactcgccccacccggcgcctccgccgccgccggcctgcaaggcagggcggaggtcgacacctcgacgcccttcaagtcggtgcgcgaggccgtcgaccgcttcggcggcagcgccgcctggagctccgacctcatcaagcgtatgttcgcgctgcccccgagcccaaagaagcaggaggggggcgacgaactggccgatctggaggagcagaccgcgcagctagagaaggagctcggcgtcaaggaaagggagacgcttgatgtgctcaaagagttggagtccaccaagaaggtggtcgcagatttgaagctaaagatacagaacgaaggtgccggtgcattttgcatccctgaagagagtgttcgggggtcaagccgagctgcccactgccgctgaagaggttgcagaagtgcagcctgagaatgctgaaactgatgtggttatgggcgcgcttcatgtgcagctgcaccagtctcctggtacttcagtgctgaagggccttgagcaggcaaaagccaatctaaacaggaccacgagtgatcttgcagctataagggcctccgtcgagtcgctgcggaacgacattgcgaaagagagaatcttggtggagagaagccgagagaaggtatgtgccaacacgacactgattgcttctctggaggatgagctgaaccggactgcacagaagctgcagacgctgcgggatctgcagaggaggcgtgacgatcaatcggacatcttcatagagatcaagaagatgacatctgagctagagcagctcaggaatgcagcgagtgctgccaaatcggaagctgctatgctgtctgccgaaattgagcagatgagagctagcatcggcactgctgaggtgaggtgccgtgcagccaggaagatagaagaggcggcaagggcagcagaagctcttgcccttgctgaaatcaagatcctactacgcaatgaagcttcagttgaggatcttcagggcatggaagatgtgagcctttcattggaagagtactctgagcttgctgccaaagctcaggaggctgatgaacgctcaagaaagaaaatcgatgctgcaatggtgcaggtagatgaagctaacaggacagaatctgactccctcagaaagctggaggaagctcgattacaggttgaggaatgtaagaaggcgctacaggatgcccagaagagggtggatgctgctaaccgagggaagagcgcagtagaagaggctcttcgcagatgtcgatccacgactggacacaggaggaggtcggtccatgaccctcccaggttcaaacatccagctccccgttccagagattctcagaatatggatatcgtcggtgtttcaaagggtcccttgaaaccaacgttgtcaatagggcagatactgagtatgaagctaatgggaccagatgggtatgacaaaagcgtctgggacgacgcaagcgaagcttctactatgtcgctcggacatatcctgaaccgcaggcatgcagtcgtgtatagcagcgatgcaactgctcagaagaaattcccagggaagaggaagaagtttgcctttacaggactctctattttcttggcgagacaggccaagaggaagaaggaaaagggatcgcattagaaactgctgaagccaacttgggctgggaaaagagaagcattgtagtctaccttgctagctgttaactcagaccctagtgttactgttcttgtaatttactagtatgtgtcgttgataggtgcctagatcattggtttttccatagcaggctagtaagttgtagctgatatttctgtctagtggttatttcaggtgctgtgtgaacttgcaatgtagcagtatgactagtagctgatatcaagtatatgaggcatatgtggttcactgagattggaatcttcttctctgct

SEQ ID NO: 38909 - protein, 396 aa, Zea mays subsp. mays
  peptide (1)..(396): Ceres Seq. ID no. 12417589
  misc_feature (1)..(248): Pfam Name: DUF827 Pfam Description: Plant protein of unknown function
  misc_feature (1)..(393): NCBI GI NO: 33146426 NR Description: myosin heavy chain-like
  misc_feature (1)..(373): NCBI GI NO: 15224495 NR Description: hypothetical protein; protein id: At2g38370.1
  misc_feature (5)..(279): NCBI GI NO: 15225334 NR Description: unknown protein; protein id: At2g26570.1
  misc_feature (1)..(279): NCBI GI NO: 15234171 NR Description: putative protein; protein id: At4g33390.1
  misc_feature (1)..(300): NCBI GI NO: 15239100 NR Description: putative protein; protein id: At5g42880.1
  misc_feature (15)..(323): NCBI GI NO: 14029007 NR Description: Putative myosin heavy chain-like [Oryza sativa]
  misc_feature (1)..(325): NCBI GI NO: 34906758 NR Description: putative paramyosin
  misc_feature (1)..(276): NCBI GI NO: 15220079 NR Description: hypothetical protein; protein id: At1g45545.1
  misc_feature (1)..(61): NCBI GI NO: 4433618 NR Description: putative myosin heavy chain
  misc_feature (20)..(270): NCBI GI NO: 15241071 NR Description: myosin heavy chain-like; protein id: At5g55860.1
MGALHVQLHQSPGTSVLKGLEQAKANLNRTTSDLAAIRASVESLRNDIAKERILVERSREKVCANTTLIASLEDELNRTAQKLQTLRDLQRRRDDQSDIFIEIKKMTSELEQLRNAASAAKSEAAMLSAEIEQMRASIGTAEVRCRAARKIEEAARAAEALALAEIKILLRNEASVEDLQGMEDVSLSLEEYSELAAKAQEADERSRKKIDAAMVQVDEANRTESDSLRKLEEARLQVEECKKALQDAQKRVDAANRGKSAVEEALRRCRSTTGHRRRSVHDPPRFKHPAPRSRDSQNMDIVGVSKGPLKPTLSIGQILSMKLMGPDGYDKSVWDDASEASTMSLGHILNRRHAVVYSSDATAQKKFPGKRKKFAFTGLSIFLARQAKRKKEKGSH

SEQ ID NO: 38910 - protein, 291 aa, Zea mays subsp. mays
  peptide (1)..(291): Ceres Seq. ID no. 12417590
  misc_feature (1)..(143): Pfam Name: DUF827 Pfam Description: Plant protein of unknown function
  misc_feature (1)..(288): NCBI GI NO: 33146426 NR Description: myosin heavy chain-like
  misc_feature (1)..(268): NCBI GI NO: 15224495 NR Description: hypothetical protein; protein id: At2g38370.1
  misc_feature (1)..(174): NCBI GI NO: 15225334 NR Description: unknown protein; protein id: At2g26570.1
  misc_feature (1)..(174): NCBI GI NO: 15234171 NR Description: putative protein; protein id: At4g33390.1
  misc_feature (1)..(195): NCBI GI NO: 15239100 NR Description: putative protein; protein id: At5g42880.1
  misc_feature (1)..(218): NCBI GI NO: 14029007 NR Description: Putative myosin heavy chain-like [Oryza sativa]
  misc_feature (1)..(220): NCBI GI NO: 34906758 NR Description: putative paramyosin
  misc_feature (1)..(171): NCBI GI NO: 15220079 NR Description: hypothetical protein; protein id: At1g45545.1
  misc_feature (1)..(165): NCBI GI NO: 15241071 NR Description: myosin heavy chain-like; protein id: At5g55860.1
  misc_feature (1)..(288): NCBI GI NO: 15230567 NR Description: putative protein; protein id: At3g51720
MTSELEQLRNAASAAKSEAAMLSAEIEQMRASIGTAEVRCRAARKIEEAARAAEALALAEIKILLRNEASVEDLQGMEDVSLSLEEYSELAAKAQEADERSRKKIDAAMVQVDEANRTESDSLRKLEEARLQVEECKKALQDAQKRVDAANRGKSAVEEALRRCRSTTGHRRRSVHDPPRFKHPAPRSRDSQNMDIVGVSKGPLKPTLSIGQILSMKLMGPDGYDKSVWDDASEASTMSLGHILNRRHAVVYSSDATAQKKFPGKRKKFAFTGLSIFLARQAKRKKEKGSH

SEQ ID NO: 38911 - protein, 271 aa, Zea mays subsp. mays
  peptide (1)..(271): Ceres Seq. ID no. 12417591
  misc_feature (1)..(123): Pfam Name: DUF827 Pfam Description: Plant protein of unknown function
  misc_feature (1)..(268): NCBI GI NO: 33146426 NR Description: myosin heavy chain-like
  misc_feature (1)..(248): NCBI GI NO: 15224495 NR Description: hypothetical protein; protein id: At2g38370.1
  misc_feature (1)..(154): NCBI GI NO: 15225334 NR Description: unknown protein; protein id: At2g26570.1
  misc_feature (1)..(154): NCBI GI NO: 15234171 NR Description: putative protein; protein id: At4g33390.1
  misc_feature (1)..(175): NCBI GI NO: 15239100 NR Description: putative protein; protein id: At5g42880.1
  misc_feature (1)..(198): NCBI GI NO: 14029007 NR Description: Putative myosin heavy chain-like [Oryza sativa]
  misc_feature (1)..(200): NCBI GI NO: 34906758 NR Description: putative paramyosin
  misc_feature (1)..(151): NCBI GI NO: 15220079 NR Description: hypothetical protein; protein id: At1g45545.1
  misc_feature (1)..(145): NCBI GI NO: 15241071 NR Description: myosin heavy chain-like; protein id: At5g55860.1
  misc_feature (1)..(268): NCBI GI NO: 15230567 NR Description: putative protein; protein id: At3g51720
MLSAEIEQMRASIGTAEVRCRAARKIEEAARAAEALALAEIKILLRNEASVEDLQGMEDVSLSLEEYSELAAKAQEADERSRKKIDAAMVQVDEANRTESDSLRKLEEARLQVEECKKALQDAQKRVDAANRGKSAVEEALRRCRSTTGHRRRSVHDPPRFKHPAPRSRDSQNMDIVGVSKGPLKPTLSIGQILSMKLMGPDGYDKSVWDDASEASTMSLGHILNRRHAVVYSSDATAQKKFPGKRKKFAFTGLSIFLARQAKRKKEKGSH

SEQ ID NO: 38912 - DNA, 1069 bp, Zea mays subsp. mays
  misc_feature (1)..(1069): Ceres Seq. ID no. 12417357
gcacgagaccattacctagaacatcctaatcgaaaaaatcatcactgccatctctctctgactctgtgtccgtctctaaactctagtctgtgcgaatcctgctgccagcagcgaggaacagaacagtagccaatttgccatctcacagttgcgttcctccgattccccgtcccccgatggacctgtctcccagctcgtcggcgccatccgcgccgccggtgccgtgcgagtggtccggcgccgggctcggctccgcggcgtgcggcctcgcctgcagggtgctctgcgccgtcgccacctgcgtcttcgcggccgtggggtcgctggtcggggcggtgacggggtccatggtggggctggcgaccgagagcgggatgctgcgcggcgccggcatcggggccatctccggcgccgtcttctccatcgaggtcgccgagtcgtcccgcgacctctggcactcgggcgactccggcgtctggaccctcctctacatggtggacatcatctccagtctcttgagcggcaggctggtccgggagaaggtggggccggctgttcagagcgccgtgcagagccagatcagcgccatcagctcgccgttcgaggagacgagcgacctgttcgagaccggcagcgtgaggggcctccccgaggccgcggtgcgccggctgccggtgacggtggtcgcggaggacggcgccgtggacgcggcgggccaggcgctgtgctgctcggtgtgcctgcaggacttccgggtgggcgaccgcgcgcggaggctgcccggttgccgccacctgttccacgtgccctgcatcgactgctggctcctcaggcacggctcctgcccgctgtgccggcgagacatctgaaactcggtcgtctgctctgtgaaccgccacccacgtcgccggaaacgtggtgtagtgttgctgctttggacgagatggtcagttagttgagtagggttcctactttttaggacggcaccctgatgcccgtaagggaaatggtgcgctctgacgctctgttaactaaaaaagaagaagagagaaaacagcccctcagcttc

SEQ ID NO: 38913 - protein, 230 aa, Zea mays subsp. mays
  peptide (1)..(230): Ceres Seq. ID no. 12417358
  misc_feature (185)..(226): Pfam Name: RING finger Pfam Description: Zinc finger, C3HC4 type
  misc_feature (1)..(230): NCBI GI NO: 37536572 NR Description: hypothetical protein
  misc_feature (35)..(230): NCBI GI NO: 26452210 NR Description: unknown protein [Arabidopsis thaliana]
  misc_feature (35)..(230): NCBI GI NO: 30680091 NR Description: expressed protein [Arabidopsis thaliana]
  misc_feature (35)..(230): NCBI GI NO: 26451101 NR Description: unknown protein [Arabidopsis thaliana]
  misc_feature (1)..(230): NCBI GI NO: 33146606 NR Description: putative NEP1-interacting protein 2
  misc_feature (3)..(230): NCBI GI NO: 18855037 NR Description: putative zinc finger protein [Oryza sativa]
  misc_feature (35)..(230): NCBI GI NO: 27524902 NR Description: NEP1-interacting protein [Arabidopsis thaliana]
  misc_feature (27)..(230): NCBI GI NO: 15239242 NR Description: putative protein; protein id: At5g66070.1
  misc_feature (35)..(225): NCBI GI NO: 25411815 NR Description: hypothetical protein At2g17730
  misc_feature (39)..(225): NCBI GI NO: 7485279 NR Description: hypothetical protein A_TM017A05
MDLSPSSSAPSAPPVPCEWSGAGLGSAACGLACRVLCAVATCVFAAVGSLVGAVTGSMVGLATESGMLRGAGIGAISGAVFSIEVAESSRDLWHSGDSGVWTLLYMVDIISSLLSGRLVREKVGPAVQSAVQSQISAISSPFEETSDLFETGSVRGLPEAAVRRLPVTVVAEDGAVDAAGQALCCSVCLQDFRVGDRARRLPGCRHLFHVPCIDCWLLRHGSCPLCRRDI

SEQ ID NO: 38914 - protein, 173 aa, Zea mays subsp. mays
  peptide (1)..(173): Ceres Seq. ID no. 12417359
  misc_feature (128)..(169): Pfam Name: RING finger Pfam Description: Zinc finger, C3HC4 type
  misc_feature (1)..(173): NCBI GI NO: 37536572 NR Description: hypothetical protein
  misc_feature (1)..(173): NCBI GI NO: 26452210 NR Description: unknown protein [Arabidopsis thaliana]
  misc_feature (1)..(173): NCBI GI NO: 30680091 NR Description: expressed protein [Arabidopsis thaliana]
  misc_feature (1)..(173): NCBI GI NO: 26451101 NR Description: unknown protein [Arabidopsis thaliana]
  misc_feature (1)..(173): NCBI GI NO: 33146606 NR Description: putative NEP1-interacting protein 2
  misc_feature (1)..(173): NCBI GI NO: 18855037 NR Description: putative zinc finger protein [Oryza sativa]
  misc_feature (1)..(173): NCBI GI NO: 27524902 NR Description: NEP1-interacting protein [Arabidopsis thaliana]
  misc_feature (1)..(173): NCBI GI NO: 15239242 NR Description: putative protein; protein id: At5g66070.1
  misc_feature (1)..(168): NCBI GI NO: 25411815 NR Description: hypothetical protein At2g17730
  misc_feature (1)..(168): NCBI GI NO: 7485279 NR Description: hypothetical protein A_TM017A05
MVGLATESGMLRGAGIGAISGAVFSIEVAESSRDLWHSGDSGVWTLLYMVDIISSLLSGRLVREKVGPAVQSAVQSQISAISSPFEETSDLFETGSVRGLPEAAVRRLPVTVVAEDGAVDAAGQALCCSVCLQDFRVGDRARRLPGCRHLFHVPCIDCWLLRHGSCPLCRRDI

SEQ ID NO: 38915 - protein, 164 aa, Zea mays subsp. mays
  peptide (1)..(164): Ceres Seq. ID no. 12417360
  misc_feature (119)..(160): Pfam Name: RING finger Pfam Description: Zinc finger, C3HC4 type
  misc_feature (1)..(164): NCBI GI NO: 37536572 NR Description: hypothetical protein
  misc_feature (1)..(164): NCBI GI NO: 26452210 NR Description: unknown protein [Arabidopsis thaliana]
  misc_feature (1)..(164): NCBI GI NO: 30680091 NR Description: expressed protein [Arabidopsis thaliana]
  misc_feature (1)..(164): NCBI GI NO: 26451101 NR Description: unknown protein [Arabidopsis thaliana]
  misc_feature (1)..(164): NCBI GI NO: 33146606 NR Description: putative NEP1-interacting protein 2
  misc_feature (1)..(164): NCBI GI NO: 18855037 NR Description: putative zinc finger protein [Oryza sativa]
  misc_feature (1)..(164): NCBI GI NO: 27524902 NR Description: NEP1-interacting protein [Arabidopsis thaliana]
  misc_feature (1)..(164): NCBI GI NO: 15239242 NR Description: putative protein; protein id: At5g66070.1
  misc_feature (1)..(159): NCBI GI NO: 25411815 NR Description: hypothetical protein At2g17730
  misc_feature (1)..(159): NCBI GI NO: 7485279 NR Description: hypothetical protein A_TM017A05
MLRGAGIGAISGAVFSIEVAESSRDLWHSGDSGVWTLLYMVDIISSLLSGRLVREKVGPAVQSAVQSQISAISSPFEETSDLFETGSVRGLPEAAVRRLPVTVVAEDGAVDAAGQALCCSVCLQDFRVGDRARRLPGCRHLFHVPCIDCWLLRHGSCPLCRRDI

SEQ ID NO: 38916 - DNA, 1012 bp, Zea mays subsp. mays
  misc_feature (1)..(1012): Ceres Seq. ID no. 12417137
atcttcgcccccgtctcgggcgcccattctcctcctcgacgccgcctccgtctcgcgccattgcacgtcgtcgacgactccaagaacccccccgaggagaggtctgagacggataagatggtcgacggcatggacttcggggagctctgcagcgacttcgagtgcataagcagcccctacgtggagtcgacggcgaggcaggtcgcgcgggacatcctggagctccgcgaggacaaccgcgcattcaactgctacgcggtctccgtcaagtacaaggacccactcaggacatttgttgggcgtgagaagtacaggaggccgttgtggatcaccaaggcgttggaaaaccctgtagtgacagtccaggaaatgtcaatgcagtcgacgagcaacctgaccatcagatgggcgttgagagggaagcctaagaacccgttgttcgcgagcgtcggaggagacgtcatcgtccgcgtcgagtcacggttcgtcctgaaccagataagcgggcaggtgctggagcaggccgagtcctgggacctctccgcctcgtccctccctgcccaggcctacttctggctgtcccgaagggtctactccgccgtggagtccgggaaggacgcgatcgaagccgccaagagcgcggcgtcgtctgggctgacgaccaagggagaccagaatctcgaggcctatccggatccttctgctgatcctacaaagttctttcagaggccggatgatgggttcagccaagacgtgtaccagatcggccttctcctggccgtgatctacttcattgtacagtttctgaaggcgaccctgtgaccggctgcagcctgtcgaagaatgtagcctgtgtgcagtatacatgtatgtaactatgcctagcaacattataaaatacgggcatatatcatcctgccatctgacctgcgacagatttgtgacctttcaccactgctgtcggtgatattagtttggcacgcaagttgccaatttacaggtgttaaacttg

SEQ ID NO: 38917 - protein, 273 aa, Zea mays subsp. mays
  peptide (1)..(273): Ceres Seq. ID no. 12417138
  misc_feature (3)..(273): NCBI GI NO: 34906888 NR Description: P0470A12.24
  misc_feature (33)..(273): NCBI GI NO: 22330431 NR Description: unknown protein; protein id: At1g65230
  misc_feature (33)..(239): NCBI GI NO: 25404541 NR Description: hypothetical protein T23K8.14
IFAPVSGAHSPPRRRLRLAPLHVVDDSKNPPEERSETDKMVDGMDFGELCSDFECISSPYVESTARQVARDILELREDNRAFNCYAVSVKYKDPLRTFVGREKYRRPLWITKALENPVVTVQEMSMQSTSNLTIRWALRGKPKNPLFASVGGDVIVRVESRFVLNQISGQVLEQAESWDLSASSLPAQAYFWLSRRVYSAVESGKDAIEAAKSAASSGLTTKGDQNLEAYPDPSADPTKFFQRPDDGFSQDVYQIGLLLAVIYFIVQFLKATL

SEQ ID NO: 38918 - protein, 234 aa, Zea mays subsp. mays
  peptide (1)..(234): Ceres Seq. ID no. 12417139
  misc_feature (1)..(234): NCBI GI NO: 34906888 NR Description: P0470A12.24
  misc_feature (1)..(234): NCBI GI NO: 22330431 NR Description: unknown protein; protein id: At1g65230
  misc_feature (1)..(200): NCBI GI NO: 25404541 NR Description: hypothetical protein T23K8.14
MVDGMDFGELCSDFECISSPYVESTARQVARDILELREDNRAFNCYAVSVKYKDPLRTFVGREKYRRPLWITKALENPVVTVQEMSMQSTSNLTIRWALRGKPKNPLFASVGGDVIVRVESRFVLNQISGQVLEQAESWDLSASSLPAQAYFWLSRRVYSAVESGKDAIEAAKSAASSGLTTKGDQNLEAYPDPSADPTKFFQRPDDGFSQDVYQIGLLLAVIYFIVQFLKATL

SEQ ID NO: 38919 - protein, 230 aa, Zea mays subsp. mays
  peptide (1)..(230): Ceres Seq. ID no. 12417140
  misc_feature (1)..(230): NCBI GI NO: 34906888 NR Description: P0470A12.24
  misc_feature (1)..(230): NCBI GI NO: 22330431 NR Description: unknown protein; protein id: At1g65230
  misc_feature (1)..(196): NCBI GI NO: 25404541 NR Description: hypothetical protein T23K8.14
MDFGELCSDFECISSPYVESTARQVARDILELREDNRAFNCYAVSVKYKDPLRTFVGREKYRRPLWITKALENPVVTVQEMSMQSTSNLTIRWALRGKPKNPLFASVGGDVIVRVESRFVLNQISGQVLEQAESWDLSASSLPAQAYFWLSRRVYSAVESGKDAIEAAKSAASSGLTTKGDQNLEAYPDPSADPTKFFQRPDDGFSQDVYQIGLLLAVIYFIVQFLKATL

SEQ ID NO: 38920 - DNA, 1919 bp, Zea mays subsp. mays; identical to SEQ ID NO: 26011
  misc_feature (1)..(1919): Ceres Seq. ID no. 12406508

SEQ ID NO: 38921 - protein, 460 aa, Zea mays subsp. mays; identical to SEQ ID NO: 26012
  peptide (1)..(460): Ceres Seq. ID no. 12406509
  misc_feature (18)..(442): NCBI GI NO: 34895168 NR Description: putative cytochrome P450
  misc_feature (33)..(442): NCBI GI NO: 34913354 NR Description: putative cytochrome P450
  misc_feature (20)..(442): NCBI GI NO: 38112707 NR Description: cytochrome P450 [Triticum aestivum]
  misc_feature (20)..(442): NCBI GI NO: 22324446 NR Description: putative cytochrome P450
  misc_feature (29)..(442): NCBI GI NO: 34913346 NR Description: putative cytochrome P450
  misc_feature (23)..(442): NCBI GI NO: 34913362 NR Description: putative cytochrome P450
  misc_feature (20)..(434): NCBI GI NO: 34896952 NR Description: putative cytochrome P450-related protein
  misc_feature (21)..(442): NCBI GI NO: 14719280 NR Description: cytochrome P450 [Zea mays]
  misc_feature (19)..(434): NCBI GI NO: 15226472 NR Description: cytochrome p450, putative; protein id: At2g46950.1
  misc_feature (20)..(434): NCBI GI NO: 15234248 NR Description: cytochrome P450 - like protein

SEQ ID NO: 38922 - protein, 371 aa, Zea mays subsp. mays; identical to SEQ ID NO: 26013
  peptide (1)..(371): Ceres Seq. ID no. 12406510
  misc_feature (1)..(353): NCBI GI NO: 34895168 NR Description: putative cytochrome P450
  misc_feature (1)..(353): NCBI GI NO: 34913354 NR Description: putative cytochrome P450
  misc_feature (1)..(353): NCBI GI NO: 38112707 NR Description: cytochrome P450 [Triticum aestivum]
  misc_feature (1)..(353): NCBI GI NO: 22324446 NR Description: putative cytochrome P450
  misc_feature (1)..(353): NCBI GI NO: 34913346 NR Description: putative cytochrome P450
  misc_feature (1)..(353): NCBI GI NO: 34913362 NR Description: putative cytochrome P450
  misc_feature (1)..(345): NCBI GI NO: 34896952 NR Description: putative cytochrome P450-related protein
  misc_feature (1)..(353): NCBI GI NO: 14719280 NR Description: cytochrome P450 [Zea mays]
  misc_feature (1)..(345): NCBI GI NO: 15226472 NR Description: cytochrome p450, putative; protein id: At2g46950.1
  misc_feature (1)..(345): NCBI GI NO: 15234248 NR Description: cytochrome P450 - like protein

SEQ ID NO: 38923 - protein, 319 aa, Zea mays subsp. mays; identical to SEQ ID NO: 26014
  peptide (1)..(319): Ceres Seq. ID no. 12406511
  misc_feature (1)..(301): NCBI GI NO: 34895168 NR Description: putative cytochrome P450
  misc_feature (1)..(301): NCBI GI NO: 34913354 NR Description: putative cytochrome P450
  misc_feature (1)..(301): NCBI GI NO: 38112707 NR Description: cytochrome P450 [Triticum aestivum]
  misc_feature (1)..(301): NCBI GI NO: 22324446 NR Description: putative cytochrome P450
  misc_feature (1)..(301): NCBI GI NO: 34913346 NR Description: putative cytochrome P450
  misc_feature (1)..(301): NCBI GI NO: 34913362 NR Description: putative cytochrome P450
  misc_feature (1)..(293): NCBI GI NO: 34896952 NR Description: putative cytochrome P450-related protein
  misc_feature (1)..(301): NCBI GI NO: 14719280 NR Description: cytochrome P450 [Zea mays]
  misc_feature (1)..(293): NCBI GI NO: 15226472 NR Description: cytochrome p450, putative; protein id: At2g46950.1
  misc_feature (1)..(293): NCBI GI NO: 15234248 NR Description: cytochrome P450 - like protein

SEQ ID NO: 38924 - DNA, 477 bp, Zea mays subsp. mays
  misc_feature (1)..(477): Ceres Seq. ID no. 1671513
agagcagaagcaaagcgagcaacagagcaaagctaagcacagagctagcaagtgaccgaccgagagcaaacaggcaaggcaagatggtgcaacagcaagccgcgaaggaggtgatcccgctgctgacgccttacaagatggggcagttcgagctctctcaccgggtggtgctggcgccgctgacgaggtgccgctcctacggcaacgtgccgcagccacacgccgccgtgtactactcgcagcgcgccaccaggggtggcctgctcatcgcggaggccacgggggtgtcggccaccgcgcaggggttcccggagtctcctggcatctggacgcaggagcaggtcgaggcgtggaagcccatcgtcgacgccgtccaccgcaagggcgccatcttcgtctgccagatctggcatgtgggcagggtctccaccaacgagctccagcccaacggcgacgcgccctatctcgagcacggac

SEQ ID NO: 38925 - protein, 158 aa, Zea mays subsp. mays
  peptide (1)..(158): Ceres Seq. ID no. 1671514
  misc_feature (39)..(153): Pfam Name: Pfam Description:  NADH:flavin oxidoreductase / NADH oxidase family
  misc_feature (33)..(153): NCBI GI NO: 23495288 NR Description: 12-oxophytodienoic acid reductase [Oryza sativa]
  misc_feature (34)..(153): NCBI GI NO: 15223138 NR Description: 12-oxophytodienoate reductase
  misc_feature (34)..(153): NCBI GI NO: 21593388 NR Description: 12-oxophytodienoate reductase (OPR1)
  misc_feature (38)..(153): NCBI GI NO: 40645345 NR Description: hypothetical protein [Pisum sativum]
  misc_feature (36)..(153): NCBI GI NO: 7449902 NR Description: probable 12-oxophytodienoate reductase (EC1
  misc_feature (38)..(153): NCBI GI NO: 40645351 NR Description: hypothetical protein [Pisum sativum]
  misc_feature (27)..(153): NCBI GI NO: 40645349 NR Description: hypothetical protein [Pisum sativum]
  misc_feature (38)..(153): NCBI GI NO: 40645353 NR Description: hypothetical protein [Pisum sativum]
  misc_feature (38)..(154): NCBI GI NO: 40645459 NR Description: LEDI-5c protein [Lithospermum erythrorhizon]
  misc_feature (27)..(153): NCBI GI NO: 15223140 NR Description: 12-oxophytodienoate reductase
SRSKASNRAKLSTELASDRPRANRQGKMVQQQAAKEVIPLLTPYKMGQFELSHRVVLAPLTRCRSYGNVPQPHAAVYYSQRATRGGLLIAEATGVSATAQGFPESPGIWTQEQVEAWKPIVDAVHRKGAIFVCQIWHVGRVSTNELQPNGDAPYLEHG

SEQ ID NO: 38926 - protein, 131 aa, Zea mays subsp. mays
  peptide (1)..(131): Ceres Seq. ID no. 1671515
  misc_feature (12)..(126): Pfam Name: Pfam Description:  NADH:flavin oxidoreductase / NADH oxidase family
  misc_feature (6)..(126): NCBI GI NO: 23495288 NR Description: 12-oxophytodienoic acid reductase [Oryza sativa]
  misc_feature (7)..(126): NCBI GI NO: 15223138 NR Description: 12-oxophytodienoate reductase
  misc_feature (7)..(126): NCBI GI NO: 21593388 NR Description: 12-oxophytodienoate reductase (OPR1)
  misc_feature (11)..(126): NCBI GI NO: 40645345 NR Description: hypothetical protein [Pisum sativum]
  misc_feature (9)..(126): NCBI GI NO: 7449902 NR Description: probable 12-oxophytodienoate reductase (EC1
  misc_feature (11)..(126): NCBI GI NO: 40645351 NR Description: hypothetical protein [Pisum sativum]
  misc_feature (1)..(126): NCBI GI NO: 40645349 NR Description: hypothetical protein [Pisum sativum]
  misc_feature (11)..(126): NCBI GI NO: 40645353 NR Description: hypothetical protein [Pisum sativum]
  misc_feature (11)..(127): NCBI GI NO: 40645459 NR Description: LEDI-5c protein [Lithospermum erythrorhizon]
  misc_feature (1)..(126): NCBI GI NO: 15223140 NR Description: 12-oxophytodienoate reductase
MVQQQAAKEVIPLLTPYKMGQFELSHRVVLAPLTRCRSYGNVPQPHAAVYYSQRATRGGLLIAEATGVSATAQGFPESPGIWTQEQVEAWKPIVDAVHRKGAIFVCQIWHVGRVSTNELQPNGDAPYLEHG

SEQ ID NO: 38927 - protein, 113 aa, Zea mays subsp. mays
  peptide (1)..(113): Ceres Seq. ID no. 1671516
  misc_feature (1)..(108): Pfam Name: Pfam Description:  NADH:flavin oxidoreductase / NADH oxidase family
  misc_feature (1)..(108): NCBI GI NO: 23495288 NR Description: 12-oxophytodienoic acid reductase [Oryza sativa]
  misc_feature (1)..(108): NCBI GI NO: 15223138 NR Description: 12-oxophytodienoate reductase
  misc_feature (1)..(108): NCBI GI NO: 21593388 NR Description: 12-oxophytodienoate reductase (OPR1)
  misc_feature (1)..(108): NCBI GI NO: 40645345 NR Description: hypothetical protein [Pisum sativum]
  misc_feature (1)..(108): NCBI GI NO: 7449902 NR Description: probable 12-oxophytodienoate reductase (EC1
  misc_feature (1)..(108): NCBI GI NO: 40645351 NR Description: hypothetical protein [Pisum sativum]
  misc_feature (1)..(108): NCBI GI NO: 40645349 NR Description: hypothetical protein [Pisum sativum]
  misc_feature (1)..(108): NCBI GI NO: 40645353 NR Description: hypothetical protein [Pisum sativum]
  misc_feature (1)..(109): NCBI GI NO: 40645459 NR Description: LEDI-5c protein [Lithospermum erythrorhizon]
  misc_feature (1)..(108): NCBI GI NO: 15223140 NR Description: 12-oxophytodienoate reductase
MGQFELSHRVVLAPLTRCRSYGNVPQPHAAVYYSQRATRGGLLIAEATGVSATAQGFPESPGIWTQEQVEAWKPIVDAVHRKGAIFVCQIWHVGRVSTNELQPNGDAPYLEHG

SEQ ID NO: 38928 - DNA, 830 bp, Zea mays subsp. mays
  misc_feature (1)..(830): Ceres Seq. ID no. 12417611
accgatcccattccccaggcccaagcgcccatggatcccaagcccgacgccagcgcgcccgccgcggtgccagcggagcacgcggcgtacccgaggctgtcaccggaggacatcgccccgccgccgccgcctgtcgtgccgccgtccggcgccaacccctacgtgctctccgccccgtcgcctaacccgcccgccaagagcgctagggagaatctgagggagatgttcggcatggtggggaagaagttcaacgaggccgcgcgcaagaccgagggcatcgccggcgacgtctggcagcatctgaaaactggacccagcatcactgatactgccatggggaggattgctcagatatccaaggttatatctgagggtgtctacgacaagatatttcagcagacttttgagtgctcgcctgatgagaagctcaacaaggcatatgtgtgctacctatcaacgtcgcatggaccaatcatgggcgtcctgtatctctcgactgtcaagattgcattcggtagcgacagccctgtgaaatatgtgactgaggacaacaaaactgagtcatccttttataaggttgttttaccccttcatcacctgagatcagttactcccacagcaagtcagcaaaaccctgcagagaggtacattcaggtcgtttcagtcgacaaccacgagttctggttcatgggtttcgtgaactatgatagcgctgtaaagaatcttcaggagtctgttcgagttgttcacggggcctagaggttgcccatcacttttcctctatgtggatgtagtatgcccgtgtaaatgtatttgtgcatggcacctgt

SEQ ID NO: 38929 - protein, 252 aa, Zea mays subsp. mays
  peptide (1)..(252): Ceres Seq. ID no. 12417612
  misc_feature (31)..(170): Pfam Name: pollen allergen Pfam Description: Ribonuclease
  misc_feature (3)..(247): NCBI GI NO: 34906818 NR Description: contains EST C91668
  misc_feature (13)..(247): NCBI GI NO: 34902414 NR Description: Putative FH protein interacting protein FIP1
  misc_feature (16)..(251): NCBI GI NO: 15217869 NR Description: FH protein interacting protein FIP1
  misc_feature (49)..(247): NCBI GI NO: 18399985 NR Description: Expressed protein; protein id: At2g22475
  misc_feature (49)..(247): NCBI GI NO: 21592789 NR Description: unknown [Arabidopsis thaliana]
  misc_feature (49)..(247): NCBI GI NO: 26452129 NR Description: unknown protein [Arabidopsis thaliana]
  misc_feature (112)..(247): NCBI GI NO: 33146631 NR Description: putative FH protein interacting protein FIP1
  misc_feature (17)..(247): NCBI GI NO: 29788871 NR Description: putative ABA-responsive protein
  misc_feature (31)..(164): NCBI GI NO: 15236123 NR Description: putative protein; protein id: At4g40100.1
  misc_feature (193)..(247): NCBI GI NO: 15236123 NR Description: putative protein; protein id: At4g40100.1
TDPIPQAQAPMDPKPDASAPAAVPAEHAAYPRLSPEDIAPPPPPVVPPSGANPYVLSAPSPNPPAKSARENLREMFGMVGKKFNEAARKTEGIAGDVWQHLKTGPSITDTAMGRIAQISKVISEGVYDKIFQQTFECSPDEKLNKAYVCYLSTSHGPIMGVLYLSTVKIAFGSDSPVKYVTEDNKTESSFYKVVLPLHHLRSVTPTASQQNPAERYIQVVSVDNHEFWFMGFVNYDSAVKNLQESVRVVHGA

SEQ ID NO: 38930 - protein, 242 aa, Zea mays subsp. mays
  peptide (1)..(242): Ceres Seq. ID no. 12417613
  misc_feature (21)..(160): Pfam Name: pollen allergen Pfam Description: Ribonuclease
  misc_feature (1)..(237): NCBI GI NO: 34906818 NR Description: contains EST C91668
  misc_feature (3)..(237): NCBI GI NO: 34902414 NR Description: Putative FH protein interacting protein FIP1
  misc_feature (6)..(241): NCBI GI NO: 15217869 NR Description: FH protein interacting protein FIP1
  misc_feature (39)..(237): NCBI GI NO: 18399985 NR Description: Expressed protein; protein id: At2g22475
  misc_feature (39)..(237): NCBI GI NO: 21592789 NR Description: unknown [Arabidopsis thaliana]
  misc_feature (39)..(237): NCBI GI NO: 26452129 NR Description: unknown protein [Arabidopsis thaliana]
  misc_feature (102)..(237): NCBI GI NO: 33146631 NR Description: putative FH protein interacting protein FIP1
  misc_feature (7)..(237): NCBI GI NO: 29788871 NR Description: putative ABA-responsive protein
  misc_feature (21)..(154): NCBI GI NO: 15236123 NR Description: putative protein; protein id: At4g40100.1
  misc_feature (183)..(237): NCBI GI NO: 15236123 NR Description: putative protein; protein id: At4g40100.1
MDPKPDASAPAAVPAEHAAYPRLSPEDIAPPPPPVVPPSGANPYVLSAPSPNPPAKSARENLREMFGMVGKKFNEAARKTEGIAGDVWQHLKTGPSITDTAMGRIAQISKVISEGVYDKIFQQTFECSPDEKLNKAYVCYLSTSHGPIMGVLYLSTVKIAFGSDSPVKYVTEDNKTESSFYKVVLPLHHLRSVTPTASQQNPAERYIQVVSVDNHEFWFMGFVNYDSAVKNLQESVRVVHGA

SEQ ID NO: 38931 - protein, 178 aa, Zea mays subsp. mays
  peptide (1)..(178): Ceres Seq. ID no. 12417614
  misc_feature (1)..(96): Pfam Name: pollen allergen Pfam Description: Ribonuclease
  misc_feature (1)..(173): NCBI GI NO: 34906818 NR Description: contains EST C91668
  misc_feature (1)..(173): NCBI GI NO: 34902414 NR Description: Putative FH protein interacting protein FIP1
  misc_feature (1)..(177): NCBI GI NO: 15217869 NR Description: FH protein interacting protein FIP1
  misc_feature (1)..(173): NCBI GI NO: 18399985 NR Description: Expressed protein; protein id: At2g22475
  misc_feature (1)..(173): NCBI GI NO: 21592789 NR Description: unknown [Arabidopsis thaliana]
  misc_feature (1)..(173): NCBI GI NO: 26452129 NR Description: unknown protein [Arabidopsis thaliana]
  misc_feature (38)..(173): NCBI GI NO: 33146631 NR Description: putative FH protein interacting protein FIP1
  misc_feature (1)..(173): NCBI GI NO: 29788871 NR Description: putative ABA-responsive protein
  misc_feature (1)..(90): NCBI GI NO: 15236123 NR Description: putative protein; protein id: At4g40100.1
  misc_feature (119)..(173): NCBI GI NO: 15236123 NR Description: putative protein; protein id: At4g40100.1
MFGMVGKKFNEAARKTEGIAGDVWQHLKTGPSITDTAMGRIAQISKVISEGVYDKIFQQTFECSPDEKLNKAYVCYLSTSHGPIMGVLYLSTVKIAFGSDSPVKYVTEDNKTESSFYKVVLPLHHLRSVTPTASQQNPAERYIQVVSVDNHEFWFMGFVNYDSAVKNLQESVRVVHGA

SEQ ID NO: 38932 - DNA, 2036 bp, Zea mays subsp. mays
  misc_feature (1)..(2036): Ceres Seq. ID no. 12368221
gcacgagaccattacctagaacatcctaatcgaaaaaattatgatccttcttttcgtttgttcttatgccattgtttggccacaagcggtggggtatcgatctgaaatagttggacggcatccctgattccaccctgatcgatcccatggatgcccaagacgacgatgagaggccgctgatcatccatcgcctgccactactccaggatgaaagtacttccggattcactagcgacgggacggttgatcttcgcaatcagcctgcccggaagcagagaactgggaactggagagcatgcttcttcatcttaggtgccgagttcgctgaatgtgtggccttcttcgcgatctcaaagaacctggtgacgtacctcacgggcgttctgcacgagagcaacgttgacgccgcgacgactgtgtccacctggatcgggacctcgttcttcacggccgctcgtcggcgcgttcttggccgacacattctgggggcgatactggacgatactggccttcctctccgtgtacgtcacggggatgacggtcctgactgcttcagctcttctcccgctgctcatgggcgcgtcctacagccgtagcgcccaccgcctctccgcgtacctgggcctctacctcgccgctctcggcaccggcggaatcaagccgtgcgtctgcgcgctcggtgccgaccagttcgacgcgtctgaccccgtggagcggcgggccaagggctccttcttcaactggtactacttctccatcaacatcggctccctgctgtccgcgacggtggtcgtctgggtgcaggacaacgttgggtggggagtcgggttcgcgatcccgaccctgctcatgctgtcgggactcgtgctgttcgtcgccggtaggaaggtttacaggtaccagagagtgggagggagccctctgacaagagcctcgcaggtggtggttgctgctgtcaggaactaccgtttggtgctgcctgagcctgacgacagctcggcggccctgctgcatcaggcgcctcccggaaccacggaaggaaattattccacgatgcagcatacgagtcaattcaggttccttgacaaggctgccattgtagcggcatcctccggcgagaaaggagcgacggcaagcccatggcggctctgcacggtctcccaggtcgaggagctgaagacggtgctgcggatgttccccgtgtgggtgtcgatggtgctcttcttcgcggccaccgcgcagatgtcgtccaccttcatcgagcaaggcgagaccatagacaaccgcgtggggccgttcaccgtgccgccggcgtccctctccaccttcgacgtcatcagcgtcatggtctgcatacccatctacgacaaagcgctggtgccgctggcccggcgcgccacgggcaaggaacggggcctgtcgcagctgcagcggctgggcgtcggcctcgcgctgtccgtggccggcatggtgtacgcggcgctgctcgaggccaggcggctgtcgctcgcccgcgcagcggcgggcgggcggccgccgatgtccatcatgtggcaggcgccggcgttcgcggtgctcggcgcgggggaggtgttcgcgaccatcggcatcctcgagttcttctacgaccagtcgcccgacggcatgaagagcctcggcacggcccttgcgcagctcgccgtcgcggcaggcaactacttcaactctgccgtgctcgccgccgtcgccgccgtcaccacgcgcaacggggaggcaggatggatccccgacgacctggacaagggccacctcgactatttcttctggttcatggctgttctcggcgtggtgaacctgctgcacttcctgcattgctccgtcaggtacagaggcagcagcaacaacagcacatactcttcttgagtcttcacacgatctgtgccaagtatatgacaaaatgtcaacaaagagagatgtgcatcgaatttgttcacgaggcacagcaggatgcccgcattctccatttggcgtctccacaataataatgtgtccctgtg

SEQ ID NO: 38933 - protein, 455 aa, Zea mays subsp. mays
  peptide (1)..(455): Ceres Seq. ID no. 12368222
  misc_feature (1)..(383): Pfam Name: Pfam Description:  POT family
  misc_feature (1)..(455): NCBI GI NO: 37530498 NR Description: putative LeOPT1 - oligopeptide transporter
  misc_feature (1)..(429): NCBI GI NO: 37530496 NR Description: putative LeOPT1 - oligopeptide transporter
  misc_feature (1)..(445): NCBI GI NO: 15076661 NR Description: peptide transporter
  misc_feature (1)..(445): NCBI GI NO: 4102839 NR Description: LeOPT1 [Lycopersicon esculentum]
  misc_feature (1)..(451): NCBI GI NO: 15226861 NR Description: histidine transport protein
  misc_feature (1)..(451): NCBI GI NO: 1076331 NR Description: histidine transport protein - Arabidopsis thaliana
  misc_feature (1)..(455): NCBI GI NO: 15237369 NR Description: peptide transporter; protein id: At5g46040.1
  misc_feature (1)..(444): NCBI GI NO: 38567969 NR Description: OSJNBa0093F12.10
  misc_feature (1)..(450): NCBI GI NO: 15241147 NR Description: peptide transport protein-like
  misc_feature (1)..(445): NCBI GI NO: 34906908 NR Description: putative peptide transporter
MTVLTASALLPLLMGASYSRSAHRLSAYLGLYLAALGTGGIKPCVCALGADQFDASDPVERRAKGSFFNWYYFSINIGSLLSATVVVWVQDNVGWGVGFAIPTLLMLSGLVLFVAGRKVYRYQRVGGSPLTRASQVVVAAVRNYRLVLPEPDDSSAALLHQAPPGTTEGNYSTMQHTSQFRFLDKAAIVAASSGEKGATASPWRLCTVSQVEELKTVLRMFPVWVSMVLFFAATAQMSSTFIEQGETIDNRVGPFTVPPASLSTFDVISVMVCIPIYDKALVPLARRATGKERGLSQLQRLGVGLALSVAGMVYAALLEARRLSLARAAAGGRPPMSIMWQAPAFAVLGAGEVFATIGILEFFYDQSPDGMKSLGTALAQLAVAAGNYFNSAVLAAVAAVTTRNGEAGWIPDDLDKGHLDYFFWFMAVLGVVNLLHFLHCSVRYRGSSNNSTYSS

SEQ ID NO: 38934 - protein, 442 aa, Zea mays subsp. mays
  peptide (1)..(442): Ceres Seq. ID no. 12368223
  misc_feature (1)..(370): Pfam Name: Pfam Description:  POT family
  misc_feature (1)..(442): NCBI GI NO: 37530498 NR Description: putative LeOPT1 - oligopeptide transporter
  misc_feature (1)..(416): NCBI GI NO: 37530496 NR Description: putative LeOPT1 - oligopeptide transporter
  misc_feature (1)..(432): NCBI GI NO: 15076661 NR Description: peptide transporter
  misc_feature (1)..(432): NCBI GI NO: 4102839 NR Description: LeOPT1 [Lycopersicon esculentum]
  misc_feature (1)..(438): NCBI GI NO: 15226861 NR Description: histidine transport protein
  misc_feature (1)..(438): NCBI GI NO: 1076331 NR Description: histidine transport protein - Arabidopsis thaliana
  misc_feature (1)..(442): NCBI GI NO: 15237369 NR Description: peptide transporter; protein id: At5g46040.1
  misc_feature (1)..(431): NCBI GI NO: 38567969 NR Description: OSJNBa0093F12.10
  misc_feature (1)..(437): NCBI GI NO: 15241147 NR Description: peptide transport protein-like
  misc_feature (1)..(432): NCBI GI NO: 34906908 NR Description: putative peptide transporter
MGASYSRSAHRLSAYLGLYLAALGTGGIKPCVCALGADQFDASDPVERRAKGSFFNWYYFSINIGSLLSATVVVWVQDNVGWGVGFAIPTLLMLSGLVLFVAGRKVYRYQRVGGSPLTRASQVVVAAVRNYRLVLPEPDDSSAALLHQAPPGTTEGNYSTMQHTSQFRFLDKAAIVAASSGEKGATASPWRLCTVSQVEELKTVLRMFPVWVSMVLFFAATAQMSSTFIEQGETIDNRVGPFTVPPASLSTFDVISVMVCIPIYDKALVPLARRATGKERGLSQLQRLGVGLALSVAGMVYAALLEARRLSLARAAAGGRPPMSIMWQAPAFAVLGAGEVFATIGILEFFYDQSPDGMKSLGTALAQLAVAAGNYFNSAVLAAVAAVTTRNGEAGWIPDDLDKGHLDYFFWFMAVLGVVNLLHFLHCSVRYRGSSNNSTYSS

SEQ ID NO: 38935 - protein, 350 aa, Zea mays subsp. mays
  peptide (1)..(350): Ceres Seq. ID no. 12368224
  misc_feature (1)..(278): Pfam Name: Pfam Description:  POT family
  misc_feature (1)..(350): NCBI GI NO: 37530498 NR Description: putative LeOPT1 - oligopeptide transporter
  misc_feature (1)..(324): NCBI GI NO: 37530496 NR Description: putative LeOPT1 - oligopeptide transporter
  misc_feature (1)..(340): NCBI GI NO: 15076661 NR Description: peptide transporter
  misc_feature (1)..(340): NCBI GI NO: 4102839 NR Description: LeOPT1 [Lycopersicon esculentum]
  misc_feature (1)..(346): NCBI GI NO: 15226861 NR Description: histidine transport protein
  misc_feature (1)..(346): NCBI GI NO: 1076331 NR Description: histidine transport protein - Arabidopsis thaliana
  misc_feature (1)..(350): NCBI GI NO: 15237369 NR Description: peptide transporter; protein id: At5g46040.1
  misc_feature (1)..(339): NCBI GI NO: 38567969 NR Description: OSJNBa0093F12.10
  misc_feature (1)..(345): NCBI GI NO: 15241147 NR Description: peptide transport protein-like
  misc_feature (1)..(340): NCBI GI NO: 34906908 NR Description: putative peptide transporter
MLSGLVLFVAGRKVYRYQRVGGSPLTRASQVVVAAVRNYRLVLPEPDDSSAALLHQAPPGTTEGNYSTMQHTSQFRFLDKAAIVAASSGEKGATASPWRLCTVSQVEELKTVLRMFPVWVSMVLFFAATAQMSSTFIEQGETIDNRVGPFTVPPASLSTFDVISVMVCIPIYDKALVPLARRATGKERGLSQLQRLGVGLALSVAGMVYAALLEARRLSLARAAAGGRPPMSIMWQAPAFAVLGAGEVFATIGILEFFYDQSPDGMKSLGTALAQLAVAAGNYFNSAVLAAVAAVTTRNGEAGWIPDDLDKGHLDYFFWFMAVLGVVNLLHFLHCSVRYRGSSNNSTYSS

SEQ ID NO: 38936 - DNA, 1095 bp, Zea mays subsp. mays
  misc_feature (1)..(1095): Ceres Seq. ID no. 12350695
agatgcgctctgcatcttctcccctctggaacacactcccacacagaactagagctccaaggccatggagaaatggagaagacgcaggcacttgctgcttgctgttgcagccgtggccctggtggcagcaataacgctgccgtccgcggaggcgaagctgtccccggactactaccggtcgacgtgcccggacgtggaggcaatcgtgcaggcagtggtggccaagaaggtgaatgagaccttcgtcacagtcccggccacgctcaggctcttcttccacgactgcttcgtcgagggctgtgatgcgtcggtcatcatcgcgtcccgcgacaacgacgccgagaaggacgcgcccgacaacgtgtccctcgctggcgacggcttcgacaccgtggtgcgcgccaaggccgaggtcgagaagaagtgccccggcgtggtctcctgcgccgatatcctcgccatcgccgccagggacgtcgtcaccatgtcgtccggcccccactggaccgtccagcttggccggcttgacgggctcgtctccaaggccggcaacgtcgcgggcaagttgccgggacccaacatgcgcgtcaaggacctcgccgccctgttcgccaagcacaacctcaccacgctcgacatggtcgcgctctcgggagcgcacaccgtcgggttcgcgcactgcacccgcttcgcggaccgcctctaccaccacggcgtcggcgacagcgatggcgcgtcggtggacccgtcgtacaaccctgcgtacgcgcggcagctaatggacgcctgcccgcctggcgtcggcgcagacatcgccgtcaatatggacccaatcacaccgaccgccttcgataacgcctactacgccaacctcgccggcggcctgggattgttcatctcggaccaggcgctgtacagcgacggcgcgtcgcaaccggcggtgagggacttcgctaagaaccagacccgcttcttcgaggcgttcaaggacgccatggtcaagctgggcagtgttggggtgaagaccggccggcacggggagatcaggagtgactgcaccgcattcaactagtagatcgaccacccattcttttg

SEQ ID NO: 38937 - protein, 335 aa, Zea mays subsp. mays
  peptide (1)..(335): Ceres Seq. ID no. 12350696
  misc_feature (48)..(299): Pfam Name: Pfam Description:  Peroxidase
  misc_feature (8)..(335): NCBI GI NO: 15240737 NR Description: peroxidase, putative; protein id: At5g67400.1
  misc_feature (11)..(335): NCBI GI NO: 28629828 NR Description: peroxidase 1 [Artemisia annua]
  misc_feature (9)..(335): NCBI GI NO: 14485511 NR Description: putative peroxidase [Solanum tuberosum]
  misc_feature (28)..(335): NCBI GI NO: 15241315 NR Description: peroxidase, putative; protein id: At5g14130
  misc_feature (12)..(335): NCBI GI NO: 7433082 NR Description: probable peroxidase (EC 1
  misc_feature (30)..(332): NCBI GI NO: 4138647 NR Description: peroxidase [Trifolium repens]
  misc_feature (8)..(332): NCBI GI NO: 2117624 NR Description: peroxidase (EC 1.11.1.7) 2 precursor - alfalfa
  misc_feature (8)..(332): NCBI GI NO: 13992528 NR Description: peroxidase2 [Medicago sativa]
  misc_feature (11)..(335): NCBI GI NO: 15229646 NR Description: peroxidase, putative; protein id: At3g49960.1
  misc_feature (7)..(335): NCBI GI NO: 15235600 NR Description: peroxidase, putative; protein id: At4g37530
MEKWRRRRHLLLAVAAVALVAAITLPSAEAKLSPDYYRSTCPDVEAIVQAVVAKKVNETFVTVPATLRLFFHDCFVEGCDASVIIASRDNDAEKDAPDNVSLAGDGFDTVVRAKAEVEKKCPGVVSCADILAIAARDVVTMSSGPHWTVQLGRLDGLVSKAGNVAGKLPGPNMRVKDLAALFAKHNLTTLDMVALSGAHTVGFAHCTRFADRLYHHGVGDSDGASVDPSYNPAYARQLMDACPPGVGADIAVNMDPITPTAFDNAYYANLAGGLGLFISDQALYSDGASQPAVRDFAKNQTRFFEAFKDAMVKLGSVGVKTGRHGEIRSDCTAFN

SEQ ID NO: 38938 - protein, 195 aa, Zea mays subsp. mays
  peptide (1)..(195): Ceres Seq. ID no. 12350697
  misc_feature (1)..(159): Pfam Name: Pfam Description:  Peroxidase
  misc_feature (1)..(195): NCBI GI NO: 15240737 NR Description: peroxidase, putative; protein id: At5g67400.1
  misc_feature (1)..(195): NCBI GI NO: 28629828 NR Description: peroxidase 1 [Artemisia annua]
  misc_feature (1)..(195): NCBI GI NO: 14485511 NR Description: putative peroxidase [Solanum tuberosum]
  misc_feature (1)..(195): NCBI GI NO: 15241315 NR Description: peroxidase, putative; protein id: At5g14130
  misc_feature (1)..(195): NCBI GI NO: 7433082 NR Description: probable peroxidase (EC 1
  misc_feature (1)..(192): NCBI GI NO: 4138647 NR Description: peroxidase [Trifolium repens]
  misc_feature (1)..(192): NCBI GI NO: 2117624 NR Description: peroxidase (EC 1.11.1.7) 2 precursor - alfalfa
  misc_feature (1)..(192): NCBI GI NO: 13992528 NR Description: peroxidase2 [Medicago sativa]
  misc_feature (1)..(195): NCBI GI NO: 15229646 NR Description: peroxidase, putative; protein id: At3g49960.1
  misc_feature (1)..(195): NCBI GI NO: 15235600 NR Description: peroxidase, putative; protein id: At4g37530
MSSGPHWTVQLGRLDGLVSKAGNVAGKLPGPNMRVKDLAALFAKHNLTTLDMVALSGAHTVGFAHCTRFADRLYHHGVGDSDGASVDPSYNPAYARQLMDACPPGVGADIAVNMDPITPTAFDNAYYANLAGGLGLFISDQALYSDGASQPAVRDFAKNQTRFFEAFKDAMVKLGSVGVKTGRHGEIRSDCTAFN

SEQ ID NO: 38939 - protein, 181 aa, Zea mays subsp. mays
  peptide (1)..(181): Ceres Seq. ID no. 12350698
  misc_feature (3)..(181): Pfam Name: Pfam Description:  Equine herpesvirus glycoprotein gp2
  misc_feature (1)..(181): NCBI GI NO: 28574039 NR Description: Salivary gland secretion 1 CG3047-PA
  misc_feature (1)..(181): NCBI GI NO: 28574039 NR Description: Salivary gland secretion 1 CG3047-PA
  misc_feature (1)..(181): NCBI GI NO: 28574039 NR Description: Salivary gland secretion 1 CG3047-PA
  misc_feature (1)..(181): NCBI GI NO: 31232507 NR Description: ENSANGP00000004655 [Anopheles gambiae]
  misc_feature (1)..(181): NCBI GI NO: 28574039 NR Description: Salivary gland secretion 1 CG3047-PA
  misc_feature (1)..(181): NCBI GI NO: 28574039 NR Description: Salivary gland secretion 1 CG3047-PA
  misc_feature (1)..(181): NCBI GI NO: 31232507 NR Description: ENSANGP00000004655 [Anopheles gambiae]
  misc_feature (1)..(181): NCBI GI NO: 28574039 NR Description: Salivary gland secretion 1 CG3047-PA
  misc_feature (1)..(181): NCBI GI NO: 31232507 NR Description: ENSANGP00000004655 [Anopheles gambiae]
  misc_feature (5)..(181): NCBI GI NO: 28574039 NR Description: Salivary gland secretion 1 CG3047-PA
MRPSSQSRPRSGSSSTTASSRAVMRRSSSRPATTTPRRTRPTTCPSLATASTPWCAPRPRSRRSAPAWSPAPISSPSPPGTSSPCRPAPTGPSSLAGLTGSSPRPATSRASCRDPTCASRTSPPCSPSTTSPRSTWSRSRERTPSGSRTAPASRTASTTTASATAMARRWTRRTTLRTRGS

SEQ ID NO: 38940 - DNA, 1132 bp, Zea mays subsp. mays
  misc_feature (1)..(1132): Ceres Seq. ID no. 12375190
gcacgagaccattacctagaacatcctaatcgaaaaacactttcctttccgcggcccctctgctcaccgcactccgttgcctgatggcgtcgccggcggcggggacgccgcccttcctgacgaaaacttacgccatggtggaggactcggccacggacgacacgatctcgtggaacgacaccggcacggccttcgtggtgtggcgccccgctgagttcgcccgtgaccttcttcccaagcacttcaagcacagcaacttctcctcgttcgtccgccagctcaacacctacggattcaagaaggtagtcggggacagatgggagtttgccaacgacggcttccggagaggcgagaagcaccttctcgccggaatacagaggcggaaggggaccggcgccgtggcggcggtaccggtgccgggcataccggcggggataccgttaccgctctcgtccccgcccacgagctctggcggggagccggcggtctcctcgtcgccgccgcgtggctcgacagctggagttagcggcgcggtggccgagctggaggaggagaacgcgcggctgcgacgcgagaatgcgaggctggcgcgggagctggcccgcgcgcggcgcctctgcgacggcgtgcgccagctcatggcgcggtacgacgacgaccaaggcagaggcggagatgaggatccggcggacggcgacgaggggcatggcggcagtggggaaggccccagcggcccagaggtgaagccaatgctgttcggcgtcccaatcggggccaagcggctacgcggtgcgcgtggtgatggagacgatgtagatgacggcgaggacaacgacgaggaaccagatgaagacgacgagaggcaaacggtgcggaagcagggggttaaagcggccaggaggaacgaggcgtcggatctggacgtgctgacgctgtccgtgcgggcggccgcggcggcgaggacgggcggaggatcacgtgaccgcaaaagccccattaccgcccaccccgataggagcctcagcctagggctgaaatgactgacactcgtgtagagtactgtagtatcgattgtagtattgtattgagtgatgctgcacgcttgaattgaatcatctagaaatcaaaattt

SEQ ID NO: 38941 - protein, 318 aa, Zea mays subsp. mays
  peptide (1)..(318): Ceres Seq. ID no. 12375191
  misc_feature (10)..(215): Pfam Name: Pfam Description:  HSF-type DNA-binding
  misc_feature (1)..(306): NCBI GI NO: 38344369 NR Description: OSJNBb0032E06.3
  misc_feature (18)..(306): NCBI GI NO: 33591096 NR Description: heat shock factor RHSF1
  misc_feature (10)..(223): NCBI GI NO: 33591098 NR Description: heat shock factor RHSF2
  misc_feature (10)..(257): NCBI GI NO: 30697614 NR Description: heat shock transcription factor 6 (HSF6)
  misc_feature (10)..(255): NCBI GI NO: 123684 NR Description: HEAT SHOCK FACTOR PROTEIN HSF24
  misc_feature (1)..(257): NCBI GI NO: 15234583 NR Description: heat shock transcription factor HSF4
  misc_feature (1)..(257): NCBI GI NO: 2129612 NR Description: heat shock transcription factor HSF4
  misc_feature (10)..(189): NCBI GI NO: 5821136 NR Description: heat shock factor [Nicotiana tabacum]
  misc_feature (10)..(240): NCBI GI NO: 2129831 NR Description: heat shock transcription factor HSF34 - soybean
  misc_feature (5)..(182): NCBI GI NO: 33146640 NR Description: putative heat shock transcription factor HSF5
MASPAAGTPPFLTKTYAMVEDSATDDTISWNDTGTAFVVWRPAEFARDLLPKHFKHSNFSSFVRQLNTYGFKKVVGDRWEFANDGFRRGEKHLLAGIQRRKGTGAVAAVPVPGIPAGIPLPLSSPPTSSGGEPAVSSSPPRGSTAGVSGAVAELEEENARLRRENARLARELARARRLCDGVRQLMARYDDDQGRGGDEDPADGDEGHGGSGEGPSGPEVKPMLFGVPIGAKRLRGARGDGDDVDDGEDNDEEPDEDDERQTVRKQGVKAARRNEASDLDVLTLSVRAAAAARTGGGSRDRKSPITAHPDRSLSLGLK

SEQ ID NO: 38942 - protein, 301 aa, Zea mays subsp. mays
  peptide (1)..(301): Ceres Seq. ID no. 12375192
  misc_feature (1)..(198): Pfam Name: Pfam Description:  HSF-type DNA-binding
  misc_feature (1)..(289): NCBI GI NO: 38344369 NR Description: OSJNBb0032E06.3
  misc_feature (1)..(289): NCBI GI NO: 33591096 NR Description: heat shock factor RHSF1
  misc_feature (1)..(206): NCBI GI NO: 33591098 NR Description: heat shock factor RHSF2
  misc_feature (1)..(240): NCBI GI NO: 30697614 NR Description: heat shock transcription factor 6 (HSF6)
  misc_feature (1)..(238): NCBI GI NO: 123684 NR Description: HEAT SHOCK FACTOR PROTEIN HSF24
  misc_feature (1)..(240): NCBI GI NO: 15234583 NR Description: heat shock transcription factor HSF4
  misc_feature (1)..(240): NCBI GI NO: 2129612 NR Description: heat shock transcription factor HSF4
  misc_feature (1)..(172): NCBI GI NO: 5821136 NR Description: heat shock factor [Nicotiana tabacum]
  misc_feature (1)..(223): NCBI GI NO: 2129831 NR Description: heat shock transcription factor HSF34 - soybean
  misc_feature (1)..(165): NCBI GI NO: 33146640 NR Description: putative heat shock transcription factor HSF5
MVEDSATDDTISWNDTGTAFVVWRPAEFARDLLPKHFKHSNFSSFVRQLNTYGFKKVVGDRWEFANDGFRRGEKHLLAGIQRRKGTGAVAAVPVPGIPAGIPLPLSSPPTSSGGEPAVSSSPPRGSTAGVSGAVAELEEENARLRRENARLARELARARRLCDGVRQLMARYDDDQGRGGDEDPADGDEGHGGSGEGPSGPEVKPMLFGVPIGAKRLRGARGDGDDVDDGEDNDEEPDEDDERQTVRKQGVKAARRNEASDLDVLTLSVRAAAAARTGGGSRDRKSPITAHPDRSLSLGLK

SEQ ID NO: 38943 - DNA, 501 bp, Zea mays subsp. mays
  misc_feature (1)..(501): Ceres Seq. ID no. 4612568
accatcggcttccgcatctccccgcctccacccacggcactcgcaagcagcgctcattagtcactagggttttaaactttccccccgatccgcctcgccgccggcgtcgtcctccgccggaaatccaccaccctacacccagccggagacgactatggtgggtttcggctcgatggcgggctacgggatccagtcgatgctcaaggaaggccaccgccacctctccgggctcgaggaggccgttctcaagaacatcgacgcctgccgcgagctgtccgccattacgcgcacctctctcggcccgaacggaatgaacaaaatggttatcaatcacttggacaagctgtttgtcacaaacgatgctgccaccattgtgaatgagctcgaagttcagcaccctgccgctaagattctggtactggctggtagggctcaacaggaggagattggggatggggccaatctcaccatatcgtttgccggtgaactgcttgagaaggc

SEQ ID NO: 38944 - protein, 115 aa, Zea mays subsp. mays
  peptide (1)..(115): Ceres Seq. ID no. 4612569
  misc_feature (40)..(114): Pfam Name: Pfam Description:  TCP-1/cpn60 chaperonin family
  misc_feature (1)..(114): NCBI GI NO: 6223641 NR Description: putative T-complex protein 1, theta subunit
  misc_feature (1)..(114): NCBI GI NO: 18396719 NR Description: putative T-complex protein 1, theta subunit
  misc_feature (8)..(114): NCBI GI NO: 4959731 NR Description: chaperonin-containing-TCP1 theta subunit
  misc_feature (11)..(114): NCBI GI NO: 27924345 NR Description: Similar to chaperonin containing TCP1, subunit 8
  misc_feature (11)..(114): NCBI GI NO: 9988062 NR Description: T-complex protein 1, theta subunit
  misc_feature (11)..(114): NCBI GI NO: 29791676 NR Description: Similar to chaperonin containing TCP1, subunit 8
  misc_feature (11)..(114): NCBI GI NO: 37362194 NR Description: chaperonin containing TCP1, subunit 8 (theta)
  misc_feature (11)..(114): NCBI GI NO: 1136741 NR Description: KIAA0002 [Homo sapiens]
  misc_feature (11)..(114): NCBI GI NO: 6005727 NR Description: chaperonin containing TCP1, subunit 8
  misc_feature (11)..(114): NCBI GI NO: 40789055 NR Description: KIAA0002 [Homo sapiens]
MVGFGSMAGYGIQSMLKEGHRHLSGLEEAVLKNIDACRELSAITRTSLGPNGMNKMVINHLDKLFVTNDAATIVNELEVQHPAAKILVLAGRAQQEEIGDGANLTISFAGELLEK

SEQ ID NO: 38945 - protein, 109 aa, Zea mays subsp. mays
  peptide (1)..(109): Ceres Seq. ID no. 4612570
  misc_feature (34)..(108): Pfam Name: Pfam Description:  TCP-1/cpn60 chaperonin family
  misc_feature (1)..(108): NCBI GI NO: 6223641 NR Description: putative T-complex protein 1, theta subunit
  misc_feature (1)..(108): NCBI GI NO: 18396719 NR Description: putative T-complex protein 1, theta subunit
  misc_feature (2)..(108): NCBI GI NO: 4959731 NR Description: chaperonin-containing-TCP1 theta subunit
  misc_feature (5)..(108): NCBI GI NO: 27924345 NR Description: Similar to chaperonin containing TCP1, subunit 8
  misc_feature (5)..(108): NCBI GI NO: 9988062 NR Description: T-complex protein 1, theta subunit
  misc_feature (5)..(108): NCBI GI NO: 29791676 NR Description: Similar to chaperonin containing TCP1, subunit 8
  misc_feature (5)..(108): NCBI GI NO: 37362194 NR Description: chaperonin containing TCP1, subunit 8 (theta)
  misc_feature (5)..(108): NCBI GI NO: 1136741 NR Description: KIAA0002 [Homo sapiens]
  misc_feature (5)..(108): NCBI GI NO: 6005727 NR Description: chaperonin containing TCP1, subunit 8
  misc_feature (5)..(108): NCBI GI NO: 40789055 NR Description: KIAA0002 [Homo sapiens]
MAGYGIQSMLKEGHRHLSGLEEAVLKNIDACRELSAITRTSLGPNGMNKMVINHLDKLFVTNDAATIVNELEVQHPAAKILVLAGRAQQEEIGDGANLTISFAGELLEK

SEQ ID NO: 38946 - protein, 103 aa, Zea mays subsp. mays
  peptide (1)..(103): Ceres Seq. ID no. 4612571
HRLPHLPASTHGTRKQRSLVTRVLNFPPDPPRRRRRPPPEIHHPTPSRRRLWWVSARWRATGSSRCSRKATATSPGSRRPFSRTSTPAASCPPLRAPLSARTE

SEQ ID NO: 38947 - DNA, 2025 bp, Zea mays subsp. mays
  misc_feature (1)..(2025): Ceres Seq. ID no. 12417568
acgccatacaattctcacacgcgcgcgcccaacacactagcctgcaggatcgtcgagcgcgaggcggctgccccgccggccggttcgttcgctctatagcttgagaccgatcctagggccaagacgatatcggcggcgatgatgatggacgcggcgaggatcgtagagtacttcaagggcaagtgcatcctcgtcaccggctcaacagggtttcttggaaagatccttgtggagaagatactgcgggtgcagcctgacgtgcgcaagatttacctgcttgtacgcgcggtcgacgagccatcagcgaagcagcgcgtccaacaagaggtgatagacacggagctgttcggcctgctgagagagaaacacggcaagggcttccagcagttcgtagaggccaaggtcgtcgctttggccggagacatcgtatacgacggcctggggctggaggcagccgtgctggacgcgctggccaaggacgtcgacgtcatcgtcaacatcgcagcaaccaccaacttctacgaaagatacgatgtttcgctggacgtgaacgtgctgggagtgaagcacctgtgcatgttcgccaagcagtgcgcgaggctcaggatgctcatgcacgtctccactgccttcgtctcgggcttcagggagggcctcatcctggagaagcccatcaagcccggcgagtcgctgcgggagggcacgtacctggacgtggacgcggagctgcgcctcgtcaaggaggtgaagaagtcgctggcggcgaacggcgatggcgacggcgacagcacggagcggaaggccatgaaggatctgggcctccggcgggcgcggcacttcgggtggtccaacacgtacgtgttcaccaaggccatgggggaggccgtgctgggccagcagctccggggcggcgacgtccccgtggcggtgatgcggcccagcatcatcaccagcgtccggcgcgacccgctgcccgggtggatgcagggcacccgcaccatcgacagcatcatcatcggctacgccaagcagaacctgtcctgcttcctcgccgacctccgcctcgtcatggacgtcatccccggggacatggtggtcaacgccatgatggcggccgtggtggcgcactcggaggcgttcgcgccgccgctgccgcaggtggtggtgtaccacgccacctcgtcgctgcgcaacccggccacctacgacgtgctctaccagtccggacgccgccatttctacgagaacccgcgcgtcggcaaggacggcagggtcatccccaccagggagatgtacttcttcaccagcatcgccaggttccacctctacatgactctcatctacaaggtgccattagagattctgcaccttgtgaatctgctgctctgtggccttctctcgcggctctacaacgacctcaaccgcaagtacaagtttgtgatgcatctggttgacgtctacggcccattcgccttcttcaaaggatgcttcgatgacataaacctggagcggctaaggctggcaatggcgatgaagacccctgaggatcaaatgttcaatttcgaccctaagaccatcgactgggacgattacttcaccagaatccacatccctggtattctcaagtatgtgtgcaagtgaagccttctttcttcagtctatttgcagcatgcacatgcttcttcttcgccttcttactatcgaaagttaatggctcatattctttatgaaagaaatttataccactctgtttggttgtacctgttctatggatcgaccgggtgttaccaagaaacaaaaataattcgatctctgctagattgatatagttctgtatgggagagactgaggcccctcatatcgtaaatcaatagtgatcgtcaaacgagtgtatgctgtgttaggtggcagccaatatgtatcttgattaattgagaacttgtaatctgtgtcatatgtacgcgtgtcactgtcagtgacaatgaaaagcaaatgtaatatctatttataatggcagtgaaattc

SEQ ID NO: 38948 - protein, 500 aa, Zea mays subsp. mays
  peptide (1)..(500): Ceres Seq. ID no. 12417569
  misc_feature (292)..(498): Pfam Name: Pfam Description:  Male sterility protein
  misc_feature (7)..(498): NCBI GI NO: 22003090 NR Description: fatty acyl coA reductase [Triticum aestivum]
  misc_feature (8)..(500): NCBI GI NO: 22003082 NR Description: fatty acyl coA reductase [Triticum aestivum]
  misc_feature (3)..(499): NCBI GI NO: 35215152 NR Description: putative fatty acyl coA reductase
  misc_feature (3)..(419): NCBI GI NO: 22003086 NR Description: fatty acyl coA reductase [Triticum aestivum]
  misc_feature (3)..(497): NCBI GI NO: 38346864 NR Description: OSJNBb0002N06.4
  misc_feature (3)..(497): NCBI GI NO: 38346871 NR Description: OSJNBb0002N06.11
  misc_feature (3)..(460): NCBI GI NO: 34394121 NR Description: putative fatty acyl coA reductase
  misc_feature (9)..(500): NCBI GI NO: 15242260 NR Description: male sterility 2-like protein (emb|CAA68191
  misc_feature (2)..(498): NCBI GI NO: 5020215 NR Description: acyl CoA reductase [Simmondsia chinensis]
  misc_feature (3)..(498): NCBI GI NO: 16323107 NR Description: AT4g33790/T16L1_280 [Arabidopsis thaliana]
MMMDAARIVEYFKGKCILVTGSTGFLGKILVEKILRVQPDVRKIYLLVRAVDEPSAKQRVQQEVIDTELFGLLREKHGKGFQQFVEAKVVALAGDIVYDGLGLEAAVLDALAKDVDVIVNIAATTNFYERYDVSLDVNVLGVKHLCMFAKQCARLRMLMHVSTAFVSGFREGLILEKPIKPGESLREGTYLDVDAELRLVKEVKKSLAANGDGDGDSTERKAMKDLGLRRARHFGWSNTYVFTKAMGEAVLGQQLRGGDVPVAVMRPSIITSVRRDPLPGWMQGTRTIDSIIIGYAKQNLSCFLADLRLVMDVIPGDMVVNAMMAAVVAHSEAFAPPLPQVVVYHATSSLRNPATYDVLYQSGRRHFYENPRVGKDGRVIPTREMYFFTSIARFHLYMTLIYKVPLEILHLVNLLLCGLLSRLYNDLNRKYKFVMHLVDVYGPFAFFKGCFDDINLERLRLAMAMKTPEDQMFNFDPKTIDWDDYFTRIHIPGILKYVCK

SEQ ID NO: 38949 - protein, 499 aa, Zea mays subsp. mays
  peptide (1)..(499): Ceres Seq. ID no. 12417570
  misc_feature (291)..(497): Pfam Name: Pfam Description:  Male sterility protein
  misc_feature (6)..(497): NCBI GI NO: 22003090 NR Description: fatty acyl coA reductase [Triticum aestivum]
  misc_feature (7)..(499): NCBI GI NO: 22003082 NR Description: fatty acyl coA reductase [Triticum aestivum]
  misc_feature (2)..(498): NCBI GI NO: 35215152 NR Description: putative fatty acyl coA reductase
  misc_feature (2)..(418): NCBI GI NO: 22003086 NR Description: fatty acyl coA reductase [Triticum aestivum]
  misc_feature (2)..(496): NCBI GI NO: 38346864 NR Description: OSJNBb0002N06.4
  misc_feature (2)..(496): NCBI GI NO: 38346871 NR Description: OSJNBb0002N06.11
  misc_feature (2)..(459): NCBI GI NO: 34394121 NR Description: putative fatty acyl coA reductase
  misc_feature (8)..(499): NCBI GI NO: 15242260 NR Description: male sterility 2-like protein (emb|CAA68191
  misc_feature (1)..(497): NCBI GI NO: 5020215 NR Description: acyl CoA reductase [Simmondsia chinensis]
  misc_feature (2)..(497): NCBI GI NO: 16323107 NR Description: AT4g33790/T16L1_280 [Arabidopsis thaliana]
MMDAARIVEYFKGKCILVTGSTGFLGKILVEKILRVQPDVRKIYLLVRAVDEPSAKQRVQQEVIDTELFGLLREKHGKGFQQFVEAKVVALAGDIVYDGLGLEAAVLDALAKDVDVIVNIAATTNFYERYDVSLDVNVLGVKHLCMFAKQCARLRMLMHVSTAFVSGFREGLILEKPIKPGESLREGTYLDVDAELRLVKEVKKSLAANGDGDGDSTERKAMKDLGLRRARHFGWSNTYVFTKAMGEAVLGQQLRGGDVPVAVMRPSIITSVRRDPLPGWMQGTRTIDSIIIGYAKQNLSCFLADLRLVMDVIPGDMVVNAMMAAVVAHSEAFAPPLPQVVVYHATSSLRNPATYDVLYQSGRRHFYENPRVGKDGRVIPTREMYFFTSIARFHLYMTLIYKVPLEILHLVNLLLCGLLSRLYNDLNRKYKFVMHLVDVYGPFAFFKGCFDDINLERLRLAMAMKTPEDQMFNFDPKTIDWDDYFTRIHIPGILKYVCK

SEQ ID NO: 38950 - protein, 498 aa, Zea mays subsp. mays
  peptide (1)..(498): Ceres Seq. ID no. 12417571
  misc_feature (290)..(496): Pfam Name: Pfam Description:  Male sterility protein
  misc_feature (5)..(496): NCBI GI NO: 22003090 NR Description: fatty acyl coA reductase [Triticum aestivum]
  misc_feature (6)..(498): NCBI GI NO: 22003082 NR Description: fatty acyl coA reductase [Triticum aestivum]
  misc_feature (1)..(497): NCBI GI NO: 35215152 NR Description: putative fatty acyl coA reductase
  misc_feature (1)..(417): NCBI GI NO: 22003086 NR Description: fatty acyl coA reductase [Triticum aestivum]
  misc_feature (1)..(495): NCBI GI NO: 38346864 NR Description: OSJNBb0002N06.4
  misc_feature (1)..(495): NCBI GI NO: 38346871 NR Description: OSJNBb0002N06.11
  misc_feature (1)..(458): NCBI GI NO: 34394121 NR Description: putative fatty acyl coA reductase
  misc_feature (7)..(498): NCBI GI NO: 15242260 NR Description: male sterility 2-like protein (emb|CAA68191
  misc_feature (1)..(496): NCBI GI NO: 5020215 NR Description: acyl CoA reductase [Simmondsia chinensis]
  misc_feature (1)..(496): NCBI GI NO: 16323107 NR Description: AT4g33790/T16L1_280 [Arabidopsis thaliana]
MDAARIVEYFKGKCILVTGSTGFLGKILVEKILRVQPDVRKIYLLVRAVDEPSAKQRVQQEVIDTELFGLLREKHGKGFQQFVEAKVVALAGDIVYDGLGLEAAVLDALAKDVDVIVNIAATTNFYERYDVSLDVNVLGVKHLCMFAKQCARLRMLMHVSTAFVSGFREGLILEKPIKPGESLREGTYLDVDAELRLVKEVKKSLAANGDGDGDSTERKAMKDLGLRRARHFGWSNTYVFTKAMGEAVLGQQLRGGDVPVAVMRPSIITSVRRDPLPGWMQGTRTIDSIIIGYAKQNLSCFLADLRLVMDVIPGDMVVNAMMAAVVAHSEAFAPPLPQVVVYHATSSLRNPATYDVLYQSGRRHFYENPRVGKDGRVIPTREMYFFTSIARFHLYMTLIYKVPLEILHLVNLLLCGLLSRLYNDLNRKYKFVMHLVDVYGPFAFFKGCFDDINLERLRLAMAMKTPEDQMFNFDPKTIDWDDYFTRIHIPGILKYVCK

SEQ ID NO: 38951 - DNA, 2007 bp, Zea mays subsp. mays
  misc_feature (1)..(2007): Ceres Seq. ID no. 12417447
gcacgagaccattacctagaacatccaatcaaaaaagcatgtctcgcgggtcctgccgtctcgtcgccactactgactactgaggagaggagcatggccctgactaacgtcttcgtcgtcctcctgagtaccgcattggctgtgctccccttctcccctgccgatgccggcgtggtgggcgtgagctacggccgattagggaacgacctgccgggcacggcttcggtggtaaagctgctgaagaagagcggcatcacctcggtgaggctctacgacgccaactcaaaggtgctcaaggccctggccaacaccgggatcacggtgatggtaatgctacccaacgacaagctcgccgcggcggccgcggacccgtcgagcgcgcgacggtgggtgcggaggaacgtggcggcgtactaccccgccacgcacatccacgccgtcgccgtcgggaacgaggtgttcgaggaggccaagaacctgaccgggcagctcgtcccggccatgtccaacgtgcacgacgcgctggtgaagcttggcctggacggggccgtgaaggtctcgacgccgatcgcgttcaccgcgctccaggagtcgtggccgccgtccgcgggcaggttccgggacgacatcgcgcggtcggtgatgaagcccatgatcgatttcctggagcggaccgggtcgtacctcaccgtgaacgcctacccgttcttcgcgtacgccgaggagccagacaagatctccctcgactacgccctggggaactccaacgccaccggcgtgcgcgaccccgtgaccgggctcgtgtaccacagcctcctggacgcccagctcgacgccacgtacttcgcgatggagaagctggggacgtccagatccagtgcgcgggggccaaattccgtggcgccagcagcgcacgtttcggagagcgggtgcgccttccggcggcaaacccaaacgcggcggcaggccgcggccacgcccacgcggcggcgggaggcgtttggagttggagcaggctggaggtgaagcggcttcggtagccaacgcgcaagcgtacaacaactacctgatcaagcgcgtgctgtccggtgacacgggcaccccgtaccaccccgacgccgacatggacgtctacatcttctccctcttcaacgagaaccagaagggcgacggggcggacgacgtcgagcagcacttcgggctgttctacccgaaccggacgaaggtgtacgagttcgacttccggggcggcgcgctggtggccagctggtgcgtggcgaacgcgtccgccggggacgcgcggctgcaggcggcgctggagtacgcgtgcggccacggcgccgactgcggcgccatccagcccggcgcgccgtgcttcgagcccgacaccaggctcgcgcacgcctcgtatgcgttcaacagctactaccagcgcaacggccggggccaaggcggcgtgcgacttcgacggcgccgcctacgtcgtgtatcacgaaccagctggcacctgtgacccgaacgtgagctggtgcgtggcgaatgcggcggccggcgacgcgcggctgctggcagcgctgaactacgcgtgtgccaacggcgcggactgcggcgccatacagcccggcggagcgtgcttcgagcccaacaccgtggtcgcccacgcctcgtacgcgttcaacagctactaccagcggaaggggcggggcagcgggacgtgcgacttcgccggagccggttccgtggtctaccacgcgccaaagattattgggaagtgcgtcctcccgtcgaaagcttggattcaagaaacaacaacagtcaagtctagaggattcaagacaagttcggtttaacctcgtactaggaacgtagaataatgtaaacattggcatctgcacatcaggataactgatgtctttgtgttgctttgcttttcggacactcatgaaccatcgttcctgtttcctgaggcggatctcctgctaggtttggttcccggcttctggcttt

SEQ ID NO: 38952 - protein, 341 aa, Zea mays subsp. mays
  peptide (1)..(341): Ceres Seq. ID no. 12417448
  misc_feature (59)..(288): Pfam Name: Pfam Description:  Glycosyl hydrolases family 17
  misc_feature (32)..(310): NCBI GI NO: 34394937 NR Description: putative beta-1,3-glucanase
  misc_feature (24)..(337): NCBI GI NO: 34394955 NR Description: putative beta-1,3-glucanase
  misc_feature (32)..(310): NCBI GI NO: 40253222 NR Description: putative beta-1,3-glucanase (EC 3.2.1.-) precursor
  misc_feature (34)..(310): NCBI GI NO: 34394953 NR Description: putative beta-1,3-glucanase
  misc_feature (32)..(309): NCBI GI NO: 34394950 NR Description: putative beta-1,3-glucanase
  misc_feature (88)..(293): NCBI GI NO: 33146691 NR Description: putative beta-1,3-glucanase precursor
  misc_feature (52)..(288): NCBI GI NO: 11071974 NR Description: elicitor inducible beta-1,3-glucanase Nt-SubE76
  misc_feature (41)..(287): NCBI GI NO: 30678225 NR Description: glycosyl hydrolase family 17
  misc_feature (41)..(287): NCBI GI NO: 25316444 NR Description: probable beta-1,3-glucanase
  misc_feature (32)..(288): NCBI GI NO: 11279331 NR Description: beta-1,3-glucanase (EC 3.2.1.-) precursor
ARDHYLEHPIKKACLAGPAVSSPLLTTEERSMALTNVFVVLLSTALAVLPFSPADAGVVGVSYGRLGNDLPGTASVVKLLKKSGITSVRLYDANSKVLKALANTGITVMVMLPNDKLAAAAADPSSARRWVRRNVAAYYPATHIHAVAVGNEVFEEAKNLTGQLVPAMSNVHDALVKLGLDGAVKVSTPIAFTALQESWPPSAGRFRDDIARSVMKPMIDFLERTGSYLTVNAYPFFAYAEEPDKISLDYALGNSNATGVRDPVTGLVYHSLLDAQLDATYFAMEKLGTSRSSARGPNSVAPAAHVSESGCAFRRQTQTRRQAAATPTRRREAFGVGAGWR

SEQ ID NO: 38953 - protein, 310 aa, Zea mays subsp. mays
  peptide (1)..(310): Ceres Seq. ID no. 12417449
  misc_feature (28)..(257): Pfam Name: Pfam Description:  Glycosyl hydrolases family 17
  misc_feature (1)..(279): NCBI GI NO: 34394937 NR Description: putative beta-1,3-glucanase
  misc_feature (1)..(306): NCBI GI NO: 34394955 NR Description: putative beta-1,3-glucanase
  misc_feature (1)..(279): NCBI GI NO: 40253222 NR Description: putative beta-1,3-glucanase (EC 3.2.1.-) precursor
  misc_feature (3)..(279): NCBI GI NO: 34394953 NR Description: putative beta-1,3-glucanase
  misc_feature (1)..(278): NCBI GI NO: 34394950 NR Description: putative beta-1,3-glucanase
  misc_feature (57)..(262): NCBI GI NO: 33146691 NR Description: putative beta-1,3-glucanase precursor
  misc_feature (21)..(257): NCBI GI NO: 11071974 NR Description: elicitor inducible beta-1,3-glucanase Nt-SubE76
  misc_feature (10)..(256): NCBI GI NO: 30678225 NR Description: glycosyl hydrolase family 17
  misc_feature (10)..(256): NCBI GI NO: 25316444 NR Description: probable beta-1,3-glucanase
  misc_feature (1)..(257): NCBI GI NO: 11279331 NR Description: beta-1,3-glucanase (EC 3.2.1.-) precursor
MALTNVFVVLLSTALAVLPFSPADAGVVGVSYGRLGNDLPGTASVVKLLKKSGITSVRLYDANSKVLKALANTGITVMVMLPNDKLAAAAADPSSARRWVRRNVAAYYPATHIHAVAVGNEVFEEAKNLTGQLVPAMSNVHDALVKLGLDGAVKVSTPIAFTALQESWPPSAGRFRDDIARSVMKPMIDFLERTGSYLTVNAYPFFAYAEEPDKISLDYALGNSNATGVRDPVTGLVYHSLLDAQLDATYFAMEKLGTSRSSARGPNSVAPAAHVSESGCAFRRQTQTRRQAAATPTRRREAFGVGAGWR

SEQ ID NO: 38954 - protein, 233 aa, Zea mays subsp. mays
  peptide (1)..(233): Ceres Seq. ID no. 12417450
  misc_feature (1)..(180): Pfam Name: Pfam Description:  Glycosyl hydrolases family 17
  misc_feature (1)..(202): NCBI GI NO: 34394937 NR Description: putative beta-1,3-glucanase
  misc_feature (1)..(229): NCBI GI NO: 34394955 NR Description: putative beta-1,3-glucanase
  misc_feature (1)..(202): NCBI GI NO: 40253222 NR Description: putative beta-1,3-glucanase (EC 3.2.1.-) precursor
  misc_feature (1)..(202): NCBI GI NO: 34394953 NR Description: putative beta-1,3-glucanase
  misc_feature (1)..(201): NCBI GI NO: 34394950 NR Description: putative beta-1,3-glucanase
  misc_feature (1)..(185): NCBI GI NO: 33146691 NR Description: putative beta-1,3-glucanase precursor
  misc_feature (1)..(180): NCBI GI NO: 11071974 NR Description: elicitor inducible beta-1,3-glucanase Nt-SubE76
  misc_feature (1)..(179): NCBI GI NO: 30678225 NR Description: glycosyl hydrolase family 17
  misc_feature (1)..(179): NCBI GI NO: 25316444 NR Description: probable beta-1,3-glucanase
  misc_feature (1)..(180): NCBI GI NO: 11279331 NR Description: beta-1,3-glucanase (EC 3.2.1.-) precursor
MVMLPNDKLAAAAADPSSARRWVRRNVAAYYPATHIHAVAVGNEVFEEAKNLTGQLVPAMSNVHDALVKLGLDGAVKVSTPIAFTALQESWPPSAGRFRDDIARSVMKPMIDFLERTGSYLTVNAYPFFAYAEEPDKISLDYALGNSNATGVRDPVTGLVYHSLLDAQLDATYFAMEKLGTSRSSARGPNSVAPAAHVSESGCAFRRQTQTRRQAAATPTRRREAFGVGAGWR

SEQ ID NO: 38955 - DNA, 2041 bp, Zea mays subsp. mays
  misc_feature (1)..(2041): Ceres Seq. ID no. 12362393
gcacgagaccattacctagaacatcctaatcaaaaagctgtctaccctcaccaactcctacctcccgagacaaattccgaggtcgacacaagaaaagggaaagaaccacaggtaattgccttcctgtgtcgggattgtagctccaatccactccgcgccggccgggtgcgctgccatccggatcagacgccctcgcatctctcgcccttccggcatcgtatcccctgggcggcagcggagtaaagatccgacccgcttgggattgtttgcttctcctttttgcggtgcgccgctggactccagtgctgcacatgctcgacgacggtgctgagctcctgcaatggcccgaagaaatgccggcgcaatgcagcgggagggttcggcggggtcggttaaggactggtcggaattcgacccttcgccgtctcccaagctggcgtactcgcagtcctacgtcgccatgagagggctgttgacgtcggtggcttctctggaccctgtcctgacgtcgagcagcctcaagtctctgtgggcagccttgtcatcgcacaggcacgctcggtccttggagaggccaaagtacaaggggatgaactggaagaggcccatgttccacctgcttgtgtgcttcttagtgggagttttcattggattcacaccactcttctctctcgatttatccagtaacatagattctgaaaacgagacgcttccgtttgacggggatgtggttaacagacagatgctggaacttaaaagtacaaggttggagccgattgtggctgcggcagagactgaagccgcccaagaacaacaggttgatgagagtcctccagttcctgcgatgctggatgatgaggcggacttcattgaagcgtcacatgtccaaccttctgttaatgattctgacattggtgcaaagaagcagctgataattgtgacaacaacttctgttcgaccacatcaggcttattacttgaaccgcctggctcatgttttaaaaaatgtaccacctcctcttctgtggattgtggcggaatggccgtatcagtcccgtgaaacagcggagatcctgaggtcttctggggttatgtacagacatcttatctgcaatcggaacagtacaaatataaggaagattattgtctgccaaaagaacaatgcaatttttcatatcaagaagcaccgtttagatggtatagtacattttgctgatgaggagcgagtgtactcagttgatttatttgaagacatgcgaaaaatcaggcgctttggtacgtggccagtagcgacacatgttggagccaggtacaaggtggttttggaagggcctgtctgtaggggtaatcaagtcactggatggcatacaaacaagagagggggtgtacctcgtcggtttccaattggtttctctggttttgcttttaacagcactatactttgggatccccagaggtggaacagccccactttagagtctattatactccattcaggtggcagaggtggcttgcaggagtcaagattcatcgagaagcttgtcgaggacgagactcagatggaaggcctcgcagacaactgcactcgggttatggtctggaatttggacttggaacctccacagctgaattaccctactagctggcagctgcagaagaacctagacatcgtcgtgccaataacataaaccgcgatgctgctgctgccctttttgttcgcgcctcctagtgagtgtggtggaatgatgacgacaatgcccatgccttcctgaacttggtagcgtccaggatcacgcgaagctgctctgccaagacctggttcgaataatgtggtactagtaacaacagttggaaagcgaagaagcctgcctgacaaaaggaaaaattctttctccccccgttgcgctgcattaccaatgatcctcaacatagataggcttgtatatttcttttccttccatttttcgattattcctgttcgttacatataccatgcatacatacatacatacataaatacatatacaccttcattcattcat

SEQ ID NO: 38956 - protein, 448 aa, Zea mays subsp. mays
  peptide (1)..(448): Ceres Seq. ID no. 12362394
  misc_feature (216)..(432): Pfam Name: Pfam Description:  Glycosyltransferase family 43
  misc_feature (1)..(448): NCBI GI NO: 34911082 NR Description: P0485G01.28
  misc_feature (90)..(442): NCBI GI NO: 31979313 NR Description: galactosylgalactosylxylosyl protein 3-beta-glucuronosyltransferase
  misc_feature (74)..(443): NCBI GI NO: 31979311 NR Description: galactosylgalactosylxylosyl protein 3-beta-glucuronosyltransferase
  misc_feature (93)..(444): NCBI GI NO: 32968189 NR Description: beta3-glucuronyltransferase [Triticum aestivum]
  misc_feature (126)..(448): NCBI GI NO: 32879545 NR Description: beta3-glucuronyltransferase [Zea mays]
  misc_feature (190)..(448): NCBI GI NO: 32968172 NR Description: beta3-glucuronyltransferase
  misc_feature (157)..(445): NCBI GI NO: 18396409 NR Description: expressed protein; protein id: At1g27600
  misc_feature (157)..(432): NCBI GI NO: 5668771 NR Description: Contains similarity to gb|D88035 glyco proteinspecific UDP-glucuronyltransferase from Rattus norvegicus
  misc_feature (164)..(448): NCBI GI NO: 37532274 NR Description: putative glycosyltransferase
  misc_feature (157)..(376): NCBI GI NO: 6693039 NR Description: T22C5.4 [Arabidopsis thaliana]
MARRNAGAMQREGSAGSVKDWSEFDPSPSPKLAYSQSYVAMRGLLTSVASLDPVLTSSSLKSLWAALSSHRHARSLERPKYKGMNWKRPMFHLLVCFLVGVFIGFTPLFSLDLSSNIDSENETLPFDGDVVNRQMLELKSTRLEPIVAAAETEAAQEQQVDESPPVPAMLDDEADFIEASHVQPSVNDSDIGAKKQLIIVTTTSVRPHQAYYLNRLAHVLKNVPPPLLWIVAEWPYQSRETAEILRSSGVMYRHLICNRNSTNIRKIIVCQKNNAIFHIKKHRLDGIVHFADEERVYSVDLFEDMRKIRRFGTWPVATHVGARYKVVLEGPVCRGNQVTGWHTNKRGGVPRRFPIGFSGFAFNSTILWDPQRWNSPTLESIILHSGGRGGLQESRFIEKLVEDETQMEGLADNCTRVMVWNLDLEPPQLNYPTSWQLQKNLDIVVPIT

SEQ ID NO: 38957 - protein, 440 aa, Zea mays subsp. mays
  peptide (1)..(440): Ceres Seq. ID no. 12362395
  misc_feature (208)..(424): Pfam Name: Pfam Description:  Glycosyltransferase family 43
  misc_feature (1)..(440): NCBI GI NO: 34911082 NR Description: P0485G01.28
  misc_feature (82)..(434): NCBI GI NO: 31979313 NR Description: galactosylgalactosylxylosyl protein 3-beta-glucuronosyltransferase
  misc_feature (66)..(435): NCBI GI NO: 31979311 NR Description: galactosylgalactosylxylosyl protein 3-beta-glucuronosyltransferase
  misc_feature (85)..(436): NCBI GI NO: 32968189 NR Description: beta3-glucuronyltransferase [Triticum aestivum]
  misc_feature (118)..(440): NCBI GI NO: 32879545 NR Description: beta3-glucuronyltransferase [Zea mays]
  misc_feature (182)..(440): NCBI GI NO: 32968172 NR Description: beta3-glucuronyltransferase
  misc_feature (149)..(437): NCBI GI NO: 18396409 NR Description: expressed protein; protein id: At1g27600
  misc_feature (149)..(424): NCBI GI NO: 5668771 NR Description: Contains similarity to gb|D88035 glyco proteinspecific UDP-glucuronyltransferase from Rattus norvegicus
  misc_feature (156)..(440): NCBI GI NO: 37532274 NR Description: putative glycosyltransferase
  misc_feature (149)..(368): NCBI GI NO: 6693039 NR Description: T22C5.4 [Arabidopsis thaliana]
MQREGSAGSVKDWSEFDPSPSPKLAYSQSYVAMRGLLTSVASLDPVLTSSSLKSLWAALSSHRHARSLERPKYKGMNWKRPMFHLLVCFLVGVFIGFTPLFSLDLSSNIDSENETLPFDGDVVNRQMLELKSTRLEPIVAAAETEAAQEQQVDESPPVPAMLDDEADFIEASHVQPSVNDSDIGAKKQLIIVTTTSVRPHQAYYLNRLAHVLKNVPPPLLWIVAEWPYQSRETAEILRSSGVMYRHLICNRNSTNIRKIIVCQKNNAIFHIKKHRLDGIVHFADEERVYSVDLFEDMRKIRRFGTWPVATHVGARYKVVLEGPVCRGNQVTGWHTNKRGGVPRRFPIGFSGFAFNSTILWDPQRWNSPTLESIILHSGGRGGLQESRFIEKLVEDETQMEGLADNCTRVMVWNLDLEPPQLNYPTSWQLQKNLDIVVPIT

SEQ ID NO: 38958 - protein, 408 aa, Zea mays subsp. mays
  peptide (1)..(408): Ceres Seq. ID no. 12362396
  misc_feature (176)..(392): Pfam Name: Pfam Description:  Glycosyltransferase family 43
  misc_feature (1)..(408): NCBI GI NO: 34911082 NR Description: P0485G01.28
  misc_feature (50)..(402): NCBI GI NO: 31979313 NR Description: galactosylgalactosylxylosyl protein 3-beta-glucuronosyltransferase
  misc_feature (34)..(403): NCBI GI NO: 31979311 NR Description: galactosylgalactosylxylosyl protein 3-beta-glucuronosyltransferase
  misc_feature (53)..(404): NCBI GI NO: 32968189 NR Description: beta3-glucuronyltransferase [Triticum aestivum]
  misc_feature (86)..(408): NCBI GI NO: 32879545 NR Description: beta3-glucuronyltransferase [Zea mays]
  misc_feature (150)..(408): NCBI GI NO: 32968172 NR Description: beta3-glucuronyltransferase
  misc_feature (117)..(405): NCBI GI NO: 18396409 NR Description: expressed protein; protein id: At1g27600
  misc_feature (117)..(392): NCBI GI NO: 5668771 NR Description: Contains similarity to gb|D88035 glyco proteinspecific UDP-glucuronyltransferase from Rattus norvegicus
  misc_feature (124)..(408): NCBI GI NO: 37532274 NR Description: putative glycosyltransferase
  misc_feature (117)..(336): NCBI GI NO: 6693039 NR Description: T22C5.4 [Arabidopsis thaliana]
MRGLLTSVASLDPVLTSSSLKSLWAALSSHRHARSLERPKYKGMNWKRPMFHLLVCFLVGVFIGFTPLFSLDLSSNIDSENETLPFDGDVVNRQMLELKSTRLEPIVAAAETEAAQEQQVDESPPVPAMLDDEADFIEASHVQPSVNDSDIGAKKQLIIVTTTSVRPHQAYYLNRLAHVLKNVPPPLLWIVAEWPYQSRETAEILRSSGVMYRHLICNRNSTNIRKIIVCQKNNAIFHIKKHRLDGIVHFADEERVYSVDLFEDMRKIRRFGTWPVATHVGARYKVVLEGPVCRGNQVTGWHTNKRGGVPRRFPIGFSGFAFNSTILWDPQRWNSPTLESIILHSGGRGGLQESRFIEKLVEDETQMEGLADNCTRVMVWNLDLEPPQLNYPTSWQLQKNLDIVVPIT

SEQ ID NO: 38959 - DNA, 472 bp, Zea mays subsp. mays
  misc_feature (1)..(472): Ceres Seq. ID no. 1671642
aacttaaccactactccgcatctactgacgccgccgcgcaaggggcccgggtacgccacgccgctggaggccatggagaagggccccagggagaagctcgtctacgtcacctgcgtctacaacggcactggaattaacaagccggattaccttgcgacggtggatttggatcccagctctcctacatactcccaggtgatccacaggctcccggtcacccacatcggcgacgagctgcatcactctggctggaactcctgcagctcctgcyacggtgacccatcggccaagcgccgcttcctgatcctgccttccttgctgtcaggccgtgtgtatgtcgtcgacacagcgacagacccaagggcgccatccttgcataaggtggttgagtctgaggacattgctgagaatactgggcttgggttcccttcacacgtctcattgccttgcgtctggcgacattatgatttct

SEQ ID NO: 38960 - protein, 157 aa, Zea mays subsp. mays
  peptide (1)..(157): Ceres Seq. ID no. 1671643
  misc_feature (15)..(147): Pfam Name: SBP56 Pfam Description: 56kDa selenium binding protein
  misc_feature (15)..(147): NCBI GI NO: 34906970 NR Description: putative selenium binding protein
  misc_feature (25)..(147): NCBI GI NO: 13560275 NR Description: putative selenium binding protein [Oryza sativa]
  misc_feature (13)..(147): NCBI GI NO: 15485720 NR Description: selenium binding protein [Medicago sativa]
  misc_feature (12)..(147): NCBI GI NO: 15485722 NR Description: selenium binding protein [Glycine max]
  misc_feature (13)..(147): NCBI GI NO: 13605825 NR Description: AT4g14040/dl3061c [Arabidopsis thaliana]
  misc_feature (13)..(147): NCBI GI NO: 15236386 NR Description: selenium-binding protein like
  misc_feature (13)..(147): NCBI GI NO: 22530900 NR Description: selenium-binding protein-like protein
  misc_feature (13)..(147): NCBI GI NO: 25348077 NR Description: selenium-binding protein like
  misc_feature (13)..(147): NCBI GI NO: 7488184 NR Description: probable selenium-binding protein - Arabidopsisthaliana
  misc_feature (13)..(147): NCBI GI NO: 15485716 NR Description: selenium binding protein [Lotus japonicus]
  misc_feature (91)..(91): Xaa is any aa, unknown or other
NLTTTPHLLTPPRKGPGYATPLEAMEKGPREKLVYVTCVYNGTGINKPDYLATVDLDPSSPTYSQVIHRLPVTHIGDELHHSGWNSCSSCXGDPSAKRRFLILPSLLSGRVYVVDTATDPRAPSLHKVVESEDIAENTGLGFPSHVSLPCVWRHYDF

SEQ ID NO: 38961 - protein, 133 aa, Zea mays subsp. mays
  peptide (1)..(133): Ceres Seq. ID no. 1671644
  misc_feature (1)..(123): Pfam Name: SBP56 Pfam Description: 56kDa selenium binding protein
  misc_feature (1)..(123): NCBI GI NO: 34906970 NR Description: putative selenium binding protein
  misc_feature (1)..(123): NCBI GI NO: 13560275 NR Description: putative selenium binding protein [Oryza sativa]
  misc_feature (1)..(123): NCBI GI NO: 15485720 NR Description: selenium binding protein [Medicago sativa]
  misc_feature (1)..(123): NCBI GI NO: 15485722 NR Description: selenium binding protein [Glycine max]
  misc_feature (1)..(123): NCBI GI NO: 13605825 NR Description: AT4g14040/dl3061c [Arabidopsis thaliana]
  misc_feature (1)..(123): NCBI GI NO: 15236386 NR Description: selenium-binding protein like
  misc_feature (1)..(123): NCBI GI NO: 22530900 NR Description: selenium-binding protein-like protein
  misc_feature (1)..(123): NCBI GI NO: 25348077 NR Description: selenium-binding protein like
  misc_feature (1)..(123): NCBI GI NO: 7488184 NR Description: probable selenium-binding protein - Arabidopsisthaliana
  misc_feature (1)..(123): NCBI GI NO: 15485716 NR Description: selenium binding protein [Lotus japonicus]
  misc_feature (67)..(67): Xaa is any aa, unknown or other
MEKGPREKLVYVTCVYNGTGINKPDYLATVDLDPSSPTYSQVIHRLPVTHIGDELHHSGWNSCSSCXGDPSAKRRFLILPSLLSGRVYVVDTATDPRAPSLHKVVESEDIAENTGLGFPSHVSLPCVWRHYDF

SEQ ID NO: 38962 - DNA, 1851 bp, Zea mays subsp. mays
  misc_feature (1)..(1851): Ceres Seq. ID no. 12361706
acttttgaaaatagttttgtgctctcaaggcaaaagagcacacttgactcttgctcgcctctctcactcactctctcactcaagctccagtcacacactctctctagctctctgccactccgtccattgggctggactggactggaggcatggccattccattgctagctccagcgcgctccaacggcagcaggccgctggcgctggcgctggtgctcgtcgccgcggccgcgctgtgccgtccgggtgcttgcgacgacggagccgccgccgccgcggacaggatcaggcggctcccgggggagccggaggtgagcttcgcccagtactcgggctacgtcgccgtggacagcggcggcggcaagcgcgccctgttctactacttcgtggaggccgacgtcgtggaccccgcctccaagcctctcgtcctctggctcaacggcgggcctgggtgctcgtccctgggcgtaggcgccttctcagagaacgggccgttcaggcctagtggccaggtgctggtcaagaacgaatacagctggaacaaagaggccaatgtgatatacctggagacgccggctggtgttggctactcctactctgctgatgctgcttactaccagggcgtggatgacaagatgacagccatggacaacatggtgttcctgcaaaggtggctccaaaagttcccacagtacaagggcagagacctctacatcgctggagagagctacgcagggcactacatcccgcaactcgcggaggccatggtggagttcaacaagaaggacaggatcttcaacctcagaggcgtcgctctgggcaaccctgtgctggaattcgcgacggacttcaacgcccgcgccgagtacttctggtcgcacggcctcatctccgacgccacctaccgcgtgttcacctccgcctgcaactactcccgctacgtcaccgagtactacggcggctcgctgtcgccgctgtgcgcccgggtgatgaaccaggtgacgcgcgagaccagccgcttcgtcgacaagtacgacgtcacgctcgacgtctgcctctcgtcggtgctctctcagtccaagatcctctcgccgcacgagcaggtcgggcagcggatcgacgtgtgcgtggaggacgagacggtgaggtacctcaaccgccgggacgtgcaggcggcgctgcacgcgaggctcgtcggcgtcgacaagtgggcggtctgcagcagcgttctcgagtacgagctgctcaacctgcagatcccgaccatcaacgtcgtcggatcgctcgtgaaatcgggcatccgagtgctcgtttacagcggcgaccaggactcggtgatccctctgacgggcagccggacgctggtgcagaacctggcgcgcgacatgggcctcaagaccaccaccccgtaccgggtgtggttcgaagggcagcaggtcggaggatggacgcaggtgtacggaggcggcgcgctgtccttcgccaccatcaggggcgcctcccacgaggcgcccttctcgcagcccgggcgctcgctcgttctcttcagggcgttcctgcagggccagcctctgcctgaaaccttctcgtgatcagggtgctcgatgcagctccttctgcaggtggggtggggggttttgcactgtagtaatctgtaaggaggtgtttggtgtgtctgcctcctggctcctgctagctgatgatactagtggtttggtttggcgccgcggtaggagtaggagcgagcgagcggccggcgctgttcgaggtctgtgctccgtgtttctacagcgtccgtccatggctcggcaattgcctaaagaagcggaaaggatttgtccctcgtttcgt

SEQ ID NO: 38963 - protein, 480 aa, Zea mays subsp. mays
  peptide (1)..(480): Ceres Seq. ID no. 12361707
  misc_feature (50)..(472): Pfam Name: Pfam Description:  Serine carboxypeptidase
  misc_feature (43)..(479): NCBI GI NO: 18396647 NR Description: serine carboxypeptidase II, putative
  misc_feature (43)..(479): NCBI GI NO: 25289785 NR Description: probable serine carboxypeptidase II
  misc_feature (24)..(479): NCBI GI NO: 38347156 NR Description: OSJNBa0039C07.2
  misc_feature (43)..(479): NCBI GI NO: 30685740 NR Description: serine carboxypeptidase -related
  misc_feature (43)..(479): NCBI GI NO: 25289793 NR Description: probable serine carboxypeptidase II
  misc_feature (24)..(476): NCBI GI NO: 15218514 NR Description: serine carboxypeptidase II, putative
  misc_feature (44)..(476): NCBI GI NO: 15238328 NR Description: serine carboxypeptidase II-like
  misc_feature (44)..(476): NCBI GI NO: 15238327 NR Description: serine carboxypeptidase-II like
  misc_feature (44)..(476): NCBI GI NO: 15224454 NR Description: putative serine carboxypeptidase II
  misc_feature (44)..(309): NCBI GI NO: 28393789 NR Description: putative serine carboxypeptidase II
MAIPLLAPARSNGSRPLALALVLVAAAALCRPGACDDGAAAAADRIRRLPGEPEVSFAQYSGYVAVDSGGGKRALFYYFVEADVVDPASKPLVLWLNGGPGCSSLGVGAFSENGPFRPSGQVLVKNEYSWNKEANVIYLETPAGVGYSYSADAAYYQGVDDKMTAMDNMVFLQRWLQKFPQYKGRDLYIAGESYAGHYIPQLAEAMVEFNKKDRIFNLRGVALGNPVLEFATDFNARAEYFWSHGLISDATYRVFTSACNYSRYVTEYYGGSLSPLCARVMNQVTRETSRFVDKYDVTLDVCLSSVLSQSKILSPHEQVGQRIDVCVEDETVRYLNRRDVQAALHARLVGVDKWAVCSSVLEYELLNLQIPTINVVGSLVKSGIRVLVYSGDQDSVIPLTGSRTLVQNLARDMGLKTTTPYRVWFEGQQVGGWTQVYGGGALSFATIRGASHEAPFSQPGRSLVLFRAFLQGQPLPETFS

SEQ ID NO: 38964 - protein, 318 aa, Zea mays subsp. mays
  peptide (1)..(318): Ceres Seq. ID no. 12361708
  misc_feature (1)..(310): Pfam Name: Pfam Description:  Serine carboxypeptidase
  misc_feature (1)..(317): NCBI GI NO: 18396647 NR Description: serine carboxypeptidase II, putative
  misc_feature (1)..(317): NCBI GI NO: 25289785 NR Description: probable serine carboxypeptidase II
  misc_feature (1)..(317): NCBI GI NO: 38347156 NR Description: OSJNBa0039C07.2
  misc_feature (1)..(317): NCBI GI NO: 30685740 NR Description: serine carboxypeptidase -related
  misc_feature (1)..(317): NCBI GI NO: 25289793 NR Description: probable serine carboxypeptidase II
  misc_feature (1)..(314): NCBI GI NO: 15218514 NR Description: serine carboxypeptidase II, putative
  misc_feature (1)..(314): NCBI GI NO: 15238328 NR Description: serine carboxypeptidase II-like
  misc_feature (1)..(314): NCBI GI NO: 15238327 NR Description: serine carboxypeptidase-II like
  misc_feature (1)..(314): NCBI GI NO: 15224454 NR Description: putative serine carboxypeptidase II
  misc_feature (1)..(147): NCBI GI NO: 28393789 NR Description: putative serine carboxypeptidase II
MTAMDNMVFLQRWLQKFPQYKGRDLYIAGESYAGHYIPQLAEAMVEFNKKDRIFNLRGVALGNPVLEFATDFNARAEYFWSHGLISDATYRVFTSACNYSRYVTEYYGGSLSPLCARVMNQVTRETSRFVDKYDVTLDVCLSSVLSQSKILSPHEQVGQRIDVCVEDETVRYLNRRDVQAALHARLVGVDKWAVCSSVLEYELLNLQIPTINVVGSLVKSGIRVLVYSGDQDSVIPLTGSRTLVQNLARDMGLKTTTPYRVWFEGQQVGGWTQVYGGGALSFATIRGASHEAPFSQPGRSLVLFRAFLQGQPLPETFS

SEQ ID NO: 38965 - protein, 315 aa, Zea mays subsp. mays
  peptide (1)..(315): Ceres Seq. ID no. 12361709
  misc_feature (1)..(307): Pfam Name: Pfam Description:  Serine carboxypeptidase
  misc_feature (1)..(314): NCBI GI NO: 18396647 NR Description: serine carboxypeptidase II, putative
  misc_feature (1)..(314): NCBI GI NO: 25289785 NR Description: probable serine carboxypeptidase II
  misc_feature (1)..(314): NCBI GI NO: 38347156 NR Description: OSJNBa0039C07.2
  misc_feature (1)..(314): NCBI GI NO: 30685740 NR Description: serine carboxypeptidase -related
  misc_feature (1)..(314): NCBI GI NO: 25289793 NR Description: probable serine carboxypeptidase II
  misc_feature (1)..(311): NCBI GI NO: 15218514 NR Description: serine carboxypeptidase II, putative
  misc_feature (1)..(311): NCBI GI NO: 15238328 NR Description: serine carboxypeptidase II-like
  misc_feature (1)..(311): NCBI GI NO: 15238327 NR Description: serine carboxypeptidase-II like
  misc_feature (1)..(311): NCBI GI NO: 15224454 NR Description: putative serine carboxypeptidase II
  misc_feature (1)..(144): NCBI GI NO: 28393789 NR Description: putative serine carboxypeptidase II
MDNMVFLQRWLQKFPQYKGRDLYIAGESYAGHYIPQLAEAMVEFNKKDRIFNLRGVALGNPVLEFATDFNARAEYFWSHGLISDATYRVFTSACNYSRYVTEYYGGSLSPLCARVMNQVTRETSRFVDKYDVTLDVCLSSVLSQSKILSPHEQVGQRIDVCVEDETVRYLNRRDVQAALHARLVGVDKWAVCSSVLEYELLNLQIPTINVVGSLVKSGIRVLVYSGDQDSVIPLTGSRTLVQNLARDMGLKTTTPYRVWFEGQQVGGWTQVYGGGALSFATIRGASHEAPFSQPGRSLVLFRAFLQGQPLPETFS

SEQ ID NO: 38966 - DNA, 2537 bp, Zea mays subsp. mays
  misc_feature (1)..(2537): Ceres Seq. ID no. 12417396
  misc_feature (685)..(685): n is a, c, t, g, unknown, or other
  misc_feature (621)..(621): n is a, c, t, g, unknown, or other
  misc_feature (549)..(549): n is a, c, t, g, unknown, or other
  misc_feature (554)..(554): n is a, c, t, g, unknown, or other
  misc_feature (492)..(492): n is a, c, t, g, unknown, or other
  misc_feature (1989)..(1989): n is a, c, t, g, unknown, or other
  misc_feature (726)..(726): n is a, c, t, g, unknown, or other
  misc_feature (567)..(567): n is a, c, t, g, unknown, or other
  misc_feature (363)..(363): n is a, c, t, g, unknown, or other
  misc_feature (560)..(560): n is a, c, t, g, unknown, or other
  misc_feature (320)..(320): n is a, c, t, g, unknown, or other
  misc_feature (583)..(583): n is a, c, t, g, unknown, or other
  misc_feature (318)..(318): n is a, c, t, g, unknown, or other
  misc_feature (725)..(725): n is a, c, t, g, unknown, or other
  misc_feature (525)..(525): n is a, c, t, g, unknown, or other
  misc_feature (96)..(96): n is a, c, t, g, unknown, or other
  misc_feature (609)..(609): n is a, c, t, g, unknown, or other
  misc_feature (301)..(301): n is a, c, t, g, unknown, or other
  misc_feature (300)..(300): n is a, c, t, g, unknown, or other
  misc_feature (553)..(553): n is a, c, t, g, unknown, or other
  misc_feature (561)..(561): n is a, c, t, g, unknown, or other
  misc_feature (569)..(569): n is a, c, t, g, unknown, or other
  misc_feature (361)..(361): n is a, c, t, g, unknown, or other
  misc_feature (396)..(396): n is a, c, t, g, unknown, or other
  misc_feature (316)..(316): n is a, c, t, g, unknown, or other
  misc_feature (568)..(568): n is a, c, t, g, unknown, or other
  misc_feature (319)..(319): n is a, c, t, g, unknown, or other
  misc_feature (317)..(317): n is a, c, t, g, unknown, or other
  misc_feature (507)..(507): n is a, c, t, g, unknown, or other
attgaccaatctgctccgggcaccatggagaggatcagtggcccgcgcctcgctgtcctgctcgctctcgccgtcctcaccgccgtcgccgcagcnaccacggacgaggtgcgcgcgcagtccacctacatcatccacctcgccccaggccacccggcgctgtccgcagcgcgcgacaacggcggcgacgaggcggccctccgccgcctcctcccgcgccgcctgcgcgcgccgaggccgcgcgtgctctactcctaccagcacgctgccacgggcatcgccgcgcggctcacgccccannaggcggcgcacgccnnnnncggggagggcgtcctggccgtgtaccccgaccaggcgcggnanctgcacaccacccacaccccggcgttcctccgnctaacggaggccgccgggctcctcccggctgcgacggggggcgcgtcgtcgtctgccgtcgtcggcgtgctcgacaccgggctctaccccatcggncggtcctcgttcgcngcagcggatggtctcggnccggcgcccgcgtccttctctggngganncgtctnngcgggnnncttcaacgcgtccncctactgcaacagcaagctcatcggngccaagttcttntaccaggggtacgaagctgctctcggccaccccatcgatgagaccaaggagtcgaagtcgccgntggacactgagggccatggcacgcacaccgcctccactgnngctggctcgccggtggccggagccgggttctttgactacgccgaggggcaggccgtgggcatggaccccggtgcgcgcatcgcggcgtacaagatctgctggacgtctggatgctacgactccgatatcctcgctgccatggacgaggccgtcgctgacggcgtcgacgtcatctcgctctccgtcggcgccaacgggtacgcccccagcttcttcaccgattccatcgccatcggcgctttccacgcggtaagcaagggcatcgtcgtctcctgctccgccggcaactccggccccggcgagtacaccgccgtcaacattgcgccgtggatcctgaccgtcggcgcgtccaccatcgaccgcgagttccccgccgatgtggttctcggcgacggccgcgtctttggtggtgtctctctgtatgccggtgaccccctggactccactcagttgcctctggtgttcgccggggactgtggttcccctctgtgcctaatgggcgagctcgactcgaagaaggtggccggcaagatggtgctctgtctgcgtggtaacaacgctcgtgtcgagaaaggagcagcagtcaagctcgccggtggggtcggaatgatcctcgccaacaccgaggagagcggggaggagctcatcgccgactcccacctcgtgccggcgactatggtcgggcagaagttcggcgacaagatcaggtactacgtccagacggacccgtcgccaacggcgaccatcgtgttccgcggcacagtcatcggcaagtcgccgtccgcgcctcgagtggcggcgttctcgagccgaggccccaactaccgcgcaccggagatcctcaagcccgacgtcatcgccccaggcgtcaacatactcgcggcgtggaccggcgccgcctcccccaccgacctggacatcgactcgaggcgcgtggagttcaacatcatctccggcacgtccatgtcctgcccgcacgtgagcggcctcgccgcgctgctccgccaggcgcaccctgagtggagccccgcggcgatcaagtcggcgctcatgaccacggcgtacaacctggacaactccgggggaaccatcaaggacctcgctacgggcgtggagtcgacgccgttcgtccgtggcgccggtcacgtcgaccccaacgccgccctcgacccagggctggtgtacgacgccggctccgacgactacgtcgccttcctctgcacgctcgggtactctccgtcgttgatctccatcttcacgcangacgcgtcggtcgccgactgctcgacgaaaattcgctcgccccggcgaccttaactaccctgccttcgccgccgtcttctcctcctaccaagactcggtcacctaccgccgggtggtgcgcaacgtcggcagcaactccagcgcggtgtaccagccgacgatcgccagcccgtacggcgtggatgtcacggtgactccgagcaagctcgcgttcgacgggaagcagcagagcctgggatacgagatcaccatcgcagtgtcaggcaacccggtgatcgtggattccagctactcgttcggatccatcacctggagcgacggcgcgcacgacgtcacgagccccattgccgtgacctggccgtccaacggtggagcagcagccatgtagtagactgatgctgttgctactgtctaccgctgtgggaagaaggacagggccatgagcccatgagatccgaaatctccacgcctcctgcctgccataggaataatttactcgactgaaccacgcaataattcagctgcccctatcgtggttgtggtggacc

SEQ ID NO: 38967 - protein, 680 aa, Zea mays subsp. mays
  peptide (1)..(680): Ceres Seq. ID no. 12417397
  misc_feature (152)..(362): Pfam Name: Pfam Description:  Subtilase family
  misc_feature (42)..(676): NCBI GI NO: 22331076 NR Description: subtilisin-like serine protease, putative
  misc_feature (12)..(660): NCBI GI NO: 18425181 NR Description: subtilisin-like serine protease ARA12
  misc_feature (12)..(660): NCBI GI NO: 20147211 NR Description: AT5g67360/K8K14_8 [Arabidopsis thaliana]
  misc_feature (40)..(660): NCBI GI NO: 1076414 NR Description: subtilisin-like proteinase (EC 3
  misc_feature (14)..(671): NCBI GI NO: 14488360 NR Description: putative serine protease
  misc_feature (16)..(660): NCBI GI NO: 7435657 NR Description: subtilisin-like proteinase (EC 3
  misc_feature (82)..(677): NCBI GI NO: 18396193 NR Description: subtilisin-like serine protease, putative
  misc_feature (77)..(662): NCBI GI NO: 18418552 NR Description: subtilisin-like serine protease
  misc_feature (81)..(677): NCBI GI NO: 7435656 NR Description: subtilisin-like proteinase (EC 3
  misc_feature (15)..(677): NCBI GI NO: 18423316 NR Description: subtilisin-like serine protease
  misc_feature (32)..(32): Xaa is any aa, unknown or other
  misc_feature (100)..(100): Xaa is any aa, unknown or other
  misc_feature (101)..(101): Xaa is any aa, unknown or other
  misc_feature (106)..(106): Xaa is any aa, unknown or other
  misc_feature (107)..(107): Xaa is any aa, unknown or other
  misc_feature (121)..(121): Xaa is any aa, unknown or other
  misc_feature (132)..(132): Xaa is any aa, unknown or other
  misc_feature (164)..(164): Xaa is any aa, unknown or other
  misc_feature (169)..(169): Xaa is any aa, unknown or other
  misc_feature (175)..(175): Xaa is any aa, unknown or other
  misc_feature (183)..(183): Xaa is any aa, unknown or other
  misc_feature (185)..(185): Xaa is any aa, unknown or other
  misc_feature (187)..(187): Xaa is any aa, unknown or other
  misc_feature (189)..(189): Xaa is any aa, unknown or other
  misc_feature (190)..(190): Xaa is any aa, unknown or other
  misc_feature (195)..(195): Xaa is any aa, unknown or other
  misc_feature (203)..(203): Xaa is any aa, unknown or other
  misc_feature (207)..(207): Xaa is any aa, unknown or other
  misc_feature (229)..(229): Xaa is any aa, unknown or other
  misc_feature (242)..(242): Xaa is any aa, unknown or other
  misc_feature (663)..(663): Xaa is any aa, unknown or other
IDQSAPGTMERISGPRLAVLLALAVLTAVAAXTTDEVRAQSTYIIHLAPGHPALSAARDNGGDEAALRRLLPRRLRAPRPRVLYSYQHAATGIAARLTPXXAAHAXXGEGVLAVYPDQARXLHTTHTPAFLXLTEAAGLLPAATGGASSSAVVGVLDTGLYPIXRSSFXAADGLXPAPASFSXGXVXAXXFNASXYCNSKLIXAKFXYQGYEAALGHPIDETKESKSPXDTEGHGTHTASTXAGSPVAGAGFFDYAEGQAVGMDPGARIAAYKICWTSGCYDSDILAAMDEAVADGVDVISLSVGANGYAPSFFTDSIAIGAFHAVSKGIVVSCSAGNSGPGEYTAVNIAPWILTVGASTIDREFPADVVLGDGRVFGGVSLYAGDPLDSTQLPLVFAGDCGSPLCLMGELDSKKVAGKMVLCLRGNNARVEKGAAVKLAGGVGMILANTEESGEELIADSHLVPATMVGQKFGDKIRYYVQTDPSPTATIVFRGTVIGKSPSAPRVAAFSSRGPNYRAPEILKPDVIAPGVNILAAWTGAASPTDLDIDSRRVEFNIISGTSMSCPHVSGLAALLRQAHPEWSPAAIKSALMTTAYNLDNSGGTIKDLATGVESTPFVRGAGHVDPNAALDPGLVYDAGSDDYVAFLCTLGYSPSLISIFTXDASVADCSTKIRSPRRP

SEQ ID NO: 38968 - protein, 672 aa, Zea mays subsp. mays
  peptide (1)..(672): Ceres Seq. ID no. 12417398
  misc_feature (144)..(354): Pfam Name: Pfam Description:  Subtilase family
  misc_feature (34)..(668): NCBI GI NO: 22331076 NR Description: subtilisin-like serine protease, putative
  misc_feature (4)..(652): NCBI GI NO: 18425181 NR Description: subtilisin-like serine protease ARA12
  misc_feature (4)..(652): NCBI GI NO: 20147211 NR Description: AT5g67360/K8K14_8 [Arabidopsis thaliana]
  misc_feature (32)..(652): NCBI GI NO: 1076414 NR Description: subtilisin-like proteinase (EC 3
  misc_feature (6)..(663): NCBI GI NO: 14488360 NR Description: putative serine protease
  misc_feature (8)..(652): NCBI GI NO: 7435657 NR Description: subtilisin-like proteinase (EC 3
  misc_feature (74)..(669): NCBI GI NO: 18396193 NR Description: subtilisin-like serine protease, putative
  misc_feature (69)..(654): NCBI GI NO: 18418552 NR Description: subtilisin-like serine protease
  misc_feature (73)..(669): NCBI GI NO: 7435656 NR Description: subtilisin-like proteinase (EC 3
  misc_feature (7)..(669): NCBI GI NO: 18423316 NR Description: subtilisin-like serine protease
  misc_feature (24)..(24): Xaa is any aa, unknown or other
  misc_feature (92)..(92): Xaa is any aa, unknown or other
  misc_feature (93)..(93): Xaa is any aa, unknown or other
  misc_feature (98)..(98): Xaa is any aa, unknown or other
  misc_feature (99)..(99): Xaa is any aa, unknown or other
  misc_feature (113)..(113): Xaa is any aa, unknown or other
  misc_feature (124)..(124): Xaa is any aa, unknown or other
  misc_feature (156)..(156): Xaa is any aa, unknown or other
  misc_feature (161)..(161): Xaa is any aa, unknown or other
  misc_feature (167)..(167): Xaa is any aa, unknown or other
  misc_feature (175)..(175): Xaa is any aa, unknown or other
  misc_feature (177)..(177): Xaa is any aa, unknown or other
  misc_feature (179)..(179): Xaa is any aa, unknown or other
  misc_feature (181)..(181): Xaa is any aa, unknown or other
  misc_feature (182)..(182): Xaa is any aa, unknown or other
  misc_feature (187)..(187): Xaa is any aa, unknown or other
  misc_feature (195)..(195): Xaa is any aa, unknown or other
  misc_feature (199)..(199): Xaa is any aa, unknown or other
  misc_feature (221)..(221): Xaa is any aa, unknown or other
  misc_feature (234)..(234): Xaa is any aa, unknown or other
  misc_feature (655)..(655): Xaa is any aa, unknown or other
MERISGPRLAVLLALAVLTAVAAXTTDEVRAQSTYIIHLAPGHPALSAARDNGGDEAALRRLLPRRLRAPRPRVLYSYQHAATGIAARLTPXXAAHAXXGEGVLAVYPDQARXLHTTHTPAFLXLTEAAGLLPAATGGASSSAVVGVLDTGLYPIXRSSFXAADGLXPAPASFSXGXVXAXXFNASXYCNSKLIXAKFXYQGYEAALGHPIDETKESKSPXDTEGHGTHTASTXAGSPVAGAGFFDYAEGQAVGMDPGARIAAYKICWTSGCYDSDILAAMDEAVADGVDVISLSVGANGYAPSFFTDSIAIGAFHAVSKGIVVSCSAGNSGPGEYTAVNIAPWILTVGASTIDREFPADVVLGDGRVFGGVSLYAGDPLDSTQLPLVFAGDCGSPLCLMGELDSKKVAGKMVLCLRGNNARVEKGAAVKLAGGVGMILANTEESGEELIADSHLVPATMVGQKFGDKIRYYVQTDPSPTATIVFRGTVIGKSPSAPRVAAFSSRGPNYRAPEILKPDVIAPGVNILAAWTGAASPTDLDIDSRRVEFNIISGTSMSCPHVSGLAALLRQAHPEWSPAAIKSALMTTAYNLDNSGGTIKDLATGVESTPFVRGAGHVDPNAALDPGLVYDAGSDDYVAFLCTLGYSPSLISIFTXDASVADCSTKIRSPRRP

SEQ ID NO: 38969 - protein, 418 aa, Zea mays subsp. mays
  peptide (1)..(418): Ceres Seq. ID no. 12417399
  misc_feature (1)..(100): Pfam Name: Pfam Description:  Subtilase family
  misc_feature (1)..(414): NCBI GI NO: 22331076 NR Description: subtilisin-like serine protease, putative
  misc_feature (1)..(398): NCBI GI NO: 18425181 NR Description: subtilisin-like serine protease ARA12
  misc_feature (1)..(398): NCBI GI NO: 20147211 NR Description: AT5g67360/K8K14_8 [Arabidopsis thaliana]
  misc_feature (1)..(398): NCBI GI NO: 1076414 NR Description: subtilisin-like proteinase (EC 3
  misc_feature (1)..(409): NCBI GI NO: 14488360 NR Description: putative serine protease
  misc_feature (1)..(398): NCBI GI NO: 7435657 NR Description: subtilisin-like proteinase (EC 3
  misc_feature (1)..(415): NCBI GI NO: 18396193 NR Description: subtilisin-like serine protease, putative
  misc_feature (1)..(400): NCBI GI NO: 18418552 NR Description: subtilisin-like serine protease
  misc_feature (1)..(415): NCBI GI NO: 7435656 NR Description: subtilisin-like proteinase (EC 3
  misc_feature (1)..(415): NCBI GI NO: 18423316 NR Description: subtilisin-like serine protease
  misc_feature (401)..(401): Xaa is any aa, unknown or other
MDPGARIAAYKICWTSGCYDSDILAAMDEAVADGVDVISLSVGANGYAPSFFTDSIAIGAFHAVSKGIVVSCSAGNSGPGEYTAVNIAPWILTVGASTIDREFPADVVLGDGRVFGGVSLYAGDPLDSTQLPLVFAGDCGSPLCLMGELDSKKVAGKMVLCLRGNNARVEKGAAVKLAGGVGMILANTEESGEELIADSHLVPATMVGQKFGDKIRYYVQTDPSPTATIVFRGTVIGKSPSAPRVAAFSSRGPNYRAPEILKPDVIAPGVNILAAWTGAASPTDLDIDSRRVEFNIISGTSMSCPHVSGLAALLRQAHPEWSPAAIKSALMTTAYNLDNSGGTIKDLATGVESTPFVRGAGHVDPNAALDPGLVYDAGSDDYVAFLCTLGYSPSLISIFTXDASVADCSTKIRSPRRP

SEQ ID NO: 38970 - DNA, 2743 bp, Zea mays subsp. mays
  misc_feature (1)..(2743): Ceres Seq. ID no. 12361729
gcacgagaccattacctagaacatcctaatcgaaaagacgaactcatcactgcactggtggtgtccgtggtgctccacagagtgaagcgatagccaggagaggcgacgatgcgcaagtgggcgctctcctccgcgctcctcctcctctttctcctcaccacactccccgacccagctaagaagctacaagtgaatgccgaggagagcagcgatgacttggctaacccacccaaggtagaggagaagcttggtgctgtccctcatggcctgtccaccgactctgaggttgcccagagggaagccgagtctatctctaggaagactctcaggagctcagccgagaagtttgagttccaagctgaggtttccagactcatggacatcatcatcaactcactctacagcaacaaggatatcttcctgagggagctcatatctaatgcctctgatgcgttggataagattaggttcctttcccttactgataaggaagttctgggtgaaggggacactgcaaagcttgagattcagattaagttggacaaagagaagaaaatcctctccattcgggataggggtattggtatgaccaaggaagatcttattaagaaccttggaacgattgctaaatctggcacttcagcttttgtggaaaagatgcagtctggaggtgacctcaatcttattggacagtttggtgttggcttctactctgtgtacttggttgctgactatgttgaagtggtcagcaagcacaatgatgataaacagtatgtgtgggaatcaaaagctgatggatcatttgccatctctgaggatacatggaatgagccccttggccgtggaactgagataagattgcatctgcgagatgaggccaaggagtacttggaagaggataagctaaaggatttggtgaagaagtactctgagttcatcaacttccctatctatttgtggtcgaccaaggaggttgatgttgaagtgccaactgatgaggatgagacaagtgaagaagaggattcaactccagaaactacagaggaagagacagaagaagacgaagacgaagagaaagagaaaaagcccaagaccaagacaataaaggagactacttctgagtgggaacttctgaatgatgtgaaggctgtatggcttcgcagcccaaaggaggttactgatgaagaatactcgaagttttaccactcactagccaaggacttcggtgatgacaagcctatgggttggagccacttcactgccgaaggagatgttgagttcaaagctttgctctttattcccccgaaggctccacatgatctctatgagagttactacaacagtaacaagtcaaacctcaagttgtatgttaggagagttttcatctctgacgaatttgatgatcttcttcccaagtacctgagctttttgaagggtattgttgactcggacacgctgcccctgaatgtgtcacgagaaatgcttcaacaacatagcagtctcaagaccatcaagaagaagctgatccgcaaagcccttgacatgatcaggaaacttgctgaagaagaccctgatgagtacagcaacaaggataagacagatgaagagaaaagcgagatggaggagaagaagggccagtacgccaagttctggaatgagtttggcaaatcaatcaagctgggtatcatcgaagacgcgactaacagaaaccgccttgcgaagcttcttagatttgagagtaccaagtcggatggcaaacttgcctcccttgacgagtacatctcacggatgaagtcagggcagaaagacatcttctacatcacgggaagcagcaaagagcagctggagaagtctccattcctcgagaggctaaccaagaagaactacgaggttatcttcttcaccgaccccgtggacgagtacctgatgcagtacctgatggactacgaggacaagaagttccagaacgtgtccaaggagggactgaagctgggcaaggactcgaagctcaaggacctcaaggagtcgttcaaggagctgactgactggtggaagaaggccctggagagtgagaacgtggactcggtgaagatcagcaaccggctgcacgacaccccctgcgtcgtggtcacctccaagtacgggtggagcgccaacatggagaagatcatgcaggcgcagaccctgtcggactcgagcaagcaggcgtacatgcgcggcaagagggtgctggagatcaaccccaggcaccccatcatcaaggagctccgcgacaaggtcgcccaggacaacgagagcgaggagctgaagcacacggcgaggctggtgtaccagacggccctgatggagagcgggttcaacctccccgaccccaaggagttcgcgtccagcatctacaagtcggtgcagaagggcctggacctgagccccgacgcgaccgtggaggaggacgacgaggcagaggagcagccggaggtggaggagaaggagccggagccggagccgtcgtcctacgacaaggacgagctttaggctttcggatttgttttcaagtctagctagctcccgctttactaggaatgtgatgatatcggtgactgcctggttcaagtcacgtgatggttcttgagagacgcccatttttttcccatgcaacgtgatacgggatttttgcctgtctttgtacctactctacaagctttagttcagtgattcagtctaattaattagtggtttgcagttt

SEQ ID NO: 38971 - protein, 807 aa, Zea mays subsp. mays
  peptide (1)..(807): Ceres Seq. ID no. 12361730
  misc_feature (259)..(803): Pfam Name: Pfam Description:  Hsp90 protein
  misc_feature (43)..(494): NCBI GI NO: 27803586 NR Description: heat shock protein gp96
  misc_feature (496)..(806): NCBI GI NO: 27803586 NR Description: heat shock protein gp96
  misc_feature (73)..(491): NCBI GI NO: 22086553 NR Description: heat shock protein Hsp90 [Achlya ambisexualis]
  misc_feature (502)..(805): NCBI GI NO: 22086553 NR Description: heat shock protein Hsp90 [Achlya ambisexualis]
  misc_feature (78)..(492): NCBI GI NO: 6016264 NR Description: HEAT SHOCK PROTEIN 90
  misc_feature (502)..(801): NCBI GI NO: 6016264 NR Description: HEAT SHOCK PROTEIN 90
  misc_feature (57)..(491): NCBI GI NO: 15228059 NR Description: putative heat shock protein; protein id:At2g04030
  misc_feature (499)..(798): NCBI GI NO: 15228059 NR Description: putative heat shock protein; protein id:At2g04030
  misc_feature (57)..(491): NCBI GI NO: 20453106 NR Description: At2g04030/F3C11.14 [Arabidopsis thaliana]
  misc_feature (499)..(798): NCBI GI NO: 20453106 NR Description: At2g04030/F3C11.14 [Arabidopsis thaliana]
MRKWALSSALLLLFLLTTLPDPAKKLQVNAEESSDDLANPPKVEEKLGAVPHGLSTDSEVAQREAESISRKTLRSSAEKFEFQAEVSRLMDIIINSLYSNKDIFLRELISNASDALDKIRFLSLTDKEVLGEGDTAKLEIQIKLDKEKKILSIRDRGIGMTKEDLIKNLGTIAKSGTSAFVEKMQSGGDLNLIGQFGVGFYSVYLVADYVEVVSKHNDDKQYVWESKADGSFAISEDTWNEPLGRGTEIRLHLRDEAKEYLEEDKLKDLVKKYSEFINFPIYLWSTKEVDVEVPTDEDETSEEEDSTPETTEEETEEDEDEEKEKKPKTKTIKETTSEWELLNDVKAVWLRSPKEVTDEEYSKFYHSLAKDFGDDKPMGWSHFTAEGDVEFKALLFIPPKAPHDLYESYYNSNKSNLKLYVRRVFISDEFDDLLPKYLSFLKGIVDSDTLPLNVSREMLQQHSSLKTIKKKLIRKALDMIRKLAEEDPDEYSNKDKTDEEKSEMEEKKGQYAKFWNEFGKSIKLGIIEDATNRNRLAKLLRFESTKSDGKLASLDEYISRMKSGQKDIFYITGSSKEQLEKSPFLERLTKKNYEVIFFTDPVDEYLMQYLMDYEDKKFQNVSKEGLKLGKDSKLKDLKESFKELTDWWKKALESENVDSVKISNRLHDTPCVVVTSKYGWSANMEKIMQAQTLSDSSKQAYMRGKRVLEINPRHPIIKELRDKVAQDNESEELKHTARLVYQTALMESGFNLPDPKEFASSIYKSVQKGLDLSPDATVEEDDEAEEQPEVEEKEPEPEPSSYDKDEL

SEQ ID NO: 38972 - protein, 718 aa, Zea mays subsp. mays
  peptide (1)..(718): Ceres Seq. ID no. 12361731
  misc_feature (170)..(714): Pfam Name: Pfam Description:  Hsp90 protein
  misc_feature (1)..(405): NCBI GI NO: 27803586 NR Description: heat shock protein gp96
  misc_feature (407)..(717): NCBI GI NO: 27803586 NR Description: heat shock protein gp96
  misc_feature (1)..(402): NCBI GI NO: 22086553 NR Description: heat shock protein Hsp90 [Achlya ambisexualis]
  misc_feature (413)..(716): NCBI GI NO: 22086553 NR Description: heat shock protein Hsp90 [Achlya ambisexualis]
  misc_feature (1)..(403): NCBI GI NO: 6016264 NR Description: HEAT SHOCK PROTEIN 90
  misc_feature (413)..(712): NCBI GI NO: 6016264 NR Description: HEAT SHOCK PROTEIN 90
  misc_feature (1)..(402): NCBI GI NO: 15228059 NR Description: putative heat shock protein; protein id:At2g04030
  misc_feature (410)..(709): NCBI GI NO: 15228059 NR Description: putative heat shock protein; protein id:At2g04030
  misc_feature (1)..(402): NCBI GI NO: 20453106 NR Description: At2g04030/F3C11.14 [Arabidopsis thaliana]
  misc_feature (410)..(709): NCBI GI NO: 20453106 NR Description: At2g04030/F3C11.14 [Arabidopsis thaliana]
MDIIINSLYSNKDIFLRELISNASDALDKIRFLSLTDKEVLGEGDTAKLEIQIKLDKEKKILSIRDRGIGMTKEDLIKNLGTIAKSGTSAFVEKMQSGGDLNLIGQFGVGFYSVYLVADYVEVVSKHNDDKQYVWESKADGSFAISEDTWNEPLGRGTEIRLHLRDEAKEYLEEDKLKDLVKKYSEFINFPIYLWSTKEVDVEVPTDEDETSEEEDSTPETTEEETEEDEDEEKEKKPKTKTIKETTSEWELLNDVKAVWLRSPKEVTDEEYSKFYHSLAKDFGDDKPMGWSHFTAEGDVEFKALLFIPPKAPHDLYESYYNSNKSNLKLYVRRVFISDEFDDLLPKYLSFLKGIVDSDTLPLNVSREMLQQHSSLKTIKKKLIRKALDMIRKLAEEDPDEYSNKDKTDEEKSEMEEKKGQYAKFWNEFGKSIKLGIIEDATNRNRLAKLLRFESTKSDGKLASLDEYISRMKSGQKDIFYITGSSKEQLEKSPFLERLTKKNYEVIFFTDPVDEYLMQYLMDYEDKKFQNVSKEGLKLGKDSKLKDLKESFKELTDWWKKALESENVDSVKISNRLHDTPCVVVTSKYGWSANMEKIMQAQTLSDSSKQAYMRGKRVLEINPRHPIIKELRDKVAQDNESEELKHTARLVYQTALMESGFNLPDPKEFASSIYKSVQKGLDLSPDATVEEDDEAEEQPEVEEKEPEPEPSSYDKDEL

SEQ ID NO: 38973 - protein, 648 aa, Zea mays subsp. mays
  peptide (1)..(648): Ceres Seq. ID no. 12361732
  misc_feature (100)..(644): Pfam Name: Pfam Description:  Hsp90 protein
  misc_feature (1)..(335): NCBI GI NO: 27803586 NR Description: heat shock protein gp96
  misc_feature (337)..(647): NCBI GI NO: 27803586 NR Description: heat shock protein gp96
  misc_feature (1)..(332): NCBI GI NO: 22086553 NR Description: heat shock protein Hsp90 [Achlya ambisexualis]
  misc_feature (343)..(646): NCBI GI NO: 22086553 NR Description: heat shock protein Hsp90 [Achlya ambisexualis]
  misc_feature (1)..(333): NCBI GI NO: 6016264 NR Description: HEAT SHOCK PROTEIN 90
  misc_feature (343)..(642): NCBI GI NO: 6016264 NR Description: HEAT SHOCK PROTEIN 90
  misc_feature (1)..(332): NCBI GI NO: 15228059 NR Description: putative heat shock protein; protein id:At2g04030
  misc_feature (340)..(639): NCBI GI NO: 15228059 NR Description: putative heat shock protein; protein id:At2g04030
  misc_feature (1)..(332): NCBI GI NO: 20453106 NR Description: At2g04030/F3C11.14 [Arabidopsis thaliana]
  misc_feature (340)..(639): NCBI GI NO: 20453106 NR Description: At2g04030/F3C11.14 [Arabidopsis thaliana]
MTKEDLIKNLGTIAKSGTSAFVEKMQSGGDLNLIGQFGVGFYSVYLVADYVEVVSKHNDDKQYVWESKADGSFAISEDTWNEPLGRGTEIRLHLRDEAKEYLEEDKLKDLVKKYSEFINFPIYLWSTKEVDVEVPTDEDETSEEEDSTPETTEEETEEDEDEEKEKKPKTKTIKETTSEWELLNDVKAVWLRSPKEVTDEEYSKFYHSLAKDFGDDKPMGWSHFTAEGDVEFKALLFIPPKAPHDLYESYYNSNKSNLKLYVRRVFISDEFDDLLPKYLSFLKGIVDSDTLPLNVSREMLQQHSSLKTIKKKLIRKALDMIRKLAEEDPDEYSNKDKTDEEKSEMEEKKGQYAKFWNEFGKSIKLGIIEDATNRNRLAKLLRFESTKSDGKLASLDEYISRMKSGQKDIFYITGSSKEQLEKSPFLERLTKKNYEVIFFTDPVDEYLMQYLMDYEDKKFQNVSKEGLKLGKDSKLKDLKESFKELTDWWKKALESENVDSVKISNRLHDTPCVVVTSKYGWSANMEKIMQAQTLSDSSKQAYMRGKRVLEINPRHPIIKELRDKVAQDNESEELKHTARLVYQTALMESGFNLPDPKEFASSIYKSVQKGLDLSPDATVEEDDEAEEQPEVEEKEPEPEPSSYDKDEL

SEQ ID NO: 38974 - DNA, 2830 bp, Zea mays subsp. mays; identical to SEQ ID NO: 24215
  misc_feature (1)..(2830): Ceres Seq. ID no. 12362942

SEQ ID NO: 38975 - protein, 844 aa, Zea mays subsp. mays; identical to SEQ ID NO: 24216
  peptide (1)..(844): Ceres Seq. ID no. 12362943
  misc_feature (6)..(729): Pfam Name: Pfam Description:  Glycosyl hydrolases family 35
  misc_feature (25)..(844): NCBI GI NO: 7939621 NR Description: beta-galactosidase [Lycopersicon esculentum]
  misc_feature (6)..(734): NCBI GI NO: 15242897 NR Description: glycosyl hydrolase family 35
  misc_feature (6)..(734): NCBI GI NO: 6686892 NR Description: putative beta-galactosidase [Arabidopsis thaliana]
  misc_feature (1)..(844): NCBI GI NO: 6686888 NR Description: putative beta-galactosidase [Arabidopsis thaliana]
  misc_feature (14)..(844): NCBI GI NO: 25326167 NR Description: probable beta-galactosidase
  misc_feature (5)..(843): NCBI GI NO: 14970841 NR Description: beta-galactosidase [Fragaria x ananassa]
  misc_feature (26)..(844): NCBI GI NO: 7939623 NR Description: putative beta-galactosidase
  misc_feature (375)..(844): NCBI GI NO: 18403090 NR Description: glycosyl hydrolase family 35
  misc_feature (1)..(437): NCBI GI NO: 18403090 NR Description: glycosyl hydrolase family 35
  misc_feature (13)..(844): NCBI GI NO: 15081596 NR Description: putative beta-galactosidase BG1 [Vitis vinifera]

SEQ ID NO: 38976 - protein, 786 aa, Zea mays subsp. mays; identical to SEQ ID NO: 24217
  peptide (1)..(786): Ceres Seq. ID no. 12362944
  misc_feature (1)..(671): Pfam Name: Pfam Description:  Glycosyl hydrolases family 35
  misc_feature (1)..(786): NCBI GI NO: 7939621 NR Description: beta-galactosidase [Lycopersicon esculentum]
  misc_feature (1)..(676): NCBI GI NO: 15242897 NR Description: glycosyl hydrolase family 35
  misc_feature (1)..(676): NCBI GI NO: 6686892 NR Description: putative beta-galactosidase [Arabidopsis thaliana]
  misc_feature (1)..(786): NCBI GI NO: 6686888 NR Description: putative beta-galactosidase [Arabidopsis thaliana]
  misc_feature (1)..(786): NCBI GI NO: 25326167 NR Description: probable beta-galactosidase
  misc_feature (1)..(785): NCBI GI NO: 14970841 NR Description: beta-galactosidase [Fragaria x ananassa]
  misc_feature (1)..(786): NCBI GI NO: 7939623 NR Description: putative beta-galactosidase
  misc_feature (317)..(786): NCBI GI NO: 18403090 NR Description: glycosyl hydrolase family 35
  misc_feature (1)..(379): NCBI GI NO: 18403090 NR Description: glycosyl hydrolase family 35
  misc_feature (1)..(786): NCBI GI NO: 15081596 NR Description: putative beta-galactosidase BG1 [Vitis vinifera]

SEQ ID NO: 38977 - protein, 692 aa, Zea mays subsp. mays; identical to SEQ ID NO: 24218
  peptide (1)..(692): Ceres Seq. ID no. 12362945
  misc_feature (1)..(577): Pfam Name: Pfam Description:  Glycosyl hydrolases family 35
  misc_feature (1)..(692): NCBI GI NO: 7939621 NR Description: beta-galactosidase [Lycopersicon esculentum]
  misc_feature (1)..(582): NCBI GI NO: 15242897 NR Description: glycosyl hydrolase family 35
  misc_feature (1)..(582): NCBI GI NO: 6686892 NR Description: putative beta-galactosidase [Arabidopsis thaliana]
  misc_feature (1)..(692): NCBI GI NO: 6686888 NR Description: putative beta-galactosidase [Arabidopsis thaliana]
  misc_feature (1)..(692): NCBI GI NO: 25326167 NR Description: probable beta-galactosidase
  misc_feature (1)..(691): NCBI GI NO: 14970841 NR Description: beta-galactosidase [Fragaria x ananassa]
  misc_feature (1)..(692): NCBI GI NO: 7939623 NR Description: putative beta-galactosidase
  misc_feature (223)..(692): NCBI GI NO: 18403090 NR Description: glycosyl hydrolase family 35
  misc_feature (1)..(285): NCBI GI NO: 18403090 NR Description: glycosyl hydrolase family 35
  misc_feature (1)..(692): NCBI GI NO: 15081596 NR Description: putative beta-galactosidase BG1 [Vitis vinifera]

SEQ ID NO: 38978 - DNA, 2222 bp, Zea mays subsp. mays
  misc_feature (1)..(2222): Ceres Seq. ID no. 12417404
gcacgagaccattacctagaacatcctaatcgaaaacacatactctgctgctgctaagtggtggcatctcgtttaggcgagatccccctcctcccccgctttccactcctctcctccaccctagtcgactccttccctgcaatccgctggccggctcacagtaccagaggagtccaccggaggagctcagctagactccaccctggtggctcgatcggcaccggccgctgcctgcgagactccgccagcgcgcgatgtaccgggtgaagagcgagggcgagggcgagggcgagggcgactgcgaaatgatgctgcaggaacagatggactcgctggtggccgacgacgtcagcagcggaggagggtcgcctcacaggggcgtcggcacgcccctgaagaaggggccatggacgtccgcggaggacgccatcctggtggactacgttaagaagaacggcgaaggcaactggaacgcggtgcagaagaacaccgggctgttccgctgcggcaagagctgccgcctccggtgggcgaaccacctcaggcccaacctcaagaagggggccttcacccccgaggaggagcgcctcatcatccagctccacgccaagatggggaacaagtgggcgaggatggctggtcacttgccagggcgtactgacaatgagatcaagaactactggaacactcgaataaagagatgtcaacgagctagccttcctatttatcctgctagtgtatgcaatcaatctacaaatgaagatcagcaactgtctggtaattttaacggtggcgagaatatatccaatgatcttctatctgggaacagcctttatctgccagattttaccagtgacaatttcattgcgaacccagaggctttatcctatgcaccacagttgtcagctgtttcaataagcaatttgctcggccaaagctttgcatcaaaaagttgtagcttcatggatcaggttgaccaagcggggatgctgaaacaatctggctgtgtgcttcctgcattgagcgatgccattgacagtgtgctttcctcagctgatcatttttcaaatgactctgagaagctcaggcaggctttaggttttgattatctaaatgaagccaatgctagcagcaagagtattgcacctttcggggttgcacttactggcagccatgcctttttaaatggcaatttctctgcttctaggcccacaaatggtcctttgaagatggagctcccttcactccaagatactgaatctgatccaaatagctggctcaagtatactgtggctcctgcaatgcagcctactgaattagtagatccttacctgcagtctccatcagcgaccccttcagtgaaatctgagtgtgcatcgccgaggaacagtggtcttttggaagagctgcttcatgaagctcaggcactaagatctgggaagaaccaacaatcatcggtccgaagttcaagttcttctgctggcacaccttatgagactaccacggtggttagcccagagtttgatatgggtcaggaatattgggaagaacagcccagttctttcctcagtgaatatgctcattttagtggaaattctttcactgaatccactcctcctgttagtgctgcgtcacctgatatcttccagctctccaagatttctcctgcacaaagcccttcaatgggctctggcgagcaggcgttagagcctaaacatgagtcggcagcttcacctcgtcctgaaaacttgaggcctgatgcattattctctgggaacacagccgatccatccattttcaataatgccatagccatgctcctgggcaatggcattgatgccgagtacaaacctgttcttggtgatggaattgtgctcgattcttcgtcatggaacaacatgcaacatgcttttcagatggcgggattcaaatgagttccatgcacttgtttgtgatgctgaagggcttcttgttgcttgttttggggtcagtatcagcgaaggccgcattgattgtgacgctgcattcctgacagagggcgtgcaggtgcagcagctaccatatgtgatcttcatgctaatagtccttttgtctaataaagtgcatgaagataaaccggatatttttttttgctttgtattagagaaccgtttttgtcaaccctgtcaggattctgttggaaatgtgtcatgatttttgtttgaacaatttaatatctgtcg

SEQ ID NO: 38979 - protein, 559 aa, Zea mays subsp. mays
  peptide (1)..(559): Ceres Seq. ID no. 12417405
  misc_feature (49)..(96): Pfam Name: Pfam Description:  Myb-like DNA-binding domain
  misc_feature (1)..(559): NCBI GI NO: 7438356 NR Description: myb-related transcription factor - rice
  misc_feature (1)..(559): NCBI GI NO: 34909188 NR Description: myb-related transcription factor
  misc_feature (1)..(556): NCBI GI NO: 7438355 NR Description: myb-related protein - barley
  misc_feature (1)..(556): NCBI GI NO: 13236696 NR Description: transcription factor GAMyb [Hordeum vulgare]
  misc_feature (1)..(556): NCBI GI NO: 4877649 NR Description: gibberellin MYB transcription factor
  misc_feature (1)..(556): NCBI GI NO: 4581969 NR Description: myb protein [Avena sativa]
  misc_feature (326)..(556): NCBI GI NO: 2369878 NR Description: m12 [Hordeum vulgare]
  misc_feature (38)..(199): NCBI GI NO: 8247759 NR Description: GAMyb protein [Triticum aestivum]
  misc_feature (25)..(549): NCBI GI NO: 15229748 NR Description: Myb DNA-binding protein, putative
  misc_feature (25)..(455): NCBI GI NO: 15239926 NR Description: MYB family transcription factor-like
MYRVKSEGEGEGEGDCEMMLQEQMDSLVADDVSSGGGSPHRGVGTPLKKGPWTSAEDAILVDYVKKNGEGNWNAVQKNTGLFRCGKSCRLRWANHLRPNLKKGAFTPEEERLIIQLHAKMGNKWARMAGHLPGRTDNEIKNYWNTRIKRCQRASLPIYPASVCNQSTNEDQQLSGNFNGGENISNDLLSGNSLYLPDFTSDNFIANPEALSYAPQLSAVSISNLLGQSFASKSCSFMDQVDQAGMLKQSGCVLPALSDAIDSVLSSADHFSNDSEKLRQALGFDYLNEANASSKSIAPFGVALTGSHAFLNGNFSASRPTNGPLKMELPSLQDTESDPNSWLKYTVAPAMQPTELVDPYLQSPSATPSVKSECASPRNSGLLEELLHEAQALRSGKNQQSSVRSSSSSAGTPYETTTVVSPEFDMGQEYWEEQPSSFLSEYAHFSGNSFTESTPPVSAASPDIFQLSKISPAQSPSMGSGEQALEPKHESAASPRPENLRPDALFSGNTADPSIFNNAIAMLLGNGIDAEYKPVLGDGIVLDSSSWNNMQHAFQMAGFK

SEQ ID NO: 38980 - protein, 542 aa, Zea mays subsp. mays
  peptide (1)..(542): Ceres Seq. ID no. 12417406
  misc_feature (32)..(79): Pfam Name: Pfam Description:  Myb-like DNA-binding domain
  misc_feature (1)..(542): NCBI GI NO: 7438356 NR Description: myb-related transcription factor - rice
  misc_feature (1)..(542): NCBI GI NO: 34909188 NR Description: myb-related transcription factor
  misc_feature (1)..(539): NCBI GI NO: 7438355 NR Description: myb-related protein - barley
  misc_feature (1)..(539): NCBI GI NO: 13236696 NR Description: transcription factor GAMyb [Hordeum vulgare]
  misc_feature (1)..(539): NCBI GI NO: 4877649 NR Description: gibberellin MYB transcription factor
  misc_feature (1)..(539): NCBI GI NO: 4581969 NR Description: myb protein [Avena sativa]
  misc_feature (309)..(539): NCBI GI NO: 2369878 NR Description: m12 [Hordeum vulgare]
  misc_feature (21)..(182): NCBI GI NO: 8247759 NR Description: GAMyb protein [Triticum aestivum]
  misc_feature (8)..(532): NCBI GI NO: 15229748 NR Description: Myb DNA-binding protein, putative
  misc_feature (8)..(438): NCBI GI NO: 15239926 NR Description: MYB family transcription factor-like
MMLQEQMDSLVADDVSSGGGSPHRGVGTPLKKGPWTSAEDAILVDYVKKNGEGNWNAVQKNTGLFRCGKSCRLRWANHLRPNLKKGAFTPEEERLIIQLHAKMGNKWARMAGHLPGRTDNEIKNYWNTRIKRCQRASLPIYPASVCNQSTNEDQQLSGNFNGGENISNDLLSGNSLYLPDFTSDNFIANPEALSYAPQLSAVSISNLLGQSFASKSCSFMDQVDQAGMLKQSGCVLPALSDAIDSVLSSADHFSNDSEKLRQALGFDYLNEANASSKSIAPFGVALTGSHAFLNGNFSASRPTNGPLKMELPSLQDTESDPNSWLKYTVAPAMQPTELVDPYLQSPSATPSVKSECASPRNSGLLEELLHEAQALRSGKNQQSSVRSSSSSAGTPYETTTVVSPEFDMGQEYWEEQPSSFLSEYAHFSGNSFTESTPPVSAASPDIFQLSKISPAQSPSMGSGEQALEPKHESAASPRPENLRPDALFSGNTADPSIFNNAIAMLLGNGIDAEYKPVLGDGIVLDSSSWNNMQHAFQMAGFK

SEQ ID NO: 38981 - protein, 541 aa, Zea mays subsp. mays
  peptide (1)..(541): Ceres Seq. ID no. 12417407
  misc_feature (31)..(78): Pfam Name: Pfam Description:  Myb-like DNA-binding domain
  misc_feature (1)..(541): NCBI GI NO: 7438356 NR Description: myb-related transcription factor - rice
  misc_feature (1)..(541): NCBI GI NO: 34909188 NR Description: myb-related transcription factor
  misc_feature (1)..(538): NCBI GI NO: 7438355 NR Description: myb-related protein - barley
  misc_feature (1)..(538): NCBI GI NO: 13236696 NR Description: transcription factor GAMyb [Hordeum vulgare]
  misc_feature (1)..(538): NCBI GI NO: 4877649 NR Description: gibberellin MYB transcription factor
  misc_feature (1)..(538): NCBI GI NO: 4581969 NR Description: myb protein [Avena sativa]
  misc_feature (308)..(538): NCBI GI NO: 2369878 NR Description: m12 [Hordeum vulgare]
  misc_feature (20)..(181): NCBI GI NO: 8247759 NR Description: GAMyb protein [Triticum aestivum]
  misc_feature (7)..(531): NCBI GI NO: 15229748 NR Description: Myb DNA-binding protein, putative
  misc_feature (7)..(437): NCBI GI NO: 15239926 NR Description: MYB family transcription factor-like
MLQEQMDSLVADDVSSGGGSPHRGVGTPLKKGPWTSAEDAILVDYVKKNGEGNWNAVQKNTGLFRCGKSCRLRWANHLRPNLKKGAFTPEEERLIIQLHAKMGNKWARMAGHLPGRTDNEIKNYWNTRIKRCQRASLPIYPASVCNQSTNEDQQLSGNFNGGENISNDLLSGNSLYLPDFTSDNFIANPEALSYAPQLSAVSISNLLGQSFASKSCSFMDQVDQAGMLKQSGCVLPALSDAIDSVLSSADHFSNDSEKLRQALGFDYLNEANASSKSIAPFGVALTGSHAFLNGNFSASRPTNGPLKMELPSLQDTESDPNSWLKYTVAPAMQPTELVDPYLQSPSATPSVKSECASPRNSGLLEELLHEAQALRSGKNQQSSVRSSSSSAGTPYETTTVVSPEFDMGQEYWEEQPSSFLSEYAHFSGNSFTESTPPVSAASPDIFQLSKISPAQSPSMGSGEQALEPKHESAASPRPENLRPDALFSGNTADPSIFNNAIAMLLGNGIDAEYKPVLGDGIVLDSSSWNNMQHAFQMAGFK

SEQ ID NO: 38982 - DNA, 1649 bp, Zea mays subsp. mays
  misc_feature (1)..(1649): Ceres Seq. ID no. 12375395
gcacgagaccattacctagaacatcctaatcgaaaaagcaacagccatggcttcagcgaagcagagcaagaagatgcgcatacttctgatcccattcttcgccaccagccacatcgggccctacatcgacttcgccgtccgtctcgcggcagccaggccaggagccgtcgagcccaccgtcgccgtgaccccggccaatgttgcggtggtccggtcggcgctcgagcgccacggccccgcggcgagcggcacggtcaggatcgtcacgtacccgttcccgcgcgtggatggcctcgctccgggcgtggagaacctctccaccgccggagacgacgcgtggcgcatcgacgccgccgccatcgacgaggccctctcgcggccggcgcaggaggcgctcctcagggagcggtcccccgacgccgtcgtgtcggactaccacttcttctggaccagcagcatcgccgccgagctgggcctgccgtgcgtcgttttcagtgtcatcgcccccttctcgggtctcgtcatgcgcatcctcgccggcgccgtcgtctctgggtcgcgtgacgttaccgttcccgggttgccagggccggagatacggatccccgtcagcgagctgccggagttcctgagacgcccggcgaaggaccaaggcacgttcagcccctgcaacgcggcgcaggccaggtgtttgggcgtcgcctacaacacgttcgcaggcatggagcaggagtaccgcgaggcgaacgtgcgcgccaaatccttgaagcgctgctacttcgtcggccccgtctcactgccgctgccggcggcagcggcaggcaccagcgagtctccatgcatcaggtggctcgactccaggccaaactgctcggtggtgtacgtgtgcttcggcacctacgccgccatctcggaggaccagctccgggagctggcgctcggcctggaggcctcaggggagccgttcctgtgggtggtgagggccgacgggtggacgccgccggagggctgggagcagcgcgtcggggagagggggatgctggtgagagggtgggctccgcagacggcggtgctggcccatccagcggtgggcgcgttcctgacgcactgcgggtcgagctcgttgctggaggcggcggcggccggcgtgccgatgctgacgtggccgctggtgttcgaccagttcatcgaggagaggctggtgacggacgtgctcgggatcggggagcgggtctggagtggggcgcggagcacgaggtacgaggagagggagctcgtgccggcggaggcggtggctcgggcggtggcgaggttcttggagccaggcgggccgggggaggcggcgaggggcagggcgcgggatctcgcagtgaaggcccacgctgccgtagcggagggcggctcgtcgtcccgtgatctgcatcgcctcatcgacgacctggtcgaagccagagcggcaacgagcagctgcaacgctgacagcgagtaagagatggaattgctggagatgtctcgatctggcgagcaactggaagaaggtctcgaacagccttcacggacaagtacgccatctgcaacgtacgtacgttctcggagtcgaagaaaacacttatggaaataatatggtactgcaccacctcgatttctgt

SEQ ID NO: 38983 - protein, 480 aa, Zea mays subsp. mays
  peptide (1)..(480): Ceres Seq. ID no. 12375396
  misc_feature (22)..(473): Pfam Name: Pfam Description:  UDP-glucoronosyl and UDP-glucosyl transferase
  misc_feature (1)..(471): NCBI GI NO: 30017585 NR Description: putative immediate-early salicylate-inducedglucosyltransferase
  misc_feature (8)..(471): NCBI GI NO: 30103010 NR Description: putative immediate-early salicylate-inducedglucosyltransferase
  misc_feature (6)..(262): NCBI GI NO: 34911582 NR Description: putative salicylate-induced glucosyltransferase
  misc_feature (262)..(474): NCBI GI NO: 34911582 NR Description: putative salicylate-induced glucosyltransferase
  misc_feature (1)..(473): NCBI GI NO: 34911572 NR Description: putative salicylate-induced glucosyltransferase
  misc_feature (16)..(469): NCBI GI NO: 7433911 NR Description: probable glucosyltransferase twi1 (EC 2
  misc_feature (9)..(465): NCBI GI NO: 7433906 NR Description: glucosyltransferase IS5a (EC 2
  misc_feature (4)..(465): NCBI GI NO: 32816180 NR Description: flavonoid glucosyl-transferase [Allium cepa]
  misc_feature (10)..(465): NCBI GI NO: 4115534 NR Description: UDP-glycose:flavonoid glycosyltransferase
  misc_feature (9)..(465): NCBI GI NO: 13492674 NR Description: phenylpropanoid:glucosyltransferase 1
MASAKQSKKMRILLIPFFATSHIGPYIDFAVRLAAARPGAVEPTVAVTPANVAVVRSALERHGPAASGTVRIVTYPFPRVDGLAPGVENLSTAGDDAWRIDAAAIDEALSRPAQEALLRERSPDAVVSDYHFFWTSSIAAELGLPCVVFSVIAPFSGLVMRILAGAVVSGSRDVTVPGLPGPEIRIPVSELPEFLRRPAKDQGTFSPCNAAQARCLGVAYNTFAGMEQEYREANVRAKSLKRCYFVGPVSLPLPAAAAGTSESPCIRWLDSRPNCSVVYVCFGTYAAISEDQLRELALGLEASGEPFLWVVRADGWTPPEGWEQRVGERGMLVRGWAPQTAVLAHPAVGAFLTHCGSSSLLEAAAAGVPMLTWPLVFDQFIEERLVTDVLGIGERVWSGARSTRYEERELVPAEAVARAVARFLEPGGPGEAARGRARDLAVKAHAAVAEGGSSSRDLHRLIDDLVEARAATSSCNADSE

SEQ ID NO: 38984 - protein, 471 aa, Zea mays subsp. mays
  peptide (1)..(471): Ceres Seq. ID no. 12375397
  misc_feature (13)..(464): Pfam Name: Pfam Description:  UDP-glucoronosyl and UDP-glucosyl transferase
  misc_feature (1)..(462): NCBI GI NO: 30017585 NR Description: putative immediate-early salicylate-inducedglucosyltransferase
  misc_feature (1)..(462): NCBI GI NO: 30103010 NR Description: putative immediate-early salicylate-inducedglucosyltransferase
  misc_feature (1)..(253): NCBI GI NO: 34911582 NR Description: putative salicylate-induced glucosyltransferase
  misc_feature (253)..(465): NCBI GI NO: 34911582 NR Description: putative salicylate-induced glucosyltransferase
  misc_feature (1)..(464): NCBI GI NO: 34911572 NR Description: putative salicylate-induced glucosyltransferase
  misc_feature (7)..(460): NCBI GI NO: 7433911 NR Description: probable glucosyltransferase twi1 (EC 2
  misc_feature (1)..(456): NCBI GI NO: 7433906 NR Description: glucosyltransferase IS5a (EC 2
  misc_feature (1)..(456): NCBI GI NO: 32816180 NR Description: flavonoid glucosyl-transferase [Allium cepa]
  misc_feature (1)..(456): NCBI GI NO: 4115534 NR Description: UDP-glycose:flavonoid glycosyltransferase
  misc_feature (1)..(456): NCBI GI NO: 13492674 NR Description: phenylpropanoid:glucosyltransferase 1
MRILLIPFFATSHIGPYIDFAVRLAAARPGAVEPTVAVTPANVAVVRSALERHGPAASGTVRIVTYPFPRVDGLAPGVENLSTAGDDAWRIDAAAIDEALSRPAQEALLRERSPDAVVSDYHFFWTSSIAAELGLPCVVFSVIAPFSGLVMRILAGAVVSGSRDVTVPGLPGPEIRIPVSELPEFLRRPAKDQGTFSPCNAAQARCLGVAYNTFAGMEQEYREANVRAKSLKRCYFVGPVSLPLPAAAAGTSESPCIRWLDSRPNCSVVYVCFGTYAAISEDQLRELALGLEASGEPFLWVVRADGWTPPEGWEQRVGERGMLVRGWAPQTAVLAHPAVGAFLTHCGSSSLLEAAAAGVPMLTWPLVFDQFIEERLVTDVLGIGERVWSGARSTRYEERELVPAEAVARAVARFLEPGGPGEAARGRARDLAVKAHAAVAEGGSSSRDLHRLIDDLVEARAATSSCNADSE

SEQ ID NO: 38985 - protein, 321 aa, Zea mays subsp. mays
  peptide (1)..(321): Ceres Seq. ID no. 12375398
  misc_feature (1)..(314): Pfam Name: Pfam Description:  UDP-glucoronosyl and UDP-glucosyl transferase
  misc_feature (1)..(312): NCBI GI NO: 30017585 NR Description: putative immediate-early salicylate-inducedglucosyltransferase
  misc_feature (1)..(312): NCBI GI NO: 30103010 NR Description: putative immediate-early salicylate-inducedglucosyltransferase
  misc_feature (1)..(103): NCBI GI NO: 34911582 NR Description: putative salicylate-induced glucosyltransferase
  misc_feature (103)..(315): NCBI GI NO: 34911582 NR Description: putative salicylate-induced glucosyltransferase
  misc_feature (1)..(314): NCBI GI NO: 34911572 NR Description: putative salicylate-induced glucosyltransferase
  misc_feature (1)..(310): NCBI GI NO: 7433911 NR Description: probable glucosyltransferase twi1 (EC 2
  misc_feature (1)..(306): NCBI GI NO: 7433906 NR Description: glucosyltransferase IS5a (EC 2
  misc_feature (1)..(306): NCBI GI NO: 32816180 NR Description: flavonoid glucosyl-transferase [Allium cepa]
  misc_feature (1)..(306): NCBI GI NO: 4115534 NR Description: UDP-glycose:flavonoid glycosyltransferase
  misc_feature (1)..(306): NCBI GI NO: 13492674 NR Description: phenylpropanoid:glucosyltransferase 1
MRILAGAVVSGSRDVTVPGLPGPEIRIPVSELPEFLRRPAKDQGTFSPCNAAQARCLGVAYNTFAGMEQEYREANVRAKSLKRCYFVGPVSLPLPAAAAGTSESPCIRWLDSRPNCSVVYVCFGTYAAISEDQLRELALGLEASGEPFLWVVRADGWTPPEGWEQRVGERGMLVRGWAPQTAVLAHPAVGAFLTHCGSSSLLEAAAAGVPMLTWPLVFDQFIEERLVTDVLGIGERVWSGARSTRYEERELVPAEAVARAVARFLEPGGPGEAARGRARDLAVKAHAAVAEGGSSSRDLHRLIDDLVEARAATSSCNADSE

SEQ ID NO: 38986 - DNA, 1631 bp, Zea mays subsp. mays
  misc_feature (1)..(1631): Ceres Seq. ID no. 12417412
accaatcatttctttgcaatctgcagcctctgcaaactgatcgcgttgctggttgctggtaatcatcggaccagtccacagatatcggaagctctcttgctactgatggcgaagcccagcgtggcggtgccggaggttggcgtaccagccgcgcaggcgtcgtgcacctgcccggggacgctgctcgcgtacccgccgccgcgtggcgccggggtcgcggccgccgtgcggcgcaagtgcctgcaggtggagctcggcgcgggggcgggcctgctgggcggcgccggcgcctggggcgtggagtccatgcgggcgtcgtcgcccacgcacgccagggccgcggccgcgctcgccgccggcggcggcgtcgatgttgacgtcgacgaggagcgcgccgccagctggatggcgcggcacccgtcggcgctgggcaggttcgagcggatcgtggcggcggccgagggcaagcggatcgtcatgttcctggactacgacggcacgctgtcgcccatcgtggacgaccccgacgccgccttcatgagcgagacgatgcggatggccgtgcgtagcgtcgccaagcatttcccgacggcgatcgtgagcggccggtgccgcgacaaggtgttcgagttcgtgaagctggcagagctctactacgccggcagccacggcatggacatcaagggtccggcggcctccaaggcctcctcttcttctcggcacgccgcaaaggcaaaaggagtaacggccacgtcggcgtggcaggtggcgcggcgccattgggcggggcctgccgatcgacgacctgcgtgcgcgcgcggcgggagaggctgttacaaaaacagagaagctcacatcggccaagtggtttcgccatctccgccgcccctggatcactcggtgctctcctctcctactctcccattcagattctctaagaaaaaaaggtctagatctagcgagatcgtgctgtagtagccttgttgcttggcgcatcgttgtttgttaacattacatgcttactgttgcccgtgtgcgtgtatcaccactgtatccatccatccatgtttgtttctgaaaaaaaaaaaaaaaaaagcttctcgtgccgttttttttttttttttttgaacaaaactgcaacctcaccacaagcagcaaaaagctaatctcaggtcccatattagcgagcggatctgtcacagatggtagcaggaagggaaacaaaagtgcaaaacatgtccagactcagcatgaacctggcgacccagaggcacgcgccatccacatttattctcggcatacacaagcagccaccaaaggagcacaagaggtacaaccccaagaaactgacatacgagcagaggaaggccagtctcattgaaaggctcaaccaactcaactcctcgggcggcgcagatgacgacgacgaggatgacgagtaaagtttcgtcccatcgaagtagtgctatcttatgcggcgatcagtatttgtgctatggcatttatcgctacctgtagtcgtgcaacatgcatttttgtttaagtttgtcgatgcgaacaaagttgtttctgttagtttggagctggagttctgaatatttacttttataatataaaattggaccgagtcg

SEQ ID NO: 38987 - protein, 324 aa, Zea mays subsp. mays
  peptide (1)..(324): Ceres Seq. ID no. 12417413
  misc_feature (60)..(230): NCBI GI NO: 15238360 NR Description: trehalose-6-phosphate phosphatase
  misc_feature (95)..(246): NCBI GI NO: 33146623 NR Description: putative trehalose-6-phosphate phosphatase
  misc_feature (69)..(253): NCBI GI NO: 21554408 NR Description: trehalose-phosphatase, putative
  misc_feature (91)..(231): NCBI GI NO: 11282598 NR Description: trehalose-6-phosphate phosphatase-like protein -Arabidopsis thaliana
  misc_feature (91)..(231): NCBI GI NO: 30683008 NR Description: trehalose-6-phosphate phosphatase, putative
  misc_feature (69)..(253): NCBI GI NO: 18399940 NR Description: trehalose-phosphatase, putative
  misc_feature (69)..(253): NCBI GI NO: 25354597 NR Description: probable trehalose-phosphatase
  misc_feature (92)..(230): NCBI GI NO: 30692524 NR Description: trehalose-6-phosphate phosphatase, putative
  misc_feature (95)..(241): NCBI GI NO: 37536726 NR Description: putative trehalose-6-phosphate phosphatase
  misc_feature (95)..(231): NCBI GI NO: 30696058 NR Description: trehalose-6-phosphate phosphatase (TPPA)
TNHFFAICSLCKLIALLVAGNHRTSPQISEALLLLMAKPSVAVPEVGVPAAQASCTCPGTLLAYPPPRGAGVAAAVRRKCLQVELGAGAGLLGGAGAWGVESMRASSPTHARAAAALAAGGGVDVDVDEERAASWMARHPSALGRFERIVAAAEGKRIVMFLDYDGTLSPIVDDPDAAFMSETMRMAVRSVAKHFPTAIVSGRCRDKVFEFVKLAELYYAGSHGMDIKGPAASKASSSSRHAAKAKGVTATSAWQVARRHWAGPADRRPACARGGRGCYKNREAHIGQVVSPSPPPLDHSVLSSPTLPFRFSKKKRSRSSEIVL

SEQ ID NO: 38988 - protein, 289 aa, Zea mays subsp. mays
  peptide (1)..(289): Ceres Seq. ID no. 12417414
  misc_feature (25)..(195): NCBI GI NO: 15238360 NR Description: trehalose-6-phosphate phosphatase
  misc_feature (60)..(211): NCBI GI NO: 33146623 NR Description: putative trehalose-6-phosphate phosphatase
  misc_feature (34)..(218): NCBI GI NO: 21554408 NR Description: trehalose-phosphatase, putative
  misc_feature (56)..(196): NCBI GI NO: 11282598 NR Description: trehalose-6-phosphate phosphatase-like protein -Arabidopsis thaliana
  misc_feature (56)..(196): NCBI GI NO: 30683008 NR Description: trehalose-6-phosphate phosphatase, putative
  misc_feature (34)..(218): NCBI GI NO: 18399940 NR Description: trehalose-phosphatase, putative
  misc_feature (34)..(218): NCBI GI NO: 25354597 NR Description: probable trehalose-phosphatase
  misc_feature (57)..(195): NCBI GI NO: 30692524 NR Description: trehalose-6-phosphate phosphatase, putative
  misc_feature (60)..(206): NCBI GI NO: 37536726 NR Description: putative trehalose-6-phosphate phosphatase
  misc_feature (60)..(196): NCBI GI NO: 30696058 NR Description: trehalose-6-phosphate phosphatase (TPPA)
MAKPSVAVPEVGVPAAQASCTCPGTLLAYPPPRGAGVAAAVRRKCLQVELGAGAGLLGGAGAWGVESMRASSPTHARAAAALAAGGGVDVDVDEERAASWMARHPSALGRFERIVAAAEGKRIVMFLDYDGTLSPIVDDPDAAFMSETMRMAVRSVAKHFPTAIVSGRCRDKVFEFVKLAELYYAGSHGMDIKGPAASKASSSSRHAAKAKGVTATSAWQVARRHWAGPADRRPACARGGRGCYKNREAHIGQVVSPSPPPLDHSVLSSPTLPFRFSKKKRSRSSEIVL

SEQ ID NO: 38989 - protein, 222 aa, Zea mays subsp. mays
  peptide (1)..(222): Ceres Seq. ID no. 12417415
  misc_feature (1)..(128): NCBI GI NO: 15238360 NR Description: trehalose-6-phosphate phosphatase
  misc_feature (1)..(144): NCBI GI NO: 33146623 NR Description: putative trehalose-6-phosphate phosphatase
  misc_feature (1)..(151): NCBI GI NO: 21554408 NR Description: trehalose-phosphatase, putative
  misc_feature (1)..(129): NCBI GI NO: 11282598 NR Description: trehalose-6-phosphate phosphatase-like protein -Arabidopsis thaliana
  misc_feature (1)..(129): NCBI GI NO: 30683008 NR Description: trehalose-6-phosphate phosphatase, putative
  misc_feature (1)..(151): NCBI GI NO: 18399940 NR Description: trehalose-phosphatase, putative
  misc_feature (1)..(151): NCBI GI NO: 25354597 NR Description: probable trehalose-phosphatase
  misc_feature (1)..(128): NCBI GI NO: 30692524 NR Description: trehalose-6-phosphate phosphatase, putative
  misc_feature (1)..(139): NCBI GI NO: 37536726 NR Description: putative trehalose-6-phosphate phosphatase
  misc_feature (1)..(129): NCBI GI NO: 30696058 NR Description: trehalose-6-phosphate phosphatase (TPPA)
MRASSPTHARAAAALAAGGGVDVDVDEERAASWMARHPSALGRFERIVAAAEGKRIVMFLDYDGTLSPIVDDPDAAFMSETMRMAVRSVAKHFPTAIVSGRCRDKVFEFVKLAELYYAGSHGMDIKGPAASKASSSSRHAAKAKGVTATSAWQVARRHWAGPADRRPACARGGRGCYKNREAHIGQVVSPSPPPLDHSVLSSPTLPFRFSKKKRSRSSEIVL

SEQ ID NO: 38990 - DNA, 478 bp, Zea mays subsp. mays
  misc_feature (1)..(478): Ceres Seq. ID no. 1671848
attggccgggctccagtgctgggcgttgtatgagaggtgagcctcccggtggagcgtgggtggtgctgggtgccggggatgagctgcaacgggtgccgcgtgcttcgcaaggggtgcagcgacgcgtgcgtgctgcggccgtgcctgcagtggatcgacggcgccgaggcgcagggccacgccaccgtcttcgtcgccaagttcttcggccgcgccggcctcatgtccttcctcaccgccgtccccgagccgcagcgcccagcggtgttccagtcgttgatgtacgaggcggccgggcggacgatcaaccctgtgagcggcgccgtggggctgctcggcgcgggcagctggcagctgtgccaggcggcggtggagacggtgcttcggggcggcgccatcgggccgctgcccgagttcgacgggggccgcgacaatacgtttgctctggcggcgacggcgaggcgggccgtggggtgct

SEQ ID NO: 38991 - protein, 158 aa, Zea mays subsp. mays
  peptide (1)..(158): Ceres Seq. ID no. 1671849
WPGSSAGRCMRGEPPGGAWVVLGAGDELQRVPRASQGVQRRVRAAAVPAVDRRRRGAGPRHRLRRQVLRPRRPHVLPHRRPRAAAPSGVPVVDVRGGRADDQPCERRRGAARRGQLAAVPGGGGDGASGRRHRAAARVRRGPRQYVCSGGDGEAGRGV

SEQ ID NO: 38992 - protein, 149 aa, Zea mays subsp. mays
  peptide (1)..(149): Ceres Seq. ID no. 1671850
MRGEPPGGAWVVLGAGDELQRVPRASQGVQRRVRAAAVPAVDRRRRGAGPRHRLRRQVLRPRRPHVLPHRRPRAAAPSGVPVVDVRGGRADDQPCERRRGAARRGQLAAVPGGGGDGASGRRHRAAARVRRGPRQYVCSGGDGEAGRGV

SEQ ID NO: 38993 - protein, 133 aa, Zea mays subsp. mays
  peptide (1)..(133): Ceres Seq. ID no. 1671851
  misc_feature (2)..(107): Pfam Name: Pfam Description:  Protein of unknown function DUF260
  misc_feature (1)..(132): NCBI GI NO: 34394489 NR Description: putative lateral organ boundaries
  misc_feature (1)..(116): NCBI GI NO: 15229644 NR Description: putative protein; protein id: At3g49940
  misc_feature (1)..(116): NCBI GI NO: 21553886 NR Description: unknown [Arabidopsis thaliana]
  misc_feature (1)..(112): NCBI GI NO: 15240739 NR Description: putative protein; protein id: At5g67420
  misc_feature (1)..(112): NCBI GI NO: 21593577 NR Description: unknown [Arabidopsis thaliana]
  misc_feature (1)..(112): NCBI GI NO: 15235604 NR Description: putative protein; protein id: At4g37540
  misc_feature (1)..(112): NCBI GI NO: 21592894 NR Description: unknown [Arabidopsis thaliana]
  misc_feature (1)..(110): NCBI GI NO: 40539088 NR Description: expressed protein
  misc_feature (1)..(111): NCBI GI NO: 34895540 NR Description: unnamed protein product
  misc_feature (1)..(110): NCBI GI NO: 15219829 NR Description: hypothetical protein; protein id: At1g67100.1
MSCNGCRVLRKGCSDACVLRPCLQWIDGAEAQGHATVFVAKFFGRAGLMSFLTAVPEPQRPAVFQSLMYEAAGRTINPVSGAVGLLGAGSWQLCQAAVETVLRGGAIGPLPEFDGGRDNTFALAATARRAVGC

SEQ ID NO: 38994 - DNA, 1804 bp, Zea mays subsp. mays
  misc_feature (1)..(1804): Ceres Seq. ID no. 12362385
aattcgggctgggcttgttggcctcgcctcggttggtgccctctctgccgccgcggaggagagtcgccgccaccaccaccatccagccagccaaggcttcccttccccagcagcagtctccagccgcagccatggccaagccaccgccgcccacctccacctccgaccccgcgctccccaccactgctacaaccacctcgtcggcccccaagtcgtcgtctcgcccctccccccgcccccggggcctcctcgatccgctcgcagcctccgcgcgctccctcctcgcctcggcgcgccgctccccggtcaccacgctagccgccgccttcttcctcctcgcgctcgtcatgtacggcgaggacgcccgcaccatcgccgagctctccatcgacgactacctctacccggacgccgacctctacaacgtctccggcctgccgcccctcgcgctgcccccgctcacctgcgacctctcccgcggcagatgggtcttcgacaacgtctccgttccggcgtaccgggagaaagactgcaccttcctcaccaagcaggtctcctgcctcgccaacggccgccccgacgacatgtggcagtactggagatggcagcccaacgagtgctccctccccacgttcgacgctcggagattcatggaggcgatgcgcgggaagcggctcatgttcgtgggggactcgctgaaccgcaaccagtgggagtcgctggtgtgcctcgtgcagcccatcctgtctaagggcaggaagaagatcgtcaagcggggctccttcaacaccttctacgctaaggagtaccgcgccacgctcgagttctactgggcgcccttcctcgtcgaatccaactctgacaaccccaacttccacagcatcaaggaacggatcatcagtcccgagcggatcgaggcgcacgccaagcactggaaggatgctgactacctcatcttcaacacctacatctggtggatgaacaacgccgacatcaaagtcaggagacccaattcgaggtactggtctgacaacgatgaggttcccaggattgaggcgtatggccgtgtgttcaagacatggtctgattggctcaatgacaacatcgatcctgcccgaacgtccgtcttcttcatgacgatttctcctcctcacctcagcccacagaattggggaaacccggacggtatcaaatgtgtaagagagacgcttccatatcagaactacagccaacacctggatctttaccatgacatgcggctgtatgacttagtggtcaatgtggccagctccatggagaaggtcccagtgacagtgatcaatatcacaaggatgtcagattaccggaaggacgcccacacgtccctgtacaccatccggcaagggaagctgctgacgcctaagcagaaggcagaccccgagaagttcgcggattgcatccactggtgccttcctggcgtgccggacgtgtggaaccaaatactctacacgaggattctttcgaaatcatcgtggcattctaattttagcccccctccatcccagtctctgcctcttcctccccaatgagaatcagaagtgggggcttggtttttgtcggagaatgtatgatttttcattctttttccttcctttttgggtagattgagtaaaatgatagcacgaaaaggaaaatgaatgttctgattactgatggtatagcatgtaagaagattcagctgaagtgtaaattagttgtgagttagccaattgagaaaacaacagcgacctagtataaagtgcatatacatatactgctggttcac

SEQ ID NO: 38995 - protein, 521 aa, Zea mays subsp. mays
  peptide (1)..(521): Ceres Seq. ID no. 12362386
  misc_feature (325)..(498): Pfam Name: Pfam Description:  Arabidopsis proteins of unknown function
  misc_feature (152)..(501): NCBI GI NO: 34907966 NR Description: P0446G04.14
  misc_feature (150)..(502): NCBI GI NO: 15228789 NR Description: putative protein; protein id: At3g55990.1
  misc_feature (150)..(502): NCBI GI NO: 26452343 NR Description: unknown protein [Arabidopsis thaliana]
  misc_feature (108)..(501): NCBI GI NO: 18405283 NR Description: expressed protein; protein id: At2g40150
  misc_feature (108)..(501): NCBI GI NO: 25366731 NR Description: hypothetical protein At2g40150
  misc_feature (155)..(503): NCBI GI NO: 34898234 NR Description: P0034A04.28
  misc_feature (150)..(501): NCBI GI NO: 18405285 NR Description: expressed protein; protein id: At2g40160
  misc_feature (152)..(498): NCBI GI NO: 15228429 NR Description: unknown protein; protein id: At3g11030.1
  misc_feature (85)..(498): NCBI GI NO: 28393743 NR Description: unknown protein [Arabidopsis thaliana]
  misc_feature (152)..(498): NCBI GI NO: 18412850 NR Description: putative protein; protein id: At5g01360
FGLGLLASPRLVPSLPPRRRVAATTTIQPAKASLPQQQSPAAAMAKPPPPTSTSDPALPTTATTTSSAPKSSSRPSPRPRGLLDPLAASARSLLASARRSPVTTLAAAFFLLALVMYGEDARTIAELSIDDYLYPDADLYNVSGLPPLALPPLTCDLSRGRWVFDNVSVPAYREKDCTFLTKQVSCLANGRPDDMWQYWRWQPNECSLPTFDARRFMEAMRGKRLMFVGDSLNRNQWESLVCLVQPILSKGRKKIVKRGSFNTFYAKEYRATLEFYWAPFLVESNSDNPNFHSIKERIISPERIEAHAKHWKDADYLIFNTYIWWMNNADIKVRRPNSRYWSDNDEVPRIEAYGRVFKTWSDWLNDNIDPARTSVFFMTISPPHLSPQNWGNPDGIKCVRETLPYQNYSQHLDLYHDMRLYDLVVNVASSMEKVPVTVINITRMSDYRKDAHTSLYTIRQGKLLTPKQKADPEKFADCIHWCLPGVPDVWNQILYTRILSKSSWHSNFSPPPSQSLPLPPQ

SEQ ID NO: 38996 - protein, 478 aa, Zea mays subsp. mays
  peptide (1)..(478): Ceres Seq. ID no. 12362387
  misc_feature (282)..(455): Pfam Name: Pfam Description:  Arabidopsis proteins of unknown function
  misc_feature (109)..(458): NCBI GI NO: 34907966 NR Description: P0446G04.14
  misc_feature (107)..(459): NCBI GI NO: 15228789 NR Description: putative protein; protein id: At3g55990.1
  misc_feature (107)..(459): NCBI GI NO: 26452343 NR Description: unknown protein [Arabidopsis thaliana]
  misc_feature (65)..(458): NCBI GI NO: 18405283 NR Description: expressed protein; protein id: At2g40150
  misc_feature (65)..(458): NCBI GI NO: 25366731 NR Description: hypothetical protein At2g40150
  misc_feature (112)..(460): NCBI GI NO: 34898234 NR Description: P0034A04.28
  misc_feature (107)..(458): NCBI GI NO: 18405285 NR Description: expressed protein; protein id: At2g40160
  misc_feature (109)..(455): NCBI GI NO: 15228429 NR Description: unknown protein; protein id: At3g11030.1
  misc_feature (42)..(455): NCBI GI NO: 28393743 NR Description: unknown protein [Arabidopsis thaliana]
  misc_feature (109)..(455): NCBI GI NO: 18412850 NR Description: putative protein; protein id: At5g01360
MAKPPPPTSTSDPALPTTATTTSSAPKSSSRPSPRPRGLLDPLAASARSLLASARRSPVTTLAAAFFLLALVMYGEDARTIAELSIDDYLYPDADLYNVSGLPPLALPPLTCDLSRGRWVFDNVSVPAYREKDCTFLTKQVSCLANGRPDDMWQYWRWQPNECSLPTFDARRFMEAMRGKRLMFVGDSLNRNQWESLVCLVQPILSKGRKKIVKRGSFNTFYAKEYRATLEFYWAPFLVESNSDNPNFHSIKERIISPERIEAHAKHWKDADYLIFNTYIWWMNNADIKVRRPNSRYWSDNDEVPRIEAYGRVFKTWSDWLNDNIDPARTSVFFMTISPPHLSPQNWGNPDGIKCVRETLPYQNYSQHLDLYHDMRLYDLVVNVASSMEKVPVTVINITRMSDYRKDAHTSLYTIRQGKLLTPKQKADPEKFADCIHWCLPGVPDVWNQILYTRILSKSSWHSNFSPPPSQSLPLPPQ

SEQ ID NO: 38997 - protein, 406 aa, Zea mays subsp. mays
  peptide (1)..(406): Ceres Seq. ID no. 12362388
  misc_feature (210)..(383): Pfam Name: Pfam Description:  Arabidopsis proteins of unknown function
  misc_feature (37)..(386): NCBI GI NO: 34907966 NR Description: P0446G04.14
  misc_feature (35)..(387): NCBI GI NO: 15228789 NR Description: putative protein; protein id: At3g55990.1
  misc_feature (35)..(387): NCBI GI NO: 26452343 NR Description: unknown protein [Arabidopsis thaliana]
  misc_feature (1)..(386): NCBI GI NO: 18405283 NR Description: expressed protein; protein id: At2g40150
  misc_feature (1)..(386): NCBI GI NO: 25366731 NR Description: hypothetical protein At2g40150
  misc_feature (40)..(388): NCBI GI NO: 34898234 NR Description: P0034A04.28
  misc_feature (35)..(386): NCBI GI NO: 18405285 NR Description: expressed protein; protein id: At2g40160
  misc_feature (37)..(383): NCBI GI NO: 15228429 NR Description: unknown protein; protein id: At3g11030.1
  misc_feature (1)..(383): NCBI GI NO: 28393743 NR Description: unknown protein [Arabidopsis thaliana]
  misc_feature (37)..(383): NCBI GI NO: 18412850 NR Description: putative protein; protein id: At5g01360
MYGEDARTIAELSIDDYLYPDADLYNVSGLPPLALPPLTCDLSRGRWVFDNVSVPAYREKDCTFLTKQVSCLANGRPDDMWQYWRWQPNECSLPTFDARRFMEAMRGKRLMFVGDSLNRNQWESLVCLVQPILSKGRKKIVKRGSFNTFYAKEYRATLEFYWAPFLVESNSDNPNFHSIKERIISPERIEAHAKHWKDADYLIFNTYIWWMNNADIKVRRPNSRYWSDNDEVPRIEAYGRVFKTWSDWLNDNIDPARTSVFFMTISPPHLSPQNWGNPDGIKCVRETLPYQNYSQHLDLYHDMRLYDLVVNVASSMEKVPVTVINITRMSDYRKDAHTSLYTIRQGKLLTPKQKADPEKFADCIHWCLPGVPDVWNQILYTRILSKSSWHSNFSPPPSQSLPLPPQ

SEQ ID NO: 38998 - DNA, 2053 bp, Zea mays subsp. mays; identical to SEQ ID NO: 27232
  misc_feature (1)..(2053): Ceres Seq. ID no. 13577863
  misc_feature (1648)..(1648): n is a, c, t, g, unknown, or other
  misc_feature (638)..(638): n is a, c, t, g, unknown, or other
  misc_feature (518)..(518): n is a, c, t, g, unknown, or other
  misc_feature (132)..(132): n is a, c, t, g, unknown, or other

SEQ ID NO: 38999 - protein, 362 aa, Zea mays subsp. mays; identical to SEQ ID NO: 27233
  peptide (1)..(362): Ceres Seq. ID no. 13577864
  misc_feature (100)..(362): Pfam Name: Pfam Description:  TCP-1/cpn60 chaperonin family
  misc_feature (61)..(362): NCBI GI NO: 18396719 NR Description: chaperonin, putative [Arabidopsis thaliana]
  misc_feature (61)..(362): NCBI GI NO: 6223641 NR Description: putative T-complex protein 1, theta subunit
  misc_feature (71)..(361): NCBI GI NO: 27924345 NR Description: Similar to chaperonin containing TCP1, subunit 8
  misc_feature (72)..(362): NCBI GI NO: 17066726 NR Description: CCT chaperonin theta subunit
  misc_feature (71)..(361): NCBI GI NO: 29791676 NR Description: Similar to chaperonin containing TCP1, subunit 8
  misc_feature (71)..(361): NCBI GI NO: 37362194 NR Description: chaperonin containing TCP1, subunit 8 (theta)
  misc_feature (71)..(361): NCBI GI NO: 9988062 NR Description: T-complex protein 1, theta subunit
  misc_feature (71)..(361): NCBI GI NO: 6005727 NR Description: chaperonin containing TCP1, subunit 8
  misc_feature (71)..(361): NCBI GI NO: 1136741 NR Description: KIAA0002 [Homo sapiens]
  misc_feature (71)..(361): NCBI GI NO: 23478707 NR Description: T-complex protein 1 [Plasmodium yoelii yoelii]
  misc_feature (44)..(44): Xaa is any aa, unknown or other
  misc_feature (173)..(173): Xaa is any aa, unknown or other
  misc_feature (213)..(213): Xaa is any aa, unknown or other

SEQ ID NO: 39000 - protein, 302 aa, Zea mays subsp. mays; identical to SEQ ID NO: 27234
  peptide (1)..(302): Ceres Seq. ID no. 13577865
  misc_feature (40)..(302): Pfam Name: Pfam Description:  TCP-1/cpn60 chaperonin family
  misc_feature (1)..(302): NCBI GI NO: 18396719 NR Description: chaperonin, putative [Arabidopsis thaliana]
  misc_feature (1)..(302): NCBI GI NO: 6223641 NR Description: putative T-complex protein 1, theta subunit
  misc_feature (11)..(301): NCBI GI NO: 27924345 NR Description: Similar to chaperonin containing TCP1, subunit 8
  misc_feature (12)..(302): NCBI GI NO: 17066726 NR Description: CCT chaperonin theta subunit
  misc_feature (11)..(301): NCBI GI NO: 29791676 NR Description: Similar to chaperonin containing TCP1, subunit 8
  misc_feature (11)..(301): NCBI GI NO: 37362194 NR Description: chaperonin containing TCP1, subunit 8 (theta)
  misc_feature (11)..(301): NCBI GI NO: 9988062 NR Description: T-complex protein 1, theta subunit
  misc_feature (11)..(301): NCBI GI NO: 6005727 NR Description: chaperonin containing TCP1, subunit 8
  misc_feature (11)..(301): NCBI GI NO: 1136741 NR Description: KIAA0002 [Homo sapiens]
  misc_feature (11)..(301): NCBI GI NO: 23478707 NR Description: T-complex protein 1 [Plasmodium yoelii yoelii]
  misc_feature (113)..(113): Xaa is any aa, unknown or other
  misc_feature (153)..(153): Xaa is any aa, unknown or other

SEQ ID NO: 39001 - protein, 296 aa, Zea mays subsp. mays; identical to SEQ ID NO: 27235
  peptide (1)..(296): Ceres Seq. ID no. 13577866
  misc_feature (34)..(296): Pfam Name: Pfam Description:  TCP-1/cpn60 chaperonin family
  misc_feature (1)..(296): NCBI GI NO: 18396719 NR Description: chaperonin, putative [Arabidopsis thaliana]
  misc_feature (1)..(296): NCBI GI NO: 6223641 NR Description: putative T-complex protein 1, theta subunit
  misc_feature (5)..(295): NCBI GI NO: 27924345 NR Description: Similar to chaperonin containing TCP1, subunit 8
  misc_feature (6)..(296): NCBI GI NO: 17066726 NR Description: CCT chaperonin theta subunit
  misc_feature (5)..(295): NCBI GI NO: 29791676 NR Description: Similar to chaperonin containing TCP1, subunit 8
  misc_feature (5)..(295): NCBI GI NO: 37362194 NR Description: chaperonin containing TCP1, subunit 8 (theta)
  misc_feature (5)..(295): NCBI GI NO: 9988062 NR Description: T-complex protein 1, theta subunit
  misc_feature (5)..(295): NCBI GI NO: 6005727 NR Description: chaperonin containing TCP1, subunit 8
  misc_feature (5)..(295): NCBI GI NO: 1136741 NR Description: KIAA0002 [Homo sapiens]
  misc_feature (5)..(295): NCBI GI NO: 23478707 NR Description: T-complex protein 1 [Plasmodium yoelii yoelii]
  misc_feature (107)..(107): Xaa is any aa, unknown or other
  misc_feature (147)..(147): Xaa is any aa, unknown or other

SEQ ID NO: 39002 - DNA, 1454 bp, Zea mays subsp. mays
  misc_feature (1)..(1454): Ceres Seq. ID no. 12358548
acgacgctttttctccatggtttggtgtgcatttcctctctcctgtccccacttgacacatccatgtcccaatctcccccaacctcaggtcaaccgccgctacccaagatccagtctccgttctccctctcctctcgcttcatacacaccagggcggcagcggcagcggcaggggcccgccatcaccaacccacctcccttcaattataaacctataaaatatcatcattgacccaagctgaggcgactagtgggtattgatttttggtggggcagatcaaggagggggggagggggttaacttccaaggaaccagttcattgctggttctgctagcaggaggttggatttcagaggcagaagctttcagccaggcgggctcagggcgcgggcacatcaatggctggcaaggaaatcctccacaaggtgaaggacaaggtgaaagatgcatttagttcatcaggaccagaaacagggaaaggcaagacaaagttatcaggcaagcgtgtcaagcatggttaccatctggtgaagggcaaatctaatcatccaatggaggattatctagtggcagagtaccggcaagttggtgaacatgatttgggattgtttgctatattcgatggtcacctgggccacactgttccagactttttgagctcccatcttttcaataacatcttgagtgagccagaattcttgagtgatccagaaactgctatccgaaacgcataccaacttacggatcagaagatattggaaaacgcagcagagttgggaagaggtggctccacagctgttactgccatcttaataggaagtgacaagttcgtgaaactagttgttgcaaatgttggggattcacgggcagttattagcaagaacggtgtagcgaagcagctttcagttgaccatgaaccaaacatggagcgacaaacgatcgagcagaagggtggctttgtatcaaacctaccgggtgatgtgccacgtgttgatgggcagctggcagttgcaagggcatttggagaccggagcttgaagaagcacctcagctctgatccatatgtggtcgagcaaactatcgatgaaaatactgagtttttaattctagcaagtgatggcttgtggaaggtgatgtccaaccaggaggctgtcgacgagatcaaggattgcaaggacgcgcaggcagctgccaagcacctgacggagcaggccgtgaatcggaagagcaaagacgacatttcagttatcgtagtcaagttcatgtgctagcacatcgtcaggttaaatggtctcccgattgtataccgtgttaaattatcttttaagtcttgtgctcgctggtgtcggacattttgtttaccttctttggttttgggaccccacaaagagggtcaaggcttgtaacatattgttgtttgtttaaggctccaaataaagcatggtaccaccat

SEQ ID NO: 39003 - protein, 290 aa, Zea mays subsp. mays
  peptide (1)..(290): Ceres Seq. ID no. 12358549
  misc_feature (39)..(281): Pfam Name: Pfam Description:  Protein phosphatase 2C
  misc_feature (1)..(290): NCBI GI NO: 23307574 NR Description: putative protein phosphatase 2C homolog
  misc_feature (1)..(288): NCBI GI NO: 15232538 NR Description: protein phosphatase 2C
  misc_feature (1)..(288): NCBI GI NO: 21539551 NR Description: putative protein phosphatase type 2C
  misc_feature (1)..(288): NCBI GI NO: 18417190 NR Description: protein phosphatase 2C
  misc_feature (1)..(287): NCBI GI NO: 4336436 NR Description: protein phosphatase type 2C [Lotus japonicus]
  misc_feature (1)..(288): NCBI GI NO: 18399423 NR Description: protein phosphatase 2C
  misc_feature (1)..(288): NCBI GI NO: 25411985 NR Description: probable protein phosphatase 2C
  misc_feature (35)..(288): NCBI GI NO: 7488280 NR Description: protein phosphatase 2C homolog F20O9
  misc_feature (21)..(288): NCBI GI NO: 18395099 NR Description: protein phosphatase 2C
  misc_feature (25)..(287): NCBI GI NO: 15218759 NR Description: protein phosphatase 2C
MAGKEILHKVKDKVKDAFSSSGPETGKGKTKLSGKRVKHGYHLVKGKSNHPMEDYLVAEYRQVGEHDLGLFAIFDGHLGHTVPDFLSSHLFNNILSEPEFLSDPETAIRNAYQLTDQKILENAAELGRGGSTAVTAILIGSDKFVKLVVANVGDSRAVISKNGVAKQLSVDHEPNMERQTIEQKGGFVSNLPGDVPRVDGQLAVARAFGDRSLKKHLSSDPYVVEQTIDENTEFLILASDGLWKVMSNQEAVDEIKDCKDAQAAAKHLTEQAVNRKSKDDISVIVVKFMC

SEQ ID NO: 39004 - protein, 239 aa, Zea mays subsp. mays
  peptide (1)..(239): Ceres Seq. ID no. 12358550
  misc_feature (1)..(230): Pfam Name: Pfam Description:  Protein phosphatase 2C
  misc_feature (1)..(239): NCBI GI NO: 23307574 NR Description: putative protein phosphatase 2C homolog
  misc_feature (1)..(237): NCBI GI NO: 15232538 NR Description: protein phosphatase 2C
  misc_feature (1)..(237): NCBI GI NO: 21539551 NR Description: putative protein phosphatase type 2C
  misc_feature (1)..(237): NCBI GI NO: 18417190 NR Description: protein phosphatase 2C
  misc_feature (1)..(236): NCBI GI NO: 4336436 NR Description: protein phosphatase type 2C [Lotus japonicus]
  misc_feature (1)..(237): NCBI GI NO: 18399423 NR Description: protein phosphatase 2C
  misc_feature (1)..(237): NCBI GI NO: 25411985 NR Description: probable protein phosphatase 2C
  misc_feature (1)..(237): NCBI GI NO: 7488280 NR Description: protein phosphatase 2C homolog F20O9
  misc_feature (1)..(237): NCBI GI NO: 18395099 NR Description: protein phosphatase 2C
  misc_feature (1)..(236): NCBI GI NO: 15218759 NR Description: protein phosphatase 2C
MEDYLVAEYRQVGEHDLGLFAIFDGHLGHTVPDFLSSHLFNNILSEPEFLSDPETAIRNAYQLTDQKILENAAELGRGGSTAVTAILIGSDKFVKLVVANVGDSRAVISKNGVAKQLSVDHEPNMERQTIEQKGGFVSNLPGDVPRVDGQLAVARAFGDRSLKKHLSSDPYVVEQTIDENTEFLILASDGLWKVMSNQEAVDEIKDCKDAQAAAKHLTEQAVNRKSKDDISVIVVKFMC

SEQ ID NO: 39005 - DNA, 936 bp, Zea mays subsp. mays; identical to SEQ ID NO: 27950
  misc_feature (1)..(936): Ceres Seq. ID no. 12361812

SEQ ID NO: 39006 - protein, 119 aa, Zea mays subsp. mays; identical to SEQ ID NO: 27951
  peptide (1)..(119): Ceres Seq. ID no. 12361813
  misc_feature (14)..(117): Pfam Name: Pfam Description:  Microtubule associated protein 1A/1B
  misc_feature (1)..(118): NCBI GI NO: 40253647 NR Description: putative microtubial binding protein
  misc_feature (1)..(119): NCBI GI NO: 38344173 NR Description: OSJNBa0053K19.12
  misc_feature (1)..(117): NCBI GI NO: 34595981 NR Description: microtubule-associated protein 1 light chain 3
  misc_feature (1)..(119): NCBI GI NO: 15220686 NR Description: symbiosis-related protein, putative
  misc_feature (1)..(117): NCBI GI NO: 33146967 NR Description: putative microtubule associated protein
  misc_feature (1)..(118): NCBI GI NO: 21592920 NR Description: putative microtubule-associated protein
  misc_feature (1)..(119): NCBI GI NO: 18415813 NR Description: symbiosis-related like protein
  misc_feature (1)..(119): NCBI GI NO: 21553487 NR Description: symbiosis-related like protein
  misc_feature (1)..(118): NCBI GI NO: 15224577 NR Description: putative microtubule-associated protein
  misc_feature (1)..(118): NCBI GI NO: 7446944 NR Description: hypothetical protein F8K4

SEQ ID NO: 39007 - protein, 107 aa, Zea mays subsp. mays; identical to SEQ ID NO: 27952
  peptide (1)..(107): Ceres Seq. ID no. 12361814

SEQ ID NO: 39008 - DNA, 505 bp, Zea mays subsp. mays
  misc_feature (1)..(505): Ceres Seq. ID no. 1673146
ctaaacccaatccccttccacaccattcacacgtaccggcggagaaggaaggaattggtcgccgccgcctgcctctctcctcctcctccgtcagtggcggtggccacgccagtgctaagctaagctaagctaagcttgcgcaagtgacaagttctttggttggttggaggcagagccgccacatggcatcgtcgtcgcggctggatctcccgccggggttccgcttccaccccaccgacgaggaggtggtgtcgcactacctgacccacaaggcgctggacagccgcttctcctgcgtcgtcatcgccgacgccgacctcaacaagatcgagccgtgggatctcccaagcaaggctaagatgggcgagaaggagtggttcttcttctgccacaaggaccgcaagtacccgacggggatgcgcaccaaccgcgccaccgccagcgggtactggaaggccacggggaaggacaaggagatcttccgcggcagtagcagtagtccccg

SEQ ID NO: 39009 - protein, 107 aa, Zea mays subsp. mays
  peptide (1)..(107): Ceres Seq. ID no. 1673147
  misc_feature (9)..(102): Pfam Name: NAM Pfam Description: No apical meristem
  misc_feature (5)..(102): NCBI GI NO: 34394523 NR Description: putative GRAB2 protein(Geminivirus Rep A-binding)
  misc_feature (2)..(102): NCBI GI NO: 34902148 NR Description: Putative NAM (no apical meristem) protein
  misc_feature (1)..(101): NCBI GI NO: 38344965 NR Description: OSJNBa0072F16.10
  misc_feature (7)..(101): NCBI GI NO: 27529810 NR Description: OsNAC2 protein [Oryza sativa]
  misc_feature (4)..(104): NCBI GI NO: 15228570 NR Description: hypothetical protein; protein id: At3g29035
  misc_feature (6)..(104): NCBI GI NO: 22597158 NR Description: no apical meristem-like protein [Glycine max]
  misc_feature (7)..(102): NCBI GI NO: 30686737 NR Description: NAM (no apical meristem)-related protein
  misc_feature (6)..(102): NCBI GI NO: 4218537 NR Description: GRAB2 protein [Triticum sp.]
  misc_feature (1)..(104): NCBI GI NO: 30682048 NR Description: NAM (no apical meristem)-related protein
  misc_feature (7)..(104): NCBI GI NO: 15241819 NR Description: NAM / CUC2 - like protein; protein id: At5g39610
MASSSRLDLPPGFRFHPTDEEVVSHYLTHKALDSRFSCVVIADADLNKIEPWDLPSKAKMGEKEWFFFCHKDRKYPTGMRTNRATASGYWKATGKDKEIFRGSSSSP

SEQ ID NO: 39010 - DNA, 415 bp, Zea mays subsp. mays
  misc_feature (1)..(415): Ceres Seq. ID no. 1671992
aaacccagggtgagtctccggatccgtcgccgtctggtatccgtgtgctctcgtcgccgtcgccgtcgccgccgtctgactgcccccctcgcctcccgcggcgtcgggtctctggtgctgctgctgctgctgctgctgctgcgtgcagggcagtgatggcgacgaagaggagcgtgggcaccctcggcgaggcggatctgaaggggaagaaggtgttcgtgcgcgccgacctcaacgtcccgctcgacgatgcccagaagatcaccgacgacacccgcatccgcgcctccgtccccaccatcaagttcctcctcgagaagggcgccaaggtcatcctcgccagccacctgggtcgtccaaaaggtgtcaccccaaagtacagcttgaagcctcttgttccacgcttgtctgagct

SEQ ID NO: 39011 - protein, 137 aa, Zea mays subsp. mays
  peptide (1)..(137): Ceres Seq. ID no. 1671993
  misc_feature (54)..(136): Pfam Name: Pfam Description:  Phosphoglycerate kinase
  misc_feature (52)..(136): NCBI GI NO: 129916 NR Description: Phosphoglycerate kinase, cytosolic
  misc_feature (52)..(136): NCBI GI NO: 9230771 NR Description: cytosolic phosphoglycerate kinase [Pisum sativum]
  misc_feature (29)..(136): NCBI GI NO: 129915 NR Description: Phosphoglycerate kinase, chloroplast precursor
  misc_feature (52)..(136): NCBI GI NO: 15219412 NR Description: phosphoglycerate kinase, putative
  misc_feature (52)..(136): NCBI GI NO: 21536853 NR Description: phosphoglycerate kinase, putative
  misc_feature (47)..(136): NCBI GI NO: 3738261 NR Description: chloroplast phosphoglycerate kinase
  misc_feature (43)..(136): NCBI GI NO: 7434544 NR Description: phosphoglycerate kinase (EC 2
  misc_feature (9)..(136): NCBI GI NO: 15230595 NR Description: phosphoglycerate kinase, putative
  misc_feature (36)..(136): NCBI GI NO: 6056366 NR Description: phosphoglycerate kinase [Arabidopsis thaliana]
  misc_feature (36)..(136): NCBI GI NO: 15223484 NR Description: phosphoglycerate kinase, putative
TQGESPDPSPSGIRVLSSPSPSPPSDCPPRLPRRRVSGAAAAAAAAACRAVMATKRSVGTLGEADLKGKKVFVRADLNVPLDDAQKITDDTRIRASVPTIKFLLEKGAKVILASHLGRPKGVTPKYSLKPLVPRLSE

SEQ ID NO: 39012 - protein, 86 aa, Zea mays subsp. mays
  peptide (1)..(86): Ceres Seq. ID no. 1671994
  misc_feature (3)..(85): Pfam Name: Pfam Description:  Phosphoglycerate kinase
  misc_feature (1)..(85): NCBI GI NO: 129916 NR Description: Phosphoglycerate kinase, cytosolic
  misc_feature (1)..(85): NCBI GI NO: 9230771 NR Description: cytosolic phosphoglycerate kinase [Pisum sativum]
  misc_feature (1)..(85): NCBI GI NO: 129915 NR Description: Phosphoglycerate kinase, chloroplast precursor
  misc_feature (1)..(85): NCBI GI NO: 15219412 NR Description: phosphoglycerate kinase, putative
  misc_feature (1)..(85): NCBI GI NO: 21536853 NR Description: phosphoglycerate kinase, putative
  misc_feature (1)..(85): NCBI GI NO: 3738261 NR Description: chloroplast phosphoglycerate kinase
  misc_feature (1)..(85): NCBI GI NO: 7434544 NR Description: phosphoglycerate kinase (EC 2
  misc_feature (1)..(85): NCBI GI NO: 15230595 NR Description: phosphoglycerate kinase, putative
  misc_feature (1)..(85): NCBI GI NO: 6056366 NR Description: phosphoglycerate kinase [Arabidopsis thaliana]
  misc_feature (1)..(85): NCBI GI NO: 15223484 NR Description: phosphoglycerate kinase, putative
MATKRSVGTLGEADLKGKKVFVRADLNVPLDDAQKITDDTRIRASVPTIKFLLEKGAKVILASHLGRPKGVTPKYSLKPLVPRLSE

SEQ ID NO: 39013 - DNA, 1224 bp, Zea mays subsp. mays
  misc_feature (1)..(1224): Ceres Seq. ID no. 13494493
ccctttcctgcccctccccctccgcctttcctctctctcgctctcctcctctcctctcctctcctctccttccgcatcacacaccacgactcccaaccgccggttggctttgctgctccgagctcttcctcttccacacccgccctctctcttgggtcggcggccgagtgtctgcgtcgtccacggagatcagggatcggcggcggggtatggcgagggagcgacgggagataaagaggatagagagcgcggcggcgcggcaggtcacgttctccaagcgccgccgcggcctcttcaagaaggctgaggagctctccgtgctgtgcgatgccgacgtcgcgctcatcgtcttctcctccacgggaaagctctcccagttcgccagctccagtatgaatgagatcattgacaagtacagcacacattctaaaaacctggggaaagcagaacagccttcacttgacttgaacttagaacatagcaaatatgcaaatttgaatgagcaacttgtggaagcaagccttcgactcaggcagatgagaggtgaagaacttgagggattgagtgttgaagaactccagcaattggagaagaatctggaatctggtctgcatagggtgcttcaaacaaaggatcaacaattcttggaacagatcagcgacctcgaacaaaagagtacacaactggcagaggagaacaggcaactgaggaatcaagtatcccacatacccccagttggcaagcaatcagttgctgatactgaaaatgttatcgctgaagatgggcaatcctctgaatcagtcatgactgcgttgcattctgggagttcacaggataatgatgatggttcggatgtctctctaaaattagggctgccttgtgttgcatggaagtgaaaaaacaagatggtctgtgttgatctgggtggagctgcggcttcagcagataggcacttgtgttattgtcttatggacgacccccgactactgcaataatcttgcatcggaagcgagatcagttaacctgatttgtcatccttgtggcttcatgatgcgatgttgcgcttgtaccgtttgctaggatgttaactggactagaatcgtgtctacttttgtactgctcgtgaatcctatctactttgtgctatccaaagttatgacctaccacttgcatcggcatggcgcgccggccgtaagctgtgctcaagcatgcatgcttcgtgtt

SEQ ID NO: 39014 - protein, 297 aa, Zea mays subsp. mays
  peptide (1)..(297): Ceres Seq. ID no. 13494494
  misc_feature (176)..(240): Pfam Name: Pfam Description:  K-box region
  misc_feature (70)..(297): NCBI GI NO: 29372750 NR Description: putative MADS-domain transcription factor
  misc_feature (70)..(297): NCBI GI NO: 29372770 NR Description: putative MADS-domain transcription factor
  misc_feature (70)..(297): NCBI GI NO: 5295978 NR Description: MADS box-like protein
  misc_feature (70)..(292): NCBI GI NO: 29372754 NR Description: m21 [Zea mays]
  misc_feature (70)..(292): NCBI GI NO: 30983948 NR Description: SVP-like floral repressor
  misc_feature (70)..(292): NCBI GI NO: 30575602 NR Description: SVP-like floral repressor [Eucalyptus grandis]
  misc_feature (70)..(292): NCBI GI NO: 6652756 NR Description: MADS box protein [Paulownia kawakamii]
  misc_feature (70)..(292): NCBI GI NO: 16549058 NR Description: putative MADS-domain transcription factor MpMADS1
  misc_feature (53)..(291): NCBI GI NO: 33621117 NR Description: transcription factor MADS47
  misc_feature (72)..(291): NCBI GI NO: 12964064 NR Description: MADS box transcription factor [Oryza sativa]
LSCPSPSAFPLSRSPPLLSSPLLPHHTPRLPTAGWLCCSELFLFHTRPLSWVGGRVSASSTEIRDRRRGMARERREIKRIESAAARQVTFSKRRRGLFKKAEELSVLCDADVALIVFSSTGKLSQFASSSMNEIIDKYSTHSKNLGKAEQPSLDLNLEHSKYANLNEQLVEASLRLRQMRGEELEGLSVEELQQLEKNLESGLHRVLQTKDQQFLEQISDLEQKSTQLAEENRQLRNQVSHIPPVGKQSVADTENVIAEDGQSSESVMTALHSGSSQDNDDGSDVSLKLGLPCVAWK

SEQ ID NO: 39015 - protein, 228 aa, Zea mays subsp. mays
  peptide (1)..(228): Ceres Seq. ID no. 13494495
  misc_feature (107)..(171): Pfam Name: Pfam Description:  K-box region
  misc_feature (1)..(228): NCBI GI NO: 29372750 NR Description: putative MADS-domain transcription factor
  misc_feature (1)..(228): NCBI GI NO: 29372770 NR Description: putative MADS-domain transcription factor
  misc_feature (1)..(228): NCBI GI NO: 5295978 NR Description: MADS box-like protein
  misc_feature (1)..(223): NCBI GI NO: 29372754 NR Description: m21 [Zea mays]
  misc_feature (1)..(223): NCBI GI NO: 30983948 NR Description: SVP-like floral repressor
  misc_feature (1)..(223): NCBI GI NO: 30575602 NR Description: SVP-like floral repressor [Eucalyptus grandis]
  misc_feature (1)..(223): NCBI GI NO: 6652756 NR Description: MADS box protein [Paulownia kawakamii]
  misc_feature (1)..(223): NCBI GI NO: 16549058 NR Description: putative MADS-domain transcription factor MpMADS1
  misc_feature (1)..(222): NCBI GI NO: 33621117 NR Description: transcription factor MADS47
  misc_feature (3)..(222): NCBI GI NO: 12964064 NR Description: MADS box transcription factor [Oryza sativa]
MARERREIKRIESAAARQVTFSKRRRGLFKKAEELSVLCDADVALIVFSSTGKLSQFASSSMNEIIDKYSTHSKNLGKAEQPSLDLNLEHSKYANLNEQLVEASLRLRQMRGEELEGLSVEELQQLEKNLESGLHRVLQTKDQQFLEQISDLEQKSTQLAEENRQLRNQVSHIPPVGKQSVADTENVIAEDGQSSESVMTALHSGSSQDNDDGSDVSLKLGLPCVAWK

SEQ ID NO: 39016 - protein, 167 aa, Zea mays subsp. mays
  peptide (1)..(167): Ceres Seq. ID no. 13494496
  misc_feature (46)..(110): Pfam Name: Pfam Description:  K-box region
  misc_feature (1)..(167): NCBI GI NO: 29372750 NR Description: putative MADS-domain transcription factor
  misc_feature (1)..(167): NCBI GI NO: 29372770 NR Description: putative MADS-domain transcription factor
  misc_feature (1)..(167): NCBI GI NO: 5295978 NR Description: MADS box-like protein
  misc_feature (1)..(162): NCBI GI NO: 29372754 NR Description: m21 [Zea mays]
  misc_feature (1)..(162): NCBI GI NO: 30983948 NR Description: SVP-like floral repressor
  misc_feature (1)..(162): NCBI GI NO: 30575602 NR Description: SVP-like floral repressor [Eucalyptus grandis]
  misc_feature (1)..(162): NCBI GI NO: 6652756 NR Description: MADS box protein [Paulownia kawakamii]
  misc_feature (1)..(162): NCBI GI NO: 16549058 NR Description: putative MADS-domain transcription factor MpMADS1
  misc_feature (1)..(161): NCBI GI NO: 33621117 NR Description: transcription factor MADS47
  misc_feature (1)..(161): NCBI GI NO: 12964064 NR Description: MADS box transcription factor [Oryza sativa]
MNEIIDKYSTHSKNLGKAEQPSLDLNLEHSKYANLNEQLVEASLRLRQMRGEELEGLSVEELQQLEKNLESGLHRVLQTKDQQFLEQISDLEQKSTQLAEENRQLRNQVSHIPPVGKQSVADTENVIAEDGQSSESVMTALHSGSSQDNDDGSDVSLKLGLPCVAWK

SEQ ID NO: 39017 - DNA, 2817 bp, Zea mays subsp. mays
  misc_feature (1)..(2817): Ceres Seq. ID no. 12362502
gcacgagaccattacctagaacatcctaatcgaaaaccactccccatcttcccaaaccgccccacgcttcatcctcgcaagcctccccgaccccccagctcaacgagatccggcgagcgaattccatcttccccgaccaccagatcgcagcgatggagccggatcgggtcgccgcgggggcatcctcctcgccgcagccctcaccagcgccggccatgttcctgccggggcaaacgcgagaccatgagcggggagcggtcgactgcgcggatcccggcggagacctgaatcccgcaccgcctcagcaggctacagttgaggatgccgcggtgggcggcgatgtggagcaggaggagccaaagaaggaggcgatggcaggagtaggggaggctctccggagcttcatggaggagtttggggatcaaggagaggactccattatcttgtcaccgcggctgcaggagatttgtactcctgaccgccccactgccctgcgcttcttagggaagaaatataataacctcatggagagatacaagaagcaggtggtcaagtgttctgaggagtgtgaccctagatataacggcttgaagaagaagtacacagacgagtgtgcagagaggcggcgtctgtacaatgagcttattgagctaagaggtaacattagggtgttctgcagatgcagacctctgagctccaatgagctcgcccgtgggtgttcatcagtagttgagattgactcatcacaggagactgagctgcagtttgtccccaatgaaaaagaaaggaagccctttaagttcgaccatgtttttggcccagacgatgaccaagaggccgtgttttcagaaacagtgcccgttgttgggtcagtgatggatggtttcaacgtatgcatctttgcatatgggcaaacaggaaccgggaaaactttcacaatggaaggggttccagaaaataggggtgtaaattatagggctttggaagaattgttcagaatctcagagaaaagaagtgcatctgttgcatacacattttccgtaagcatcttggaagtttacaatgaaaagatcagggatcttcttgatgagagcaatgatcaatcaaaaaggttggatattaagcaaaatgctgatggaacacaagaagttcatggtttggttgaggctccaatttataacatagatggtgtgtgggagaaactgaagtttggcgctcaaaataggtctgttggctcaaccaatgctaatgaactcagcagccgctcccacagtttggttagggtcactgttaggagcgagcacttggtgacttatcagaggagcagaagccacatgtggttggttgaccttgctggaagtgagagaatagctaaaactggggtagaaggagataggctgaaagaatcacagttcatcaacaaatcactatctgccttgggtgatgttatatctgcccttgcctcaaaaaattcccatattccatacaggaattccaagctgactcatttgctccaaagctctttaggcggagattgcaagactctaatgttcgtgcagataagcccaagctcaatggattcaggagaaactctcagttcactcaattttgcgagtagagtccgagctgtagaacatggccctgctgctcgtaagcaagcggatccagctgggagtttgaagttaaagcagatgactgaaaaacttcagcatgaggaaaaggagaatgcacagctgaatcaaagcttgcagctgatgcaactgaagtatgcttctcgtgagaatgtcttcaggacactaaatgaaaaggtgaaggatgctgaacaagcatgcagaaattatcagcagcggattagagagctggaaaatgaattaggcaatgagaagagggcttctagggattctgctagatcctcaaggcccccacttgttcctacgagacagagacaacctcagggaaggactaacagcttcgcaccaccttcaggcccttctagatggaggctcaaagcccccgcaaaacacaacaaagagaacattcctgtggcgatgaataaaccaaatgctggggatgatcctaataagcctgtcggcagagcaaggcgtgtttcacttgctccggtgattcgacaaatccccatccagcccaagaggcgatcttcgatggcagtgctaccatccgtgagagagcatctttctgtgctaaacgacaagaaagcaggatctcgactgtcgcaagccaacatggcaagaggatcacttggggcatttggcttgaatttggttccaggaacacccctagcaggacatggtggacctgttgatgctacaccagatggagcaaagttcaggagatttgatttcggaagcagcagcaagttcacaagccctgccccaaatgtgggcatgtggaacaaaatggtcacgccgcagcagaagctgggaatggcaccggcaggagcgaagctgtgtttcagcatccagaaaagagttacgcctccacatgttcgggcgaaacctggattgggcatcttcgacccagctctgcgtgagaatatggtcgtggggagagccggcaatgcgctgcgggtgctcaaccccaagcgaaggcaatctgttatctaactcttgaagccaaaggtacagcagatgtttggacgttcaaacggagcgtgtggttcttagtgaaaccgtgaagatgttcttttcagcatctttaaatggattctgcttggttgttactagttgataggaaagctatgttaatactgttaatggaagttgttaattgtatttgttcgttactaagaatcgcttc

SEQ ID NO: 39018 - protein, 823 aa, Zea mays subsp. mays
  peptide (1)..(823): Ceres Seq. ID no. 12362503
  misc_feature (142)..(553): NCBI GI NO: 15240982 NR Description: kinesin-related protein; protein id: At5g27550.1
  misc_feature (102)..(684): NCBI GI NO: 15218418 NR Description: kinesin-related protein; protein id: At1g72250.1
  misc_feature (146)..(573): NCBI GI NO: 27476088 NR Description: Hypothetical protein
  misc_feature (146)..(602): NCBI GI NO: 15227252 NR Description: kinesin-related protein; protein id: At2g22610.1
  misc_feature (156)..(589): NCBI GI NO: 18421069 NR Description: kinesin-related protein; protein id: At5g27000.1
  misc_feature (156)..(589): NCBI GI NO: 11358474 NR Description: kinesin-like heavy chain
  misc_feature (71)..(501): NCBI GI NO: 26996539 NR Description: Unknown (protein for MGC:47520) [Homo sapiens]
  misc_feature (71)..(501): NCBI GI NO: 3249735 NR Description: microtubule-based motor [Homo sapiens]
  misc_feature (71)..(501): NCBI GI NO: 19923321 NR Description: kinesin family member C3 [Homo sapiens]
  misc_feature (71)..(501): NCBI GI NO: 14124976 NR Description: Similar to kinesin family member C3 [Homo sapiens]
MEPDRVAAGASSSPQPSPAPAMFLPGQTRDHERGAVDCADPGGDLNPAPPQQATVEDAAVGGDVEQEEPKKEAMAGVGEALRSFMEEFGDQGEDSIILSPRLQEICTPDRPTALRFLGKKYNNLMERYKKQVVKCSEECDPRYNGLKKKYTDECAERRRLYNELIELRGNIRVFCRCRPLSSNELARGCSSVVEIDSSQETELQFVPNEKERKPFKFDHVFGPDDDQEAVFSETVPVVGSVMDGFNVCIFAYGQTGTGKTFTMEGVPENRGVNYRALEELFRISEKRSASVAYTFSVSILEVYNEKIRDLLDESNDQSKRLDIKQNADGTQEVHGLVEAPIYNIDGVWEKLKFGAQNRSVGSTNANELSSRSHSLVRVTVRSEHLVTYQRSRSHMWLVDLAGSERIAKTGVEGDRLKESQFINKSLSALGDVISALASKNSHIPYRNSKLTHLLQSSLGGDCKTLMFVQISPSSMDSGETLSSLNFASRVRAVEHGPAARKQADPAGSLKLKQMTEKLQHEEKENAQLNQSLQLMQLKYASRENVFRTLNEKVKDAEQACRNYQQRIRELENELGNEKRASRDSARSSRPPLVPTRQRQPQGRTNSFAPPSGPSRWRLKAPAKHNKENIPVAMNKPNAGDDPNKPVGRARRVSLAPVIRQIPIQPKRRSSMAVLPSVREHLSVLNDKKAGSRLSQANMARGSLGAFGLNLVPGTPLAGHGGPVDATPDGAKFRRFDFGSSSKFTSPAPNVGMWNKMVTPQQKLGMAPAGAKLCFSIQKRVTPPHVRAKPGLGIFDPALRENMVVGRAGNALRVLNPKRRQSVI

SEQ ID NO: 39019 - protein, 802 aa, Zea mays subsp. mays
  peptide (1)..(802): Ceres Seq. ID no. 12362504
  misc_feature (121)..(532): NCBI GI NO: 15240982 NR Description: kinesin-related protein; protein id: At5g27550.1
  misc_feature (81)..(663): NCBI GI NO: 15218418 NR Description: kinesin-related protein; protein id: At1g72250.1
  misc_feature (125)..(552): NCBI GI NO: 27476088 NR Description: Hypothetical protein
  misc_feature (125)..(581): NCBI GI NO: 15227252 NR Description: kinesin-related protein; protein id: At2g22610.1
  misc_feature (135)..(568): NCBI GI NO: 18421069 NR Description: kinesin-related protein; protein id: At5g27000.1
  misc_feature (135)..(568): NCBI GI NO: 11358474 NR Description: kinesin-like heavy chain
  misc_feature (50)..(480): NCBI GI NO: 26996539 NR Description: Unknown (protein for MGC:47520) [Homo sapiens]
  misc_feature (50)..(480): NCBI GI NO: 3249735 NR Description: microtubule-based motor [Homo sapiens]
  misc_feature (50)..(480): NCBI GI NO: 14124976 NR Description: Similar to kinesin family member C3 [Homo sapiens]
  misc_feature (50)..(480): NCBI GI NO: 19923321 NR Description: kinesin family member C3 [Homo sapiens]
MFLPGQTRDHERGAVDCADPGGDLNPAPPQQATVEDAAVGGDVEQEEPKKEAMAGVGEALRSFMEEFGDQGEDSIILSPRLQEICTPDRPTALRFLGKKYNNLMERYKKQVVKCSEECDPRYNGLKKKYTDECAERRRLYNELIELRGNIRVFCRCRPLSSNELARGCSSVVEIDSSQETELQFVPNEKERKPFKFDHVFGPDDDQEAVFSETVPVVGSVMDGFNVCIFAYGQTGTGKTFTMEGVPENRGVNYRALEELFRISEKRSASVAYTFSVSILEVYNEKIRDLLDESNDQSKRLDIKQNADGTQEVHGLVEAPIYNIDGVWEKLKFGAQNRSVGSTNANELSSRSHSLVRVTVRSEHLVTYQRSRSHMWLVDLAGSERIAKTGVEGDRLKESQFINKSLSALGDVISALASKNSHIPYRNSKLTHLLQSSLGGDCKTLMFVQISPSSMDSGETLSSLNFASRVRAVEHGPAARKQADPAGSLKLKQMTEKLQHEEKENAQLNQSLQLMQLKYASRENVFRTLNEKVKDAEQACRNYQQRIRELENELGNEKRASRDSARSSRPPLVPTRQRQPQGRTNSFAPPSGPSRWRLKAPAKHNKENIPVAMNKPNAGDDPNKPVGRARRVSLAPVIRQIPIQPKRRSSMAVLPSVREHLSVLNDKKAGSRLSQANMARGSLGAFGLNLVPGTPLAGHGGPVDATPDGAKFRRFDFGSSSKFTSPAPNVGMWNKMVTPQQKLGMAPAGAKLCFSIQKRVTPPHVRAKPGLGIFDPALRENMVVGRAGNALRVLNPKRRQSVI

SEQ ID NO: 39020 - protein, 750 aa, Zea mays subsp. mays
  peptide (1)..(750): Ceres Seq. ID no. 12362505
  misc_feature (69)..(480): NCBI GI NO: 15240982 NR Description: kinesin-related protein; protein id: At5g27550.1
  misc_feature (29)..(611): NCBI GI NO: 15218418 NR Description: kinesin-related protein; protein id: At1g72250.1
  misc_feature (73)..(500): NCBI GI NO: 27476088 NR Description: Hypothetical protein
  misc_feature (73)..(529): NCBI GI NO: 15227252 NR Description: kinesin-related protein; protein id: At2g22610.1
  misc_feature (83)..(516): NCBI GI NO: 18421069 NR Description: kinesin-related protein; protein id: At5g27000.1
  misc_feature (83)..(516): NCBI GI NO: 11358474 NR Description: kinesin-like heavy chain
  misc_feature (1)..(428): NCBI GI NO: 26996539 NR Description: Unknown (protein for MGC:47520) [Homo sapiens]
  misc_feature (1)..(428): NCBI GI NO: 3249735 NR Description: microtubule-based motor [Homo sapiens]
  misc_feature (1)..(428): NCBI GI NO: 14124976 NR Description: Similar to kinesin family member C3 [Homo sapiens]
  misc_feature (1)..(428): NCBI GI NO: 19923321 NR Description: kinesin family member C3 [Homo sapiens]
MAGVGEALRSFMEEFGDQGEDSIILSPRLQEICTPDRPTALRFLGKKYNNLMERYKKQVVKCSEECDPRYNGLKKKYTDECAERRRLYNELIELRGNIRVFCRCRPLSSNELARGCSSVVEIDSSQETELQFVPNEKERKPFKFDHVFGPDDDQEAVFSETVPVVGSVMDGFNVCIFAYGQTGTGKTFTMEGVPENRGVNYRALEELFRISEKRSASVAYTFSVSILEVYNEKIRDLLDESNDQSKRLDIKQNADGTQEVHGLVEAPIYNIDGVWEKLKFGAQNRSVGSTNANELSSRSHSLVRVTVRSEHLVTYQRSRSHMWLVDLAGSERIAKTGVEGDRLKESQFINKSLSALGDVISALASKNSHIPYRNSKLTHLLQSSLGGDCKTLMFVQISPSSMDSGETLSSLNFASRVRAVEHGPAARKQADPAGSLKLKQMTEKLQHEEKENAQLNQSLQLMQLKYASRENVFRTLNEKVKDAEQACRNYQQRIRELENELGNEKRASRDSARSSRPPLVPTRQRQPQGRTNSFAPPSGPSRWRLKAPAKHNKENIPVAMNKPNAGDDPNKPVGRARRVSLAPVIRQIPIQPKRRSSMAVLPSVREHLSVLNDKKAGSRLSQANMARGSLGAFGLNLVPGTPLAGHGGPVDATPDGAKFRRFDFGSSSKFTSPAPNVGMWNKMVTPQQKLGMAPAGAKLCFSIQKRVTPPHVRAKPGLGIFDPALRENMVVGRAGNALRVLNPKRRQSVI

SEQ ID NO: 39021 - DNA, 1757 bp, Zea mays subsp. mays
  misc_feature (1)..(1757): Ceres Seq. ID no. 12381532
aaatcaatgcagatttgagcgtccttccaaggacgcccaaacgatctctgtaccgcacctgcacggctgcacctaccccacttggtggtcgtctgggtggcgacgccggcgatgatacgcgccgggtcgacgaccgacgtcatgatcgtgctgctgacggcgttcctgctggagtacctgcccaagatctaccacgccgtccgcgtcctgcgccggatgcagggcgtctccggctacctcttcggcaccatctggtgggggatcgcgctcaacctcatggcctacttcgtcgccgctcacgcggtgggcgcgtgttggtacctgctcggcgcgcagcgggccaccaagtgcctcagggagcagtgcgcccaggccgggagcgggtgcgcgccctgggcgctggcgttcgcggagccgctctactacggcgccaccgccagcagcgtgggggcgccggccaggctcgcctgggccggcaacgccacggctaggggcacgtgcctcgacagcgccgacaactaccagtacggggcctaccagtggactgtcatgctggtggccaaccccagcagggtcgagagggttctgctccccatcttctggggactaatgactctcagcacctttgggaatctggagagcacgacggagtggctggagatcgtgttcaacatcgtcaccatcaccggcgggctgattctcgtgacaatgctcatagggaacatcaaggtgttcctgaacgcgacgacgtcgaagaagcaggcgatgcacacgcggctgcgcagcgtggagctgtggatgaagcgcaaggacctgcccaggagctaccggcaccgggtgcgccagtacaagcggcagcggtgggcggccacgcgcggcgtcgacgagtgccgcatcgtccgtgacctgccggaggggctccgccgggacatcaagtaccacctctgcctcggcctcgtgcgccaggtgccgctgttccaacacatggacgacctggtgctcgagaacatctgcgacagggtcaagtccctcattttccccaaaggagaagttattgtcagagaaggagacccagtgaagaggatgctgttcatcgtgcgcggccacctgcagagcagccaggtgctccgcaacggcgccgagagctgctgcatgctggggccgggcaacttcagcggcgacgagctcctgtcgtggtgcctgcgccggccgttcctggagcggctgccggcgtcgtcgtccacgctggccacgctggagagcacggaggccttcgggctggacgccgcggacgtcaagtacgtcacgcagcacttccggtacaccttcaccaacgacaaggtgcggcgcagcgcgcgctactactcgcccgggtggcgcacgtgggcggccgtggcggtgcagctcgcgtggcgccgctacaagcaccgcaagacgctcgcgtcgctgtcgttcatccgcccgcgccgcccgctctcgcggtgctcgtcgctcggcgaggagaagctacgcctctataccgcgctgctcacgtcgcccaagcccaaccaagacgacctgctgtgactgagatgcatgcctgcagtctgaacaacgcgcgtctgttcagcggagttgaagcaaaatgcagcgagatggaagaagctggttctctatagtaaacgtgcatgtcagaaagaactcgagcattggagctccagcctctatgtgtacggtactggttgacaggttctctgtgacatgtgtctcgaattgct

SEQ ID NO: 39022 - protein, 484 aa, Zea mays subsp. mays
  peptide (1)..(484): Ceres Seq. ID no. 12381533
  misc_feature (303)..(404): Pfam Name: Pfam Description:  Cyclic nucleotide-binding domain
  misc_feature (1)..(484): NCBI GI NO: 34910098 NR Description: putative cyclic nucleotide and calmodulin-regulatedion channel
  misc_feature (1)..(482): NCBI GI NO: 30961805 NR Description: putative cyclic nucleotide and calmodulin-regulatedion channel protein
  misc_feature (1)..(482): NCBI GI NO: 15239581 NR Description: cyclic nucleotide-regulated ion channel
  misc_feature (1)..(479): NCBI GI NO: 13236666 NR Description: putative cyclic nucleotide and calmodulin-regulatedion channel protein
  misc_feature (1)..(479): NCBI GI NO: 15242291 NR Description: cyclic nucleotide-regulated ion channel
  misc_feature (70)..(479): NCBI GI NO: 30961811 NR Description: putative cyclic nucleotide and calmodulin-regulatedion channel protein
  misc_feature (1)..(441): NCBI GI NO: 15226370 NR Description: cyclic nucleotide-regulated ion channel, putative
  misc_feature (1)..(447): NCBI GI NO: 25412226 NR Description: hypothetical protein At2g24610
  misc_feature (1)..(447): NCBI GI NO: 30682497 NR Description: cyclic nucleotide-regulated ion channel, putative
  misc_feature (1)..(464): NCBI GI NO: 30688654 NR Description: cyclic nucleotide-regulated ion channel, putative
MIRAGSTTDVMIVLLTAFLLEYLPKIYHAVRVLRRMQGVSGYLFGTIWWGIALNLMAYFVAAHAVGACWYLLGAQRATKCLREQCAQAGSGCAPWALAFAEPLYYGATASSVGAPARLAWAGNATARGTCLDSADNYQYGAYQWTVMLVANPSRVERVLLPIFWGLMTLSTFGNLESTTEWLEIVFNIVTITGGLILVTMLIGNIKVFLNATTSKKQAMHTRLRSVELWMKRKDLPRSYRHRVRQYKRQRWAATRGVDECRIVRDLPEGLRRDIKYHLCLGLVRQVPLFQHMDDLVLENICDRVKSLIFPKGEVIVREGDPVKRMLFIVRGHLQSSQVLRNGAESCCMLGPGNFSGDELLSWCLRRPFLERLPASSSTLATLESTEAFGLDAADVKYVTQHFRYTFTNDKVRRSARYYSPGWRTWAAVAVQLAWRRYKHRKTLASLSFIRPRRPLSRCSSLGEEKLRLYTALLTSPKPNQDDLL

SEQ ID NO: 39023 - protein, 474 aa, Zea mays subsp. mays
  peptide (1)..(474): Ceres Seq. ID no. 12381534
  misc_feature (293)..(394): Pfam Name: Pfam Description:  Cyclic nucleotide-binding domain
  misc_feature (1)..(474): NCBI GI NO: 34910098 NR Description: putative cyclic nucleotide and calmodulin-regulatedion channel
  misc_feature (1)..(472): NCBI GI NO: 30961805 NR Description: putative cyclic nucleotide and calmodulin-regulatedion channel protein
  misc_feature (1)..(472): NCBI GI NO: 15239581 NR Description: cyclic nucleotide-regulated ion channel
  misc_feature (1)..(469): NCBI GI NO: 13236666 NR Description: putative cyclic nucleotide and calmodulin-regulatedion channel protein
  misc_feature (1)..(469): NCBI GI NO: 15242291 NR Description: cyclic nucleotide-regulated ion channel
  misc_feature (60)..(469): NCBI GI NO: 30961811 NR Description: putative cyclic nucleotide and calmodulin-regulatedion channel protein
  misc_feature (1)..(431): NCBI GI NO: 15226370 NR Description: cyclic nucleotide-regulated ion channel, putative
  misc_feature (1)..(437): NCBI GI NO: 25412226 NR Description: hypothetical protein At2g24610
  misc_feature (1)..(437): NCBI GI NO: 30682497 NR Description: cyclic nucleotide-regulated ion channel, putative
  misc_feature (1)..(454): NCBI GI NO: 30688654 NR Description: cyclic nucleotide-regulated ion channel, putative
MIVLLTAFLLEYLPKIYHAVRVLRRMQGVSGYLFGTIWWGIALNLMAYFVAAHAVGACWYLLGAQRATKCLREQCAQAGSGCAPWALAFAEPLYYGATASSVGAPARLAWAGNATARGTCLDSADNYQYGAYQWTVMLVANPSRVERVLLPIFWGLMTLSTFGNLESTTEWLEIVFNIVTITGGLILVTMLIGNIKVFLNATTSKKQAMHTRLRSVELWMKRKDLPRSYRHRVRQYKRQRWAATRGVDECRIVRDLPEGLRRDIKYHLCLGLVRQVPLFQHMDDLVLENICDRVKSLIFPKGEVIVREGDPVKRMLFIVRGHLQSSQVLRNGAESCCMLGPGNFSGDELLSWCLRRPFLERLPASSSTLATLESTEAFGLDAADVKYVTQHFRYTFTNDKVRRSARYYSPGWRTWAAVAVQLAWRRYKHRKTLASLSFIRPRRPLSRCSSLGEEKLRLYTALLTSPKPNQDDLL

SEQ ID NO: 39024 - protein, 449 aa, Zea mays subsp. mays
  peptide (1)..(449): Ceres Seq. ID no. 12381535
  misc_feature (268)..(369): Pfam Name: Pfam Description:  Cyclic nucleotide-binding domain
  misc_feature (1)..(449): NCBI GI NO: 34910098 NR Description: putative cyclic nucleotide and calmodulin-regulatedion channel
  misc_feature (1)..(447): NCBI GI NO: 30961805 NR Description: putative cyclic nucleotide and calmodulin-regulatedion channel protein
  misc_feature (1)..(447): NCBI GI NO: 15239581 NR Description: cyclic nucleotide-regulated ion channel
  misc_feature (1)..(444): NCBI GI NO: 13236666 NR Description: putative cyclic nucleotide and calmodulin-regulatedion channel protein
  misc_feature (1)..(444): NCBI GI NO: 15242291 NR Description: cyclic nucleotide-regulated ion channel
  misc_feature (35)..(444): NCBI GI NO: 30961811 NR Description: putative cyclic nucleotide and calmodulin-regulatedion channel protein
  misc_feature (1)..(406): NCBI GI NO: 15226370 NR Description: cyclic nucleotide-regulated ion channel, putative
  misc_feature (1)..(412): NCBI GI NO: 25412226 NR Description: hypothetical protein At2g24610
  misc_feature (1)..(412): NCBI GI NO: 30682497 NR Description: cyclic nucleotide-regulated ion channel, putative
  misc_feature (1)..(429): NCBI GI NO: 30688654 NR Description: cyclic nucleotide-regulated ion channel, putative
MQGVSGYLFGTIWWGIALNLMAYFVAAHAVGACWYLLGAQRATKCLREQCAQAGSGCAPWALAFAEPLYYGATASSVGAPARLAWAGNATARGTCLDSADNYQYGAYQWTVMLVANPSRVERVLLPIFWGLMTLSTFGNLESTTEWLEIVFNIVTITGGLILVTMLIGNIKVFLNATTSKKQAMHTRLRSVELWMKRKDLPRSYRHRVRQYKRQRWAATRGVDECRIVRDLPEGLRRDIKYHLCLGLVRQVPLFQHMDDLVLENICDRVKSLIFPKGEVIVREGDPVKRMLFIVRGHLQSSQVLRNGAESCCMLGPGNFSGDELLSWCLRRPFLERLPASSSTLATLESTEAFGLDAADVKYVTQHFRYTFTNDKVRRSARYYSPGWRTWAAVAVQLAWRRYKHRKTLASLSFIRPRRPLSRCSSLGEEKLRLYTALLTSPKPNQDDLL

SEQ ID NO: 39025 - DNA, 2095 bp, Zea mays subsp. mays
  misc_feature (1)..(2095): Ceres Seq. ID no. 12417312
gcacgagaccattacctagaacatcctaatcaaaaaaaatcacaacccgcactcgcccaaaaccctactgctcccgctccgctcctgcttggtcgagatcacttcgccgccgccgctttcgagatctccgggtggagcaagcgaggaaaggcagcagccatgtcgctccgcgtgctgaaccctaacgccgaggtgctcaacaagtcggcagcgctgcacatgaacatcaacgccgccaagggcctccaggacgtgctcaagaccaacctcggccccaagggcaccatcaagatgcttgtgggtggagctggtgacctgaagctgacgaaggatgggaacaccctcttgaaggaaatgcaaattcagaacccaactgcaatcatgattgcgaggacggctgtggcacaggatgacacaagtggtgatggcacaacctccactgtgctatttatcggggagctaatgaagcagtccgagcggtgcatcgatgaaggaactcatccaaggttcttggttgatggttttgatgttgctaagagagcgtgtcttgattttctcgataagttcaagacgccagtcgttactggtgatgaacctgacagagataccttaaaaatgatagcaagaacaactcttaggacaaagttgtatgaagggctggctgatcagttgactgatattgttgtgaatgcagttctctgcattcgcaaaccagatgaaccaattgatctgtttatggtggaaataatgcacatgcgccacaaatttgatgttgacacccgtctggttgagggtctggtcctggaccacggttctcgtcaccctgacatgaagcgcagggcagagaattgttacatcttgacctgcaatgtctcattagaatatgagaaaagtgaaatcaatgcaggatttttttactcaaacgcagaacaaagagagaagatggttgctgcagagagacgccaagttgatgaacgtgtcaaacagattattgaattgaaaaataaggtttgtgctggaggcgataaaaactttgtggtgatcaatcagaagggcattgaccctccatctctggatctccttgctagagcggggattattgctcttcgaagagcaaagaggagaaatatggagaggcttgtgctagcatgtggtggtgaagctgtcaattcagttgatgagttgactgaagattgtctaggctgggctggtcttgtctatgagcatgttcttggagaagaaaagtacacatttgtggagaatgtgaaaaatcctcgctcttgtactatactgattaaaggacctaatgaccataccattgcacaaatcaaggatgctgtccgtgatggtctaagatctgttaagaacacagttgaggatgaagcagttgtgctgggtgctggtgcttttgaggttgctgcaaagaagcatcttatcgacaatgtgaagaaaaccgtcaaaggacgagcacaacttggggtggaggcgtttgcggaagctcttcttgttatacccaagactttggctgagaactctggtttagatactcaagatgtgattgtttctctccagaatgagcatgaccgtggattagttgtggggttgaaccatcactctggggatccgattgatccccagatggaaggcatcttcgacaactactctgtgaagcgccagatcatcaattctggacccatcattgcatcccagttgctgcttgtggatgaagtgatcagggcaggccgcaacatgaggaaaccgacttagatttttgtcgccacctagccgagacttatttgttctaccttttgttttggttttgtgcctagtagtgatctggatgatacgtttgacttgagttggtcccatttcacgaagcaggtcgcattcgcttttttttttgggattactgcgtgcttccattttaacatgggattttagttttatcgatggttttaacatcctcctatgaggaaacaaagcctctagagagacgaggttgccttcccgaagttagtgccaccaaacttgctgcatggaacataaagaagcaatgtttataacaatgttattatcaagtaatccgatgtgatgg

SEQ ID NO: 39026 - protein, 588 aa, Zea mays subsp. mays
  peptide (1)..(588): Ceres Seq. ID no. 12417313
  misc_feature (82)..(582): Pfam Name: Pfam Description:  TCP-1/cpn60 chaperonin family
  misc_feature (54)..(588): NCBI GI NO: 15232923 NR Description: putative chaperonin; protein id: At3g02530
  misc_feature (54)..(588): NCBI GI NO: 14423532 NR Description: putative chaperonin [Arabidopsis thaliana]
  misc_feature (54)..(588): NCBI GI NO: 21536971 NR Description: putative chaperonin [Arabidopsis thaliana]
  misc_feature (54)..(588): NCBI GI NO: 30685661 NR Description: chaperonin, putative [Arabidopsis thaliana]
  misc_feature (54)..(588): NCBI GI NO: 11277144 NR Description: TCP-1 chaperonin-like protein
  misc_feature (55)..(586): NCBI GI NO: 6753324 NR Description: chaperonin subunit 6a
  misc_feature (55)..(586): NCBI GI NO: 28277547 NR Description: Similar to chaperonin containing TCP1, subunit 6A
  misc_feature (55)..(586): NCBI GI NO: 4502643 NR Description: chaperonin containing TCP1, subunit 6A
  misc_feature (55)..(586): NCBI GI NO: 6094438 NR Description: T-complex protein 1, zeta subunit
  misc_feature (55)..(586): NCBI GI NO: 14517632 NR Description: acute morphine dependence related protein 2
ARDHYLEHPNQKKSQPALAQNPTAPAPLLLGRDHFAAAAFEISGWSKRGKAAAMSLRVLNPNAEVLNKSAALHMNINAAKGLQDVLKTNLGPKGTIKMLVGGAGDLKLTKDGNTLLKEMQIQNPTAIMIARTAVAQDDTSGDGTTSTVLFIGELMKQSERCIDEGTHPRFLVDGFDVAKRACLDFLDKFKTPVVTGDEPDRDTLKMIARTTLRTKLYEGLADQLTDIVVNAVLCIRKPDEPIDLFMVEIMHMRHKFDVDTRLVEGLVLDHGSRHPDMKRRAENCYILTCNVSLEYEKSEINAGFFYSNAEQREKMVAAERRQVDERVKQIIELKNKVCAGGDKNFVVINQKGIDPPSLDLLARAGIIALRRAKRRNMERLVLACGGEAVNSVDELTEDCLGWAGLVYEHVLGEEKYTFVENVKNPRSCTILIKGPNDHTIAQIKDAVRDGLRSVKNTVEDEAVVLGAGAFEVAAKKHLIDNVKKTVKGRAQLGVEAFAEALLVIPKTLAENSGLDTQDVIVSLQNEHDRGLVVGLNHHSGDPIDPQMEGIFDNYSVKRQIINSGPIIASQLLLVDEVIRAGRNMRKPT

SEQ ID NO: 39027 - protein, 535 aa, Zea mays subsp. mays
  peptide (1)..(535): Ceres Seq. ID no. 12417314
  misc_feature (29)..(529): Pfam Name: Pfam Description:  TCP-1/cpn60 chaperonin family
  misc_feature (1)..(535): NCBI GI NO: 15232923 NR Description: putative chaperonin; protein id: At3g02530
  misc_feature (1)..(535): NCBI GI NO: 14423532 NR Description: putative chaperonin [Arabidopsis thaliana]
  misc_feature (1)..(535): NCBI GI NO: 21536971 NR Description: putative chaperonin [Arabidopsis thaliana]
  misc_feature (1)..(535): NCBI GI NO: 30685661 NR Description: chaperonin, putative [Arabidopsis thaliana]
  misc_feature (1)..(535): NCBI GI NO: 11277144 NR Description: TCP-1 chaperonin-like protein
  misc_feature (2)..(533): NCBI GI NO: 6753324 NR Description: chaperonin subunit 6a
  misc_feature (2)..(533): NCBI GI NO: 28277547 NR Description: Similar to chaperonin containing TCP1, subunit 6A
  misc_feature (2)..(533): NCBI GI NO: 4502643 NR Description: chaperonin containing TCP1, subunit 6A
  misc_feature (2)..(533): NCBI GI NO: 6094438 NR Description: T-complex protein 1, zeta subunit
  misc_feature (2)..(533): NCBI GI NO: 14517632 NR Description: acute morphine dependence related protein 2
MSLRVLNPNAEVLNKSAALHMNINAAKGLQDVLKTNLGPKGTIKMLVGGAGDLKLTKDGNTLLKEMQIQNPTAIMIARTAVAQDDTSGDGTTSTVLFIGELMKQSERCIDEGTHPRFLVDGFDVAKRACLDFLDKFKTPVVTGDEPDRDTLKMIARTTLRTKLYEGLADQLTDIVVNAVLCIRKPDEPIDLFMVEIMHMRHKFDVDTRLVEGLVLDHGSRHPDMKRRAENCYILTCNVSLEYEKSEINAGFFYSNAEQREKMVAAERRQVDERVKQIIELKNKVCAGGDKNFVVINQKGIDPPSLDLLARAGIIALRRAKRRNMERLVLACGGEAVNSVDELTEDCLGWAGLVYEHVLGEEKYTFVENVKNPRSCTILIKGPNDHTIAQIKDAVRDGLRSVKNTVEDEAVVLGAGAFEVAAKKHLIDNVKKTVKGRAQLGVEAFAEALLVIPKTLAENSGLDTQDVIVSLQNEHDRGLVVGLNHHSGDPIDPQMEGIFDNYSVKRQIINSGPIIASQLLLVDEVIRAGRNMRKPT

SEQ ID NO: 39028 - protein, 515 aa, Zea mays subsp. mays
  peptide (1)..(515): Ceres Seq. ID no. 12417315
  misc_feature (9)..(509): Pfam Name: Pfam Description:  TCP-1/cpn60 chaperonin family
  misc_feature (1)..(515): NCBI GI NO: 15232923 NR Description: putative chaperonin; protein id: At3g02530
  misc_feature (1)..(515): NCBI GI NO: 14423532 NR Description: putative chaperonin [Arabidopsis thaliana]
  misc_feature (1)..(515): NCBI GI NO: 21536971 NR Description: putative chaperonin [Arabidopsis thaliana]
  misc_feature (1)..(515): NCBI GI NO: 30685661 NR Description: chaperonin, putative [Arabidopsis thaliana]
  misc_feature (1)..(515): NCBI GI NO: 11277144 NR Description: TCP-1 chaperonin-like protein
  misc_feature (1)..(513): NCBI GI NO: 6753324 NR Description: chaperonin subunit 6a
  misc_feature (1)..(513): NCBI GI NO: 28277547 NR Description: Similar to chaperonin containing TCP1, subunit 6A
  misc_feature (1)..(513): NCBI GI NO: 4502643 NR Description: chaperonin containing TCP1, subunit 6A
  misc_feature (1)..(513): NCBI GI NO: 6094438 NR Description: T-complex protein 1, zeta subunit
  misc_feature (1)..(513): NCBI GI NO: 14517632 NR Description: acute morphine dependence related protein 2
MNINAAKGLQDVLKTNLGPKGTIKMLVGGAGDLKLTKDGNTLLKEMQIQNPTAIMIARTAVAQDDTSGDGTTSTVLFIGELMKQSERCIDEGTHPRFLVDGFDVAKRACLDFLDKFKTPVVTGDEPDRDTLKMIARTTLRTKLYEGLADQLTDIVVNAVLCIRKPDEPIDLFMVEIMHMRHKFDVDTRLVEGLVLDHGSRHPDMKRRAENCYILTCNVSLEYEKSEINAGFFYSNAEQREKMVAAERRQVDERVKQIIELKNKVCAGGDKNFVVINQKGIDPPSLDLLARAGIIALRRAKRRNMERLVLACGGEAVNSVDELTEDCLGWAGLVYEHVLGEEKYTFVENVKNPRSCTILIKGPNDHTIAQIKDAVRDGLRSVKNTVEDEAVVLGAGAFEVAAKKHLIDNVKKTVKGRAQLGVEAFAEALLVIPKTLAENSGLDTQDVIVSLQNEHDRGLVVGLNHHSGDPIDPQMEGIFDNYSVKRQIINSGPIIASQLLLVDEVIRAGRNMRKPT

SEQ ID NO: 39029 - DNA, 887 bp, Zea mays subsp. mays
  misc_feature (1)..(887): Ceres Seq. ID no. 12367194
gtacagacagccgccgccgccggcggtggttcacaatcacaagccaccgctactccaccaaaccgcacggaggcggaacccaaattccaacccgactcctccagccaacagcccaagcgaagcgagggcccttgagctcccctcccgcatgacgtccccatggtgcctctcggcaccgcccgccgccccgcccgtggcggctgcgcccggcgccctcggcttctccgcgtctgcctccaccctcgcgcgtgtgccggttcccggaagtaggcggcgcaggtggaacgcgctcgtggtctgcgcggcccccgatgaggagaagattacgaagcggtcgcccctggatttccccatcgaatgggagagaccaaaacctgggaggagacctgatatcttccctaagtttagcccaatgaagacaccattaccgcatccattgccagctgatgatcctctggatgatgatgaagaggaagaggaagaacaagcaccacctcaggaggagccacaagaggacgatccagacaaggaagaacctgaggaagatgacccagataagccaaccgagtaattttcgattggcttgaacagtgatagattaggcaatggggaaaaaatgtgctacgtctttggagcgcgcaagagatctcagttctatttgaactgccggcttatataggctctagatgcataagtttgttatatgacctctgagcttttctaaagctatgaaagttctgtttcacggattacagattacagtgcgatatctgtgatgacatgtattctcactttttctatgttttgagtaagcaacgtgtacattgcaaaacctgtatttggtgtagttgcatcattgatttgtgaaacggatactgagatttttg

SEQ ID NO: 39030 - protein, 189 aa, Zea mays subsp. mays
  peptide (1)..(189): Ceres Seq. ID no. 12367195
  misc_feature (44)..(185): NCBI GI NO: 18404214 NR Description: Expressed protein; protein id: At3g24506
  misc_feature (44)..(185): NCBI GI NO: 21553725 NR Description: unknown [Arabidopsis thaliana]
  misc_feature (71)..(186): NCBI GI NO: 18398354 NR Description: expressed protein; protein id: At2g17240
  misc_feature (102)..(185): NCBI GI NO: 26452533 NR Description: unknown protein [Arabidopsis thaliana]
YRQPPPPAVVHNHKPPLLHQTARRRNPNSNPTPPANSPSEARALELPSRMTSPWCLSAPPAAPPVAAAPGALGFSASASTLARVPVPGSRRRRWNALVVCAAPDEEKITKRSPLDFPIEWERPKPGRRPDIFPKFSPMKTPLPHPLPADDPLDDDEEEEEEQAPPQEEPQEDDPDKEEPEEDDPDKPTE

SEQ ID NO: 39031 - protein, 140 aa, Zea mays subsp. mays
  peptide (1)..(140): Ceres Seq. ID no. 12367196
  misc_feature (1)..(136): NCBI GI NO: 18404214 NR Description: Expressed protein; protein id: At3g24506
  misc_feature (1)..(136): NCBI GI NO: 21553725 NR Description: unknown [Arabidopsis thaliana]
  misc_feature (22)..(137): NCBI GI NO: 18398354 NR Description: expressed protein; protein id: At2g17240
  misc_feature (53)..(136): NCBI GI NO: 26452533 NR Description: unknown protein [Arabidopsis thaliana]
MTSPWCLSAPPAAPPVAAAPGALGFSASASTLARVPVPGSRRRRWNALVVCAAPDEEKITKRSPLDFPIEWERPKPGRRPDIFPKFSPMKTPLPHPLPADDPLDDDEEEEEEQAPPQEEPQEDDPDKEEPEEDDPDKPTE

SEQ ID NO: 39032 - DNA, 490 bp, Zea mays subsp. mays
  misc_feature (1)..(490): Ceres Seq. ID no. 13577813
  misc_feature (342)..(342): n is a, c, t, g, unknown, or other
acgctctcctctccagtctccaccaacgtcctccccccaccgcaccgcaccgcaccgcaccgccctccccaccccgcgcgtgcgccgccgccgcgagatccggggcgcgatgtggcgcagctgcgtctcgcggggtctctccagggccaaggcctccgcctccaggctcctctccacggcatcgtcgtcctacacggtggtggaccacacctacgacgcggtcgtggtgggggccggcggcgcggggctccgggcggccatcggcctctccgagcacggcttcaacaccgcgtgcatcaccaagctcttccccacgcgctcgcacaccgtcgcagcacaggnaggcataaatgccgcacttggaaacatgagtgaagatgattggaggtggcacatgtatgacactgtgaagggaagcgattggctcggtgaccaggattctattcagtatatgtgcagagaagcacaaaaagctgttatagagcttgag

SEQ ID NO: 39033 - protein, 163 aa, Zea mays subsp. mays
  peptide (1)..(163): Ceres Seq. ID no. 13577814
  misc_feature (37)..(162): NCBI GI NO: 34394418 NR Description: putative succinate dehydrogenase flavoprotein alpha subunit
  misc_feature (37)..(162): NCBI GI NO: 15240075 NR Description: succinate dehydrogenase
  misc_feature (29)..(162): NCBI GI NO: 15224174 NR Description: succinate dehydrogenase
  misc_feature (40)..(162): NCBI GI NO: 19115231 NR Description: probable succinate dehydrogenase flavoprotein subunit precursor
  misc_feature (29)..(162): NCBI GI NO: 18426858 NR Description: succinate dehydrogenase complex
  misc_feature (50)..(162): NCBI GI NO: 1169337 NR Description: Succinate dehydrogenase
  misc_feature (50)..(162): NCBI GI NO: 4759080 NR Description: succinate dehydrogenase complex
  misc_feature (50)..(162): NCBI GI NO: 23574788 NR Description: succinate dehydrogenase flavoprotein subunit
  misc_feature (50)..(162): NCBI GI NO: 5759173 NR Description: succinate dehydrogenase flavoprotein subunit
  misc_feature (50)..(162): NCBI GI NO: 28703813 NR Description: Similar to succinate dehydrogenase complex
  misc_feature (114)..(114): Xaa is any aa, unknown or other
RSPLQSPPTSSPHRTAPHRTALPTPRVRRRREIRGAMWRSCVSRGLSRAKASASRLLSTASSSYTVVDHTYDAVVVGAGGAGLRAAIGLSEHGFNTACITKLFPTRSHTVAAQXGINAALGNMSEDDWRWHMYDTVKGSDWLGDQDSIQYMCREAQKAVIELE

SEQ ID NO: 39034 - protein, 127 aa, Zea mays subsp. mays
  peptide (1)..(127): Ceres Seq. ID no. 13577815
  misc_feature (1)..(126): NCBI GI NO: 34394418 NR Description: putative succinate dehydrogenase flavoprotein alpha subunit
  misc_feature (1)..(126): NCBI GI NO: 15240075 NR Description: succinate dehydrogenase
  misc_feature (1)..(126): NCBI GI NO: 15224174 NR Description: succinate dehydrogenase
  misc_feature (4)..(126): NCBI GI NO: 19115231 NR Description: probable succinate dehydrogenase flavoprotein subunit precursor
  misc_feature (1)..(126): NCBI GI NO: 18426858 NR Description: succinate dehydrogenase complex
  misc_feature (14)..(126): NCBI GI NO: 1169337 NR Description: Succinate dehydrogenase
  misc_feature (14)..(126): NCBI GI NO: 23574788 NR Description: succinate dehydrogenase flavoprotein subunit
  misc_feature (14)..(126): NCBI GI NO: 5759173 NR Description: succinate dehydrogenase flavoprotein subunit
  misc_feature (14)..(126): NCBI GI NO: 4759080 NR Description: succinate dehydrogenase complex
  misc_feature (14)..(126): NCBI GI NO: 28703813 NR Description: Similar to succinate dehydrogenase complex
  misc_feature (78)..(78): Xaa is any aa, unknown or other
MWRSCVSRGLSRAKASASRLLSTASSSYTVVDHTYDAVVVGAGGAGLRAAIGLSEHGFNTACITKLFPTRSHTVAAQXGINAALGNMSEDDWRWHMYDTVKGSDWLGDQDSIQYMCREAQKAVIELE

SEQ ID NO: 39035 - protein, 124 aa, Zea mays subsp. mays
  peptide (1)..(124): Ceres Seq. ID no. 13577816
  misc_feature (114)..(114): Xaa is any aa, unknown or other
TLSSPVSTNVLPPPHRTAPHRPPHPARAPPPRDPGRDVAQLRLAGSLQGQGLRLQAPLHGIVVLHGGGPHLRRGRGGGRRRGAPGGHRPLRARLQHRVHHQALPHALAHRRSTXRHKCRTWKHE

SEQ ID NO: 39036 - DNA, 1067 bp, Zea mays subsp. mays
  misc_feature (1)..(1067): Ceres Seq. ID no. 14305435
aaagatttgatttttttttctcggggaggagccggagtccgagcagcagtggcggctggagggaggagatcctgatctgttgtcgcagcggggaggggaggaccggaggaggaagatggctgcgcaggagcaggagcaggagaagcagcaggcgaagacgagcaccacgagctcgctgccctccagcagcgagcgctcctccagctccgctcgcaacaacctcacggaaggaggggcggagagcgacgaggagatacggcgggtgccggagatgggcggcgcgtcggcgtcggcctcgtcgggcgccggcgcggatgagcgtcccaagggggaggacggcaagcaggggcaggtggcggcgggggcgcagcctccggcgggcgggaagaagcgcgggcgcaccgcgggggacaaggagcagaagctcttgcagtatatgatgctatgaggtatgttaaagttcctattttcactctgtgtgtcggtaatgcatggggagaagctgctttactcttagctgctggcgctaaaggtaaccgtgccgcacttccatcatcgacaataatgataaaacagccaattggtcgctttcaaggtcaggcaacagacgttgacattgcaagaaaagagattcgaaatgtcaagatagaaatggttaagctgctggcaagacacatcggtaaaccaatggaagagattgctcgggacatcaggcgtcctaaatactttagccccagtgaagctgtggattatggcatcatcgacaaggtgatatacaacgagaaaatccaggaagatggcggtgttgtgtcagaactcaaaagatcaaatttgatatagtgttctttttccacaagtagacacgtctttgtatgtttagtggtcattcacgtgcctttgagtattgagtagttaccactcgatcactcattagctggttgtagaggcgtagagcacatagccaatgcattgaacaagcatttccttcccccctctgccgtttcaacgctgtattgcccttacccaacgggcgtgctgaaagatgaattttggtaggttgttgaaac

SEQ ID NO: 39037 - protein, 145 aa, Zea mays subsp. mays
  peptide (1)..(145): Ceres Seq. ID no. 14305436
  misc_feature (32)..(97): Pfam Name: Pfam Description:  Sperm histone P2
RFDFFFSGRSRSPSSSGGWREEILICCRSGEGRTGGGRWLRRSRSRRSSRRRRAPRARCPPAASAPPAPLATTSRKEGRRATRRYGGCRRWAARRRRPRRAPARMSVPRGRTASRGRWRRGRSLRRAGRSAGAPRGTRSRSSCSI

SEQ ID NO: 39038 - protein, 131 aa, Zea mays subsp. mays
  peptide (1)..(131): Ceres Seq. ID no. 14305437
  misc_feature (1)..(113): Pfam Name: Pfam Description:  Clp protease
  misc_feature (1)..(131): NCBI GI NO: 18414804 NR Description: ATP-dependent Clp protease proteolytic subunit
  misc_feature (1)..(131): NCBI GI NO: 19698857 NR Description: unknown protein [Arabidopsis thaliana]
  misc_feature (1)..(110): NCBI GI NO: 15606541 NR Description: ATP-dependent Clp protease proteolytic subunit
  misc_feature (1)..(109): NCBI GI NO: 37527729 NR Description: ATP-dependent proteolytic subunit of clpA-clpPserine protease
  misc_feature (1)..(109): NCBI GI NO: 2493738 NR Description: ATP-dependent Clp protease proteolytic subunit
  misc_feature (1)..(114): NCBI GI NO: 33861869 NR Description: Clp protease proteolytic subunit
  misc_feature (1)..(114): NCBI GI NO: 33862588 NR Description: Clp protease proteolytic subunit
  misc_feature (1)..(114): NCBI GI NO: 26989024 NR Description: ATP-dependent Clp protease
  misc_feature (1)..(114): NCBI GI NO: 33866182 NR Description: ATP-dependent Clp protease proteolytic subunit 4
  misc_feature (1)..(109): NCBI GI NO: 16123319 NR Description: ATP-dependent Clp protease proteolytic subunit ClpP
MRYVKVPIFTLCVGNAWGEAALLLAAGAKGNRAALPSSTIMIKQPIGRFQGQATDVDIARKEIRNVKIEMVKLLARHIGKPMEEIARDIRRPKYFSPSEAVDYGIIDKVIYNEKIQEDGGVVSELKRSNLI

SEQ ID NO: 39039 - protein, 110 aa, Zea mays subsp. mays
  peptide (1)..(110): Ceres Seq. ID no. 14305438
  misc_feature (1)..(109): NCBI GI NO: 34910258 NR Description: putative THY5 protein
MAAQEQEQEKQQAKTSTTSSLPSSSERSSSSARNNLTEGGAESDEEIRRVPEMGGASASASSGAGADERPKGEDGKQGQVAAGAQPPAGGKKRGRTAGDKEQKLLQYMML

SEQ ID NO: 39040 - DNA, 2286 bp, Zea mays subsp. mays
  misc_feature (1)..(2286): Ceres Seq. ID no. 12366176
gcacgagaccattacctagaacatcctaatcgaaaaactgccccttccagtctcgccgtcgccggagataggccgccgccgccagccggaacgcaacaccgcagcggttacctgcagcggacggcaggaacctagtcctccactgctctgcctaccctacaatcgggatctcgcgggcttcattaggggggaaaatcgaccagcgagcgagtgcaagaagctcctgttcgatcgatctcgggagctccgatactgcgcgcaatcccaaatttgacacagagtcacagcaatgtcagtgagccatgccgacgagcacgagatatctctgtgcgaccccagctccgaggacgaccggcggcgccggaagatcgggtccctgccgctcaaggccatccacgcgctacggaagaagcgcgcccggcgtcgcgtcactgacttccggttccccgcggccatctccatcgaggacgtccgcgacgccgaggaggagcgcgccgtcgccgccttccgcgaccgtctcgccgcgcaccgcctcctccccgacaagcacgacgactaccacatgatgctgaggtttctgaaagccaggaagtttgattccgacaaggcaatgcaaatgtggtcagagatgctgaggtggaggaaagagtttggtaccgacacaatcttggaggactttgagttcgacgagctcaacgatgtactccactactatcctcagggcctaccatggcgtcgaccgtgaaggccggcccgtgtacattgagaggctcggcaaagttgatccgaacaagctcatgcagatcacctcggtggatcgctacatcaagtaccatgtgcaggagttcgagagggcattcagggagaggttccctgcctgcacactgtcagccaagagacatattgactccactaccaccatactggacgtccatggtgtggggttcaagaatttctcaaagaccgcaagggagcttgtccaacgtatgcagagaatagacagtgactactatcccgagacgctacatcagatgtatgttgtgaatgcaggcagtgggtttaagttgatctggaacagtgttaagggattcctagacccaaaaacttcttccaagatccatgttcttggttccaactaccagagcagacttatcgaagttattgactcaagtgaattgccaaaatttcttggcggatcatgcacatgcagtgagaagggtggttgcctcaggtctaacaggggtccatggaatgaccctgtcattatgaagctaatacacagtatggaaggtggtagtactagagaaataaagcaagtttctgacggggacgaaagaagtggctcttccctaagggcagaaaacctgaagggcatgcttagtgacatatcaaatgctgaatctgagtcggatgttgatgacgttggtttaacagttgtccaaaagagtacggaccacagtttactaaccccagttcatgaagaagtcaaggggtcagatacttcgatattttgtagttctagcagtaagcatctcctagatacaactcctcgatctcctcaggccacccctcaaatggagatgcccattcagttgacttgccgtaaatattttcctacctttgggtggctaaataatttagggaatgcttacattagtttgcatggtacatccgctggaaggactctggaaaaccttgctactggactgatcacgctcttgatcaggatatcatctttcttccacctttccgtctaccggcaagaaagatatctagaaaccgtccaaccctgtgccgcagcacaggaaccagaacctcaaagggaagaggacatgagtgcttgtttacgacgcctcaagaagctcgagtcactgtgtgatcacctcatgagcaaacctccggatatgccgaaggagaaagaacttgtattgatgcagtccttcgatcggataaaatccctcgaggctgaactggaggcgacgaaaaacgcgctgcaggctgcggtggaaaagcagatggaactggtggagacggtagaatctctgcagcaccaaacgtccagcgttaggaggagattttgctgttcataggagtaggattgtcgtcgtcgcgccgaagctgtctgggttagcaaataatgaacctgacgctgcccttggcatacgccaaacctgtcgctggctcgacactgtatgcgcggatgcgtgtaaaatcgatcagttttttttgtagctacactctggcttctgtgatctccagagcctgcaaaatgtcaaagctttcgcc

SEQ ID NO: 39041 - protein, 463 aa, Zea mays subsp. mays
  peptide (1)..(463): Ceres Seq. ID no. 12366177
  misc_feature (8)..(191): Pfam Name: Pfam Description:  CRAL/TRIO domain
  misc_feature (8)..(273): NCBI GI NO: 38423984 NR Description: phosphatidylinositol transfer-like
  misc_feature (337)..(461): NCBI GI NO: 38423984 NR Description: phosphatidylinositol transfer-like
  misc_feature (8)..(191): NCBI GI NO: 5257268 NR Description: Similar to putative SEC14 cytosolic factor
  misc_feature (10)..(462): NCBI GI NO: 18420392 NR Description: SEC14 - like protein; protein id: At4g39170
  misc_feature (10)..(432): NCBI GI NO: 14335006 NR Description: AT4g39170/T22F8_70 [Arabidopsis thaliana]
  misc_feature (10)..(462): NCBI GI NO: 7487350 NR Description: hypothetical protein T22F8
  misc_feature (10)..(222): NCBI GI NO: 11994666 NR Description: phosphatidylinositol/phosphatidylcholine transfer protein-like
  misc_feature (324)..(455): NCBI GI NO: 11994666 NR Description: phosphatidylinositol/phosphatidylcholine transfer protein-like
  misc_feature (8)..(262): NCBI GI NO: 15226574 NR Description: putative phosphatidylinositol/phosphatidylcholinetransfer protein
  misc_feature (371)..(461): NCBI GI NO: 15226574 NR Description: putative phosphatidylinositol/phosphatidylcholinetransfer protein
MYSTTILRAYHGVDREGRPVYIERLGKVDPNKLMQITSVDRYIKYHVQEFERAFRERFPACTLSAKRHIDSTTTILDVHGVGFKNFSKTARELVQRMQRIDSDYYPETLHQMYVVNAGSGFKLIWNSVKGFLDPKTSSKIHVLGSNYQSRLIEVIDSSELPKFLGGSCTCSEKGGCLRSNRGPWNDPVIMKLIHSMEGGSTREIKQVSDGDERSGSSLRAENLKGMLSDISNAESESDVDDVGLTVVQKSTDHSLLTPVHEEVKGSDTSIFCSSSSKHLLDTTPRSPQATPQMEMPIQLTCRKYFPTFGWLNNLGNAYISLHGTSAGRTLENLATGLITLLIRISSFFHLSVYRQERYLETVQPCAAAQEPEPQREEDMSACLRRLKKLESLCDHLMSKPPDMPKEKELVLMQSFDRIKSLEAELEATKNALQAAVEKQMELVETVESLQHQTSSVRRRFCCS

SEQ ID NO: 39042 - protein, 430 aa, Zea mays subsp. mays
  peptide (1)..(430): Ceres Seq. ID no. 12366178
  misc_feature (1)..(158): Pfam Name: Pfam Description:  CRAL/TRIO domain
  misc_feature (1)..(240): NCBI GI NO: 38423984 NR Description: phosphatidylinositol transfer-like
  misc_feature (304)..(428): NCBI GI NO: 38423984 NR Description: phosphatidylinositol transfer-like
  misc_feature (1)..(158): NCBI GI NO: 5257268 NR Description: Similar to putative SEC14 cytosolic factor
  misc_feature (1)..(429): NCBI GI NO: 18420392 NR Description: SEC14 - like protein; protein id: At4g39170
  misc_feature (1)..(399): NCBI GI NO: 14335006 NR Description: AT4g39170/T22F8_70 [Arabidopsis thaliana]
  misc_feature (1)..(429): NCBI GI NO: 7487350 NR Description: hypothetical protein T22F8
  misc_feature (1)..(189): NCBI GI NO: 11994666 NR Description: phosphatidylinositol/phosphatidylcholine transfer protein-like
  misc_feature (291)..(422): NCBI GI NO: 11994666 NR Description: phosphatidylinositol/phosphatidylcholine transfer protein-like
  misc_feature (1)..(229): NCBI GI NO: 15226574 NR Description: putative phosphatidylinositol/phosphatidylcholinetransfer protein
  misc_feature (338)..(428): NCBI GI NO: 15226574 NR Description: putative phosphatidylinositol/phosphatidylcholinetransfer protein
MQITSVDRYIKYHVQEFERAFRERFPACTLSAKRHIDSTTTILDVHGVGFKNFSKTARELVQRMQRIDSDYYPETLHQMYVVNAGSGFKLIWNSVKGFLDPKTSSKIHVLGSNYQSRLIEVIDSSELPKFLGGSCTCSEKGGCLRSNRGPWNDPVIMKLIHSMEGGSTREIKQVSDGDERSGSSLRAENLKGMLSDISNAESESDVDDVGLTVVQKSTDHSLLTPVHEEVKGSDTSIFCSSSSKHLLDTTPRSPQATPQMEMPIQLTCRKYFPTFGWLNNLGNAYISLHGTSAGRTLENLATGLITLLIRISSFFHLSVYRQERYLETVQPCAAAQEPEPQREEDMSACLRRLKKLESLCDHLMSKPPDMPKEKELVLMQSFDRIKSLEAELEATKNALQAAVEKQMELVETVESLQHQTSSVRRRFCCS

SEQ ID NO: 39043 - protein, 367 aa, Zea mays subsp. mays
  peptide (1)..(367): Ceres Seq. ID no. 12366179
  misc_feature (1)..(95): Pfam Name: Pfam Description:  CRAL/TRIO domain
  misc_feature (1)..(177): NCBI GI NO: 38423984 NR Description: phosphatidylinositol transfer-like
  misc_feature (241)..(365): NCBI GI NO: 38423984 NR Description: phosphatidylinositol transfer-like
  misc_feature (1)..(95): NCBI GI NO: 5257268 NR Description: Similar to putative SEC14 cytosolic factor
  misc_feature (1)..(366): NCBI GI NO: 18420392 NR Description: SEC14 - like protein; protein id: At4g39170
  misc_feature (1)..(336): NCBI GI NO: 14335006 NR Description: AT4g39170/T22F8_70 [Arabidopsis thaliana]
  misc_feature (1)..(366): NCBI GI NO: 7487350 NR Description: hypothetical protein T22F8
  misc_feature (1)..(126): NCBI GI NO: 11994666 NR Description: phosphatidylinositol/phosphatidylcholine transfer protein-like
  misc_feature (228)..(359): NCBI GI NO: 11994666 NR Description: phosphatidylinositol/phosphatidylcholine transfer protein-like
  misc_feature (1)..(166): NCBI GI NO: 15226574 NR Description: putative phosphatidylinositol/phosphatidylcholinetransfer protein
  misc_feature (275)..(365): NCBI GI NO: 15226574 NR Description: putative phosphatidylinositol/phosphatidylcholinetransfer protein
MQRIDSDYYPETLHQMYVVNAGSGFKLIWNSVKGFLDPKTSSKIHVLGSNYQSRLIEVIDSSELPKFLGGSCTCSEKGGCLRSNRGPWNDPVIMKLIHSMEGGSTREIKQVSDGDERSGSSLRAENLKGMLSDISNAESESDVDDVGLTVVQKSTDHSLLTPVHEEVKGSDTSIFCSSSSKHLLDTTPRSPQATPQMEMPIQLTCRKYFPTFGWLNNLGNAYISLHGTSAGRTLENLATGLITLLIRISSFFHLSVYRQERYLETVQPCAAAQEPEPQREEDMSACLRRLKKLESLCDHLMSKPPDMPKEKELVLMQSFDRIKSLEAELEATKNALQAAVEKQMELVETVESLQHQTSSVRRRFCCS

SEQ ID NO: 39044 - DNA, 1296 bp, Zea mays subsp. mays
  misc_feature (1)..(1296): Ceres Seq. ID no. 12366185
aacgacgagcagtgcaagccaagcattctcacgctagctgttctcttcttgcgcctcatccatcttgcatctatattctcggcgcgagttacgttttcgtcgtccggccggccggcgagcattttgcttctgcgatcgatcggcgcgacgtgtgcacggccatggagatgatcgacgcagagctgcgtctgggtccgcccggcagcaccaacagagacgtcatcaacgtcgtgcagccggcgttggcggcggcgaaacggccgtcgtcgtcggtggtggagagcgaggcgtccgggacggacgaccatgacgacgctgcaccgacctccaaggtgcaggtggtggggtggccgccggtgagagtgtaccggaagaacgcgttccacgcggcggcggaggcgaggaggaccaggcggggcgagcagcaaggaggaggaggcctgtacgtgaaggtgagcatggacggggcgccatacctccggaaggtggacctgcggacctacggcggctaccgtgagctgagggacgcactggacgcgctcttcggctgcttctcctcctcggccgacggcggatgccagttcgccgtcgcctacgaggacaaggacggcgacctcatgctcgccggcgacgtgccatgggagatgttcatctgttcttgcaagaagctgaggatcatgagggggtccgaaacaagataaccaagcaacgaggatgcaagaaccctgttggatgcatatgcatggagaggccggccggactcatggtgtcatgcacgagagagaagaagaagaagacgacgacctgctggaactgaaggcggttgggtatacctgcatgcatggggagggagcccacgcatgcacgcgcgcgtcgtcgtgttctagccaccagaccggccgccggcccatatgctcaccacggagatggaggtgatggttcaaggatcacggcggcgtacgcgtcatcagtcacgccgtcgtcctgtcatcagatgagagatggaggggtgatgcatgagggcagtgctgtcgacggctggctggacgtgcagatcggagcgagattgtactgtgcacgcacatgagctttgtaattcattctaggggtgcagccgcacccacgtagaaataaataagaataccgccgtggttagagccaaattttttgccatttatattgttagcgtctcgtcagcgcagagaggagaagagaagaatcgggatgcgtggagaagaagaatagtgtagcgacgaggggaaatgtgtaatgtaagtatatgttcttttgatgcct

SEQ ID NO: 39045 - protein, 232 aa, Zea mays subsp. mays
  peptide (1)..(232): Ceres Seq. ID no. 12366186
  misc_feature (58)..(232): Pfam Name: Pfam Description:  AUX/IAA family
  misc_feature (53)..(232): NCBI GI NO: 34897206 NR Description: putative auxin-induced protein
  misc_feature (94)..(232): NCBI GI NO: 34393534 NR Description: putative auxin-induced protein
  misc_feature (60)..(232): NCBI GI NO: 34550779 NR Description: Gbiaa-Re [Gossypium barbadense]
  misc_feature (58)..(232): NCBI GI NO: 15219692 NR Description: putative auxin-induced protein AUX2-11
  misc_feature (60)..(232): NCBI GI NO: 11131103 NR Description: Auxin-induced protein 22D
  misc_feature (19)..(185): NCBI GI NO: 29465672 NR Description: Aux/IAA protein [Vitis vinifera]
  misc_feature (191)..(230): NCBI GI NO: 29465672 NR Description: Aux/IAA protein [Vitis vinifera]
  misc_feature (60)..(232): NCBI GI NO: 4887018 NR Description: Nt-iaa4.5 deduced protein [Nicotiana tabacum]
  misc_feature (54)..(232): NCBI GI NO: 1352057 NR Description: AUXIN-INDUCED PROTEIN IAA4
  misc_feature (60)..(232): NCBI GI NO: 416641 NR Description: Auxin-induced protein 22B
RRAVQAKHSHASCSLLAPHPSCIYILGASYVFVVRPAGEHFASAIDRRDVCTAMEMIDAELRLGPPGSTNRDVINVVQPALAAAKRPSSSVVESEASGTDDHDDAAPTSKVQVVGWPPVRVYRKNAFHAAAEARRTRRGEQQGGGGLYVKVSMDGAPYLRKVDLRTYGGYRELRDALDALFGCFSSSADGGCQFAVAYEDKDGDLMLAGDVPWEMFICSCKKLRIMRGSETR

SEQ ID NO: 39046 - protein, 179 aa, Zea mays subsp. mays
  peptide (1)..(179): Ceres Seq. ID no. 12366187
  misc_feature (5)..(179): Pfam Name: Pfam Description:  AUX/IAA family
  misc_feature (1)..(179): NCBI GI NO: 34897206 NR Description: putative auxin-induced protein
  misc_feature (41)..(179): NCBI GI NO: 34393534 NR Description: putative auxin-induced protein
  misc_feature (7)..(179): NCBI GI NO: 34550779 NR Description: Gbiaa-Re [Gossypium barbadense]
  misc_feature (5)..(179): NCBI GI NO: 15219692 NR Description: putative auxin-induced protein AUX2-11
  misc_feature (7)..(179): NCBI GI NO: 11131103 NR Description: Auxin-induced protein 22D
  misc_feature (1)..(132): NCBI GI NO: 29465672 NR Description: Aux/IAA protein [Vitis vinifera]
  misc_feature (138)..(177): NCBI GI NO: 29465672 NR Description: Aux/IAA protein [Vitis vinifera]
  misc_feature (7)..(179): NCBI GI NO: 4887018 NR Description: Nt-iaa4.5 deduced protein [Nicotiana tabacum]
  misc_feature (1)..(179): NCBI GI NO: 1352057 NR Description: AUXIN-INDUCED PROTEIN IAA4
  misc_feature (7)..(179): NCBI GI NO: 416641 NR Description: Auxin-induced protein 22B
MEMIDAELRLGPPGSTNRDVINVVQPALAAAKRPSSSVVESEASGTDDHDDAAPTSKVQVVGWPPVRVYRKNAFHAAAEARRTRRGEQQGGGGLYVKVSMDGAPYLRKVDLRTYGGYRELRDALDALFGCFSSSADGGCQFAVAYEDKDGDLMLAGDVPWEMFICSCKKLRIMRGSETR

SEQ ID NO: 39047 - protein, 177 aa, Zea mays subsp. mays
  peptide (1)..(177): Ceres Seq. ID no. 12366188
  misc_feature (3)..(177): Pfam Name: Pfam Description:  AUX/IAA family
  misc_feature (1)..(177): NCBI GI NO: 34897206 NR Description: putative auxin-induced protein
  misc_feature (39)..(177): NCBI GI NO: 34393534 NR Description: putative auxin-induced protein
  misc_feature (5)..(177): NCBI GI NO: 34550779 NR Description: Gbiaa-Re [Gossypium barbadense]
  misc_feature (3)..(177): NCBI GI NO: 15219692 NR Description: putative auxin-induced protein AUX2-11
  misc_feature (5)..(177): NCBI GI NO: 11131103 NR Description: Auxin-induced protein 22D
  misc_feature (1)..(130): NCBI GI NO: 29465672 NR Description: Aux/IAA protein [Vitis vinifera]
  misc_feature (136)..(175): NCBI GI NO: 29465672 NR Description: Aux/IAA protein [Vitis vinifera]
  misc_feature (5)..(177): NCBI GI NO: 4887018 NR Description: Nt-iaa4.5 deduced protein [Nicotiana tabacum]
  misc_feature (1)..(177): NCBI GI NO: 1352057 NR Description: AUXIN-INDUCED PROTEIN IAA4
  misc_feature (5)..(177): NCBI GI NO: 416641 NR Description: Auxin-induced protein 22B
MIDAELRLGPPGSTNRDVINVVQPALAAAKRPSSSVVESEASGTDDHDDAAPTSKVQVVGWPPVRVYRKNAFHAAAEARRTRRGEQQGGGGLYVKVSMDGAPYLRKVDLRTYGGYRELRDALDALFGCFSSSADGGCQFAVAYEDKDGDLMLAGDVPWEMFICSCKKLRIMRGSETR

SEQ ID NO: 39048 - DNA, 1198 bp, Zea mays subsp. mays
  misc_feature (1)..(1198): Ceres Seq. ID no. 12435386
  misc_feature (707)..(707): n is a, c, t, g, unknown, or other
gtgttccacttgctagtccactcccctctcagtcgaggcaatggccttcgcttccagtagcttccgcctcgctctgttcttggttctgctggcgtttgtcagcttggcacggcacgccacgggggaggccagcccgagcaggaggctcatggagctgtacaagccaccgcccagcgatctcctaaggtaccacgacggcgccgtgctgagcggcgacatccccgtctccgtcctctggtacggccgcttcacgcccgcgcagaaggccatcgtcaccgacttcctcctctccctctccgccgcgccgacgtcccctgcgccttccgtctcccagtggtggggcaccatcgaccggctctacctatcgaaggcggcggacgcggccgccgtcgggaagagcggcgcgcacggcggcggtggtggcaggaaaggcgctcgggtggtcctggccggccaggtctccgacgaagggtgctcgctggggaagagcctgacgctcgcccagctcccggcgctggcggccgcggcgcgccccgcgaagggcggcctcgcgctgctgctcacggcgcaggacgtgctggtggagggcttctgcatgagccggtgcggccaccacgggtcgtacggcgcgcggccccgcgtggcggcggcggcgtacgcgtgggtcgggaacccgggcacgcagtgccccggccagtgcgcgtggncgttccaccagccgccgtacgggccgcaggcgccgccgctggtgccgccgaacggggacgcgggcatggacggcgccatgatcagcgtggccagcatggtggccggcgcggtcaccaaccccttcggagacgggttctaccagggcgaccgcgccgcgccgcttgaggccgccacggcgtgcgcgggcgtctacggcaacggcgcgtaccccggctacgccggccagctgctcgtggacgcggccacgggtgccagctacaacgccaacggggcgcgcgggaggaagtacctgctccccgcgctgtacgatcccgacacggctgcctgcaccaccttggtttgagcaaacgcgcggcgccgtgttttggcatctgtcaccgtaggtgggcggggatacagtgaagtgataatgcgcttgtgttaggcgcatgtatatatataataattagatggatacccgtgcgttacaatataaacatataataccatg

SEQ ID NO: 39049 - protein, 336 aa, Zea mays subsp. mays
  peptide (1)..(336): Ceres Seq. ID no. 12435387
  misc_feature (48)..(336): Pfam Name: Pfam Description:  Phosphate-induced protein 1 conserved region
  misc_feature (33)..(336): NCBI GI NO: 3759184 NR Description: phi-1 [Nicotiana tabacum]
  misc_feature (11)..(336): NCBI GI NO: 21593043 NR Description: putative phi-1-like phosphate-induced protein
  misc_feature (12)..(336): NCBI GI NO: 15236667 NR Description: putative phi-1-like phosphate-induced protein
  misc_feature (49)..(335): NCBI GI NO: 15219504 NR Description: phosphate-induced
  misc_feature (39)..(332): NCBI GI NO: 37533672 NR Description: putative phosphate-induced protein
  misc_feature (47)..(336): NCBI GI NO: 15237656 NR Description: phi-1-like protein; protein id: At5g64260
  misc_feature (159)..(335): NCBI GI NO: 13194680 NR Description: phosphate-induced protein 1-like protein
  misc_feature (129)..(336): NCBI GI NO: 15242420 NR Description: putative protein; protein id: At5g09440
  misc_feature (56)..(119): NCBI GI NO: 15242420 NR Description: putative protein; protein id: At5g09440
  misc_feature (129)..(336): NCBI GI NO: 31074969 NR Description: erg-1 [Solanum tuberosum]
  misc_feature (223)..(223): Xaa is any aa, unknown or other
MAFASSSFRLALFLVLLAFVSLARHATGEASPSRRLMELYKPPPSDLLRYHDGAVLSGDIPVSVLWYGRFTPAQKAIVTDFLLSLSAAPTSPAPSVSQWWGTIDRLYLSKAADAAAVGKSGAHGGGGGRKGARVVLAGQVSDEGCSLGKSLTLAQLPALAAAARPAKGGLALLLTAQDVLVEGFCMSRCGHHGSYGARPRVAAAAYAWVGNPGTQCPGQCAWXFHQPPYGPQAPPLVPPNGDAGMDGAMISVASMVAGAVTNPFGDGFYQGDRAAPLEAATACAGVYGNGAYPGYAGQLLVDAATGASYNANGARGRKYLLPALYDPDTAACTTLV

SEQ ID NO: 39050 - protein, 300 aa, Zea mays subsp. mays
  peptide (1)..(300): Ceres Seq. ID no. 12435388
  misc_feature (12)..(300): Pfam Name: Pfam Description:  Phosphate-induced protein 1 conserved region
  misc_feature (1)..(300): NCBI GI NO: 3759184 NR Description: phi-1 [Nicotiana tabacum]
  misc_feature (1)..(300): NCBI GI NO: 21593043 NR Description: putative phi-1-like phosphate-induced protein
  misc_feature (1)..(300): NCBI GI NO: 15236667 NR Description: putative phi-1-like phosphate-induced protein
  misc_feature (13)..(299): NCBI GI NO: 15219504 NR Description: phosphate-induced
  misc_feature (3)..(296): NCBI GI NO: 37533672 NR Description: putative phosphate-induced protein
  misc_feature (11)..(300): NCBI GI NO: 15237656 NR Description: phi-1-like protein; protein id: At5g64260
  misc_feature (123)..(299): NCBI GI NO: 13194680 NR Description: phosphate-induced protein 1-like protein
  misc_feature (93)..(300): NCBI GI NO: 15242420 NR Description: putative protein; protein id: At5g09440
  misc_feature (20)..(83): NCBI GI NO: 15242420 NR Description: putative protein; protein id: At5g09440
  misc_feature (93)..(300): NCBI GI NO: 31074969 NR Description: erg-1 [Solanum tuberosum]
  misc_feature (187)..(187): Xaa is any aa, unknown or other
MELYKPPPSDLLRYHDGAVLSGDIPVSVLWYGRFTPAQKAIVTDFLLSLSAAPTSPAPSVSQWWGTIDRLYLSKAADAAAVGKSGAHGGGGGRKGARVVLAGQVSDEGCSLGKSLTLAQLPALAAAARPAKGGLALLLTAQDVLVEGFCMSRCGHHGSYGARPRVAAAAYAWVGNPGTQCPGQCAWXFHQPPYGPQAPPLVPPNGDAGMDGAMISVASMVAGAVTNPFGDGFYQGDRAAPLEAATACAGVYGNGAYPGYAGQLLVDAATGASYNANGARGRKYLLPALYDPDTAACTTLV

SEQ ID NO: 39051 - DNA, 457 bp, Zea mays subsp. mays
  misc_feature (1)..(457): Ceres Seq. ID no. 1673321
gtacgctctgccgcgccaagctccgcctccatccgcgcggatctgagtttgtgctgtctggctctctgcgcagatgtcggctgcagaggcgaaggcggcggcggtcccggagtctgtgctgcggaagcgcaagcgggaggagcaatgggcagcggacaagaaggagaaggcgctcgcggacaggaagaaggcgctcgagagccgcaagatcatcttcgcccgcgccaagcagtacgccgaggagtaccacgcccaggagaaggagcttgtgcagctcaagcgtgaggcccggttgaagggtgggttctatgtgagcccagaggccaagcttctgtttgtggttcgcatccgtggtatcaatgccatgcaccccaagacccgcaagatcttgcagctcctgcgattgaggcagatcttcaacggtgtcttcctcaaggttaacaaggcaaccattaac

SEQ ID NO: 39052 - protein, 94 aa, Zea mays subsp. mays
  peptide (1)..(94): Ceres Seq. ID no. 1673322
VRSAAPSSASIRADLSLCCLALCADVGCRGEGGGGPGVCAAEAQAGGAMGSGQEGEGARGQEEGAREPQDHLRPRQAVRRGVPRPGEGACAAQA

SEQ ID NO: 39053 - protein, 97 aa, Zea mays subsp. mays
  peptide (1)..(97): Ceres Seq. ID no. 1673323
  misc_feature (9)..(87): Pfam Name: Pfam Description:  Cupin
TLCRAKLRLHPRGSEFVLSGSLRRCRLQRRRRRRSRSLCCGSASGRSNGQRTRRRRRSRTGRRRSRAARSSSPAPSSTPRSTTPRRRSLCSSSVRPG

SEQ ID NO: 39054 - protein, 128 aa, Zea mays subsp. mays
  peptide (1)..(128): Ceres Seq. ID no. 1673324
  misc_feature (85)..(127): Pfam Name: Pfam Description:  Ribosomal protein L30p/L7e
  misc_feature (1)..(127): NCBI GI NO: 38637548 NR Description: putative 60S ribosomal protein L7
  misc_feature (3)..(127): NCBI GI NO: 38346542 NR Description: OSJNBa0035M09.3
  misc_feature (1)..(127): NCBI GI NO: 15231288 NR Description: ribosomal protein, putative; protein id:At3g13580
  misc_feature (4)..(127): NCBI GI NO: 27311547 NR Description: Unknown protein [Arabidopsis thaliana]
  misc_feature (4)..(127): NCBI GI NO: 30689617 NR Description: 60S ribosomal protein L7 (RPL7C)
  misc_feature (4)..(127): NCBI GI NO: 30689623 NR Description: 60S ribosomal protein L7 (RPL7C)
  misc_feature (5)..(127): NCBI GI NO: 15226212 NR Description: putative ribosomal protein L7
  misc_feature (11)..(127): NCBI GI NO: 445613 NR Description: ribosomal protein L7
  misc_feature (6)..(127): NCBI GI NO: 28630259 NR Description: ribosomal protein L7 [Branchiostoma lanceolatum]
  misc_feature (4)..(127): NCBI GI NO: 22758864 NR Description: ribosomal protein L7 [Argopecten irradians]
MSAAEAKAAAVPESVLRKRKREEQWAADKKEKALADRKKALESRKIIFARAKQYAEEYHAQEKELVQLKREARLKGGFYVSPEAKLLFVVRIRGINAMHPKTRKILQLLRLRQIFNGVFLKVNKATIN

SEQ ID NO: 39055 - DNA, 1080 bp, Zea mays subsp. mays
  misc_feature (1)..(1080): Ceres Seq. ID no. 12417528
gattttgaaaccctcgcctccctcttcctttccggccgccgcctgccgccggaaggagaaaaaatgggtgccggtggggaggaagcgccgcggataatcgtgcctatggcggtggagggtaccccgaatcagctggcgtttgtagaggagtcgaagctgcagaagcgcaaggagaacgtggactgggccgtgaggaaccgggagcgcagggcggccaagcgccagcgcatccgcgacaagcacaaggtcgccgtcaggcggcccgaggagttcgtcaccgcgttccgtaacaaggagcgcgacttcctgcggatgaggacccgcatcaaggtccgcagccagccgcccgtcgaggcgctcggctccaggctcgtcttcgcgattcgcatccctggctccgtggacttgcacccgcacatcaggaaggttttgaggaaactacgactgacgaaggtcctcactggggtgttcctcagggccaccgagttgacgctgaagaggctgcttgtggtcgaaccctttgtcacatacgggtttccgaacttaaagagtgtgaaagagcttatctacaagaagggccgcgggttctttgacatggaacctttccctcttaccagcaacgatctaattgagaaggctcttggagatcatggcatcatatgcttggaagaccttgtgtacgagatcgccactgtaggcccgcacttccgagaagcatctaggttcctcatgcccttccagctcaagtgtccggagaggaggctgcagatgaagaggaaaccgtacagggatggtggcgactcaggcaaccggggcgacaaagtcaacgaactaattgaaaaattgaattaaagcagagttgttcgcttcggactaatctatagagacaaaaatactgtataagtagtagaaactggtacggattaaaaccaagcgaacagacttgtctctctctagttgtgattttgtggtggagtgatggatctgttactttgtcagttttgtaatagcatagctggatgtaatctcgaggtgctgtttggtttacgaaatataatgctaacgataatgattcacacc

SEQ ID NO: 39056 - protein, 283 aa, Zea mays subsp. mays
  peptide (1)..(283): Ceres Seq. ID no. 12417529
  misc_feature (124)..(175): Pfam Name: Pfam Description:  Ribosomal protein L30p/L7e
  misc_feature (36)..(283): NCBI GI NO: 38636688 NR Description: putative 60S ribosomal protein L7 (RPL7A)
  misc_feature (48)..(283): NCBI GI NO: 15226212 NR Description: putative ribosomal protein L7
  misc_feature (45)..(283): NCBI GI NO: 15220825 NR Description: ribosomal protein L7, putative
  misc_feature (48)..(283): NCBI GI NO: 15231288 NR Description: ribosomal protein, putative; protein id:At3g13580
  misc_feature (48)..(283): NCBI GI NO: 445613 NR Description: ribosomal protein L7
  misc_feature (46)..(283): NCBI GI NO: 38637548 NR Description: putative 60S ribosomal protein L7
  misc_feature (48)..(283): NCBI GI NO: 27311547 NR Description: Unknown protein [Arabidopsis thaliana]
  misc_feature (48)..(283): NCBI GI NO: 30689617 NR Description: 60S ribosomal protein L7 (RPL7C)
  misc_feature (48)..(283): NCBI GI NO: 30689623 NR Description: 60S ribosomal protein L7 (RPL7C)
  misc_feature (48)..(283): NCBI GI NO: 38346542 NR Description: OSJNBa0035M09.3
DFETLASLFLSGRRLPPEGEKMGAGGEEAPRIIVPMAVEGTPNQLAFVEESKLQKRKENVDWAVRNRERRAAKRQRIRDKHKVAVRRPEEFVTAFRNKERDFLRMRTRIKVRSQPPVEALGSRLVFAIRIPGSVDLHPHIRKVLRKLRLTKVLTGVFLRATELTLKRLLVVEPFVTYGFPNLKSVKELIYKKGRGFFDMEPFPLTSNDLIEKALGDHGIICLEDLVYEIATVGPHFREASRFLMPFQLKCPERRLQMKRKPYRDGGDSGNRGDKVNELIEKLN

SEQ ID NO: 39057 - protein, 262 aa, Zea mays subsp. mays
  peptide (1)..(262): Ceres Seq. ID no. 12417530
  misc_feature (103)..(154): Pfam Name: Pfam Description:  Ribosomal protein L30p/L7e
  misc_feature (15)..(262): NCBI GI NO: 38636688 NR Description: putative 60S ribosomal protein L7 (RPL7A)
  misc_feature (27)..(262): NCBI GI NO: 15226212 NR Description: putative ribosomal protein L7
  misc_feature (24)..(262): NCBI GI NO: 15220825 NR Description: ribosomal protein L7, putative
  misc_feature (27)..(262): NCBI GI NO: 15231288 NR Description: ribosomal protein, putative; protein id:At3g13580
  misc_feature (27)..(262): NCBI GI NO: 445613 NR Description: ribosomal protein L7
  misc_feature (25)..(262): NCBI GI NO: 38637548 NR Description: putative 60S ribosomal protein L7
  misc_feature (27)..(262): NCBI GI NO: 27311547 NR Description: Unknown protein [Arabidopsis thaliana]
  misc_feature (27)..(262): NCBI GI NO: 30689617 NR Description: 60S ribosomal protein L7 (RPL7C)
  misc_feature (27)..(262): NCBI GI NO: 30689623 NR Description: 60S ribosomal protein L7 (RPL7C)
  misc_feature (27)..(262): NCBI GI NO: 38346542 NR Description: OSJNBa0035M09.3
MGAGGEEAPRIIVPMAVEGTPNQLAFVEESKLQKRKENVDWAVRNRERRAAKRQRIRDKHKVAVRRPEEFVTAFRNKERDFLRMRTRIKVRSQPPVEALGSRLVFAIRIPGSVDLHPHIRKVLRKLRLTKVLTGVFLRATELTLKRLLVVEPFVTYGFPNLKSVKELIYKKGRGFFDMEPFPLTSNDLIEKALGDHGIICLEDLVYEIATVGPHFREASRFLMPFQLKCPERRLQMKRKPYRDGGDSGNRGDKVNELIEKLN

SEQ ID NO: 39058 - protein, 248 aa, Zea mays subsp. mays
  peptide (1)..(248): Ceres Seq. ID no. 12417531
  misc_feature (89)..(140): Pfam Name: Pfam Description:  Ribosomal protein L30p/L7e
  misc_feature (1)..(248): NCBI GI NO: 38636688 NR Description: putative 60S ribosomal protein L7 (RPL7A)
  misc_feature (13)..(248): NCBI GI NO: 15226212 NR Description: putative ribosomal protein L7
  misc_feature (10)..(248): NCBI GI NO: 15220825 NR Description: ribosomal protein L7, putative
  misc_feature (13)..(248): NCBI GI NO: 15231288 NR Description: ribosomal protein, putative; protein id:At3g13580
  misc_feature (13)..(248): NCBI GI NO: 445613 NR Description: ribosomal protein L7
  misc_feature (11)..(248): NCBI GI NO: 38637548 NR Description: putative 60S ribosomal protein L7
  misc_feature (13)..(248): NCBI GI NO: 27311547 NR Description: Unknown protein [Arabidopsis thaliana]
  misc_feature (13)..(248): NCBI GI NO: 30689617 NR Description: 60S ribosomal protein L7 (RPL7C)
  misc_feature (13)..(248): NCBI GI NO: 30689623 NR Description: 60S ribosomal protein L7 (RPL7C)
  misc_feature (13)..(248): NCBI GI NO: 38346542 NR Description: OSJNBa0035M09.3
MAVEGTPNQLAFVEESKLQKRKENVDWAVRNRERRAAKRQRIRDKHKVAVRRPEEFVTAFRNKERDFLRMRTRIKVRSQPPVEALGSRLVFAIRIPGSVDLHPHIRKVLRKLRLTKVLTGVFLRATELTLKRLLVVEPFVTYGFPNLKSVKELIYKKGRGFFDMEPFPLTSNDLIEKALGDHGIICLEDLVYEIATVGPHFREASRFLMPFQLKCPERRLQMKRKPYRDGGDSGNRGDKVNELIEKLN

SEQ ID NO: 39059 - DNA, 2740 bp, Zea mays subsp. mays
  misc_feature (1)..(2740): Ceres Seq. ID no. 12362470
gcacgagaccattacctagaacatcctaatcgaaaaacactcctgaagtgcggaaatccaaagtgtgttgcgttgcctgcccgccgccaaaacccataaaccctaccctctacagcgcctccgtcgctcgctcccggcggcgatggggggtgggccgcgcacgttcccgggcgggctgtctaagtggcagtacaaacgcatgcacgagaagctggcgcggcagaagcagcgggggctcctccgccacgagaagcagctctacctagcccgcctccgctccgagatccgcgcctcccgcctccctggcgccgccgcggaagctccaccggggggcgaggggcccacctcgtcgcgcgcccacatccgcgcccttgccgaccgcttccgcaggcccggcgccgaggacctctggaacgaggacgacgggcccctccgccgcgtcaagcggccgcccactgggatcgcgtcgggtgtccggcaccagcagcagcagttggactcggggaagccccgcggaggaccgagttgggaggacctgacctctctggatcaaccgaggcctttagacaggggaaaagggccgacctcggccgcgttcaatccgagaagagagtacctaacggtggtggcgccctggtgcccgcgttgggatccgcgacctctcggtttcgttgctcccaaaaagtcttatccggtgatgactcgttgctccgtgagttgccagccatgtgtcgacctgaggccattggttgctagtgggcttactgaggatgggaatggaaggaaggacacgccattggcacagtttaatcaggagaggttctactcggtggctgcgaggcgattcggcaggaaatggagaccagattcgtcggaccaggatgacaagggcacgtctgcgcccaagaagaatctgaggttcggaaaaaagtttggggcttcgagcgaagaggattcagaaattgacgagtctggggacacaggtgccatcaggaggaggtggagcagtgctgctctcaggaactgcgatgtgaagaaggaaaggcgggtgctcaagtcttacgaggaggaaagcaatgatctcgcgggtagaatccaagagctgcgagaggagattagaaatagggaggttttgggcactgagaggaggcgttacgagtccaggggtgaatctctgcttaccagtaaaagatttgatcagtgtggtgtctccgcgctgacagtcaaagcacttactgatgctggatatgtacagacaactgtggttcaagaggcagctcttcctatatgtcttgaaggtaaagatgttcttgtcaaggccaaaactggaaccggcaaaagtgcagcttttctgcttcctgcaattgaatcagtcttgaatgctatgaagagcaatacaaatcagcgagtatctccaatatttgctcttgtcctatgccctacaagagagcttgctattcagcttacagctgaagcaaatgtcttgttaaagtaccatgaaggaattggtgttcaatctcttattggtggcactagattcaagccgatcagagacgattagaatctgatccatgccagattttagttgcaacacctggtagactgctggatcacattgaaaacaaatcatcattctctgttcgtttgatgagattgaaattgcttgtgttggatgaagctgatcatttgctagatctgggtttccgtaaagacatagaaaagattgtcgataccttgccacgtcaaagacaaacattgctcttctcagctactattccaaaagaggttcgaagagtttcacagctagtattaaagagggatcacgttttttgttgacacagtgggccttggagctgttgaaaccccaactaaggttcagcagtcatgtcttgtggtgccacatgagctgcattttcatacggttcatcacctgcttcgagagcatattgatcgtgaagttgattacaaggttattgttttctgcacgacagccatggtgactgagtttatgtatatcatgcttcgagatttgaagttaaatgtcagggaaattcactcgaggaaacctcagctctatagaactcgcatatctgaagagttccggggctctaaccgcatagttctcgtaacgtcagatgtttctactcgtggggtgaactatccagatgtcacccttgtgattcaggttggtgttcctcccgatagagagcattacatccatcggcttggaaggactgcaagggaaggtaaatctggcaagggaattcttttgcttgcgccatgggaacaatacttcttggacgagataggcgatctcccgattgacaagtatccagcaccagacgttgaccaggagatgaagcaaaaggttgacgattcaatagagatggttgacatgagcatcaaagaagcagcataccatgcgtggctgggttactacaactccatcgctgacataggtagagataaaagaatggttgttgacctagcaaatcgatttggtgcctcgattggcctggagaagcctccagcgatataccggaagaccgctctgaagatggggctcaaagatgtccctgggattcgaataaggaaatgacatgttcctccacagcaataagggaccttttagcctcgacattggattggaggacatgtaattgaattgggttcaaaatatacaaaattactcacctctgttgcaatgacctaactccttaaatgcatcttcgatttcttc

SEQ ID NO: 39060 - protein, 472 aa, Zea mays subsp. mays
  peptide (1)..(472): Ceres Seq. ID no. 12362471
  misc_feature (362)..(467): Pfam Name: Pfam Description:  DEAD/DEAH box helicase
  misc_feature (262)..(467): NCBI GI NO: 15221724 NR Description: DEAD/DEAH box RNA helicase, putative
  misc_feature (1)..(110): NCBI GI NO: 15221724 NR Description: DEAD/DEAH box RNA helicase, putative
  misc_feature (262)..(467): NCBI GI NO: 15226161 NR Description: DEAD/DEAH box RNA helicase, putative
  misc_feature (1)..(99): NCBI GI NO: 15226161 NR Description: DEAD/DEAH box RNA helicase, putative
  misc_feature (334)..(465): NCBI GI NO: 15242854 NR Description: DEAD/DEAH box RNA helicase, putative
  misc_feature (306)..(465): NCBI GI NO: 9759355 NR Description: RNA helicase-like protein [Arabidopsis thaliana]
  misc_feature (306)..(465): NCBI GI NO: 30682500 NR Description: DEAD box RNA helicase, putative
  misc_feature (343)..(465): NCBI GI NO: 15242323 NR Description: DEAD/DEAH box RNA helicase, putative
  misc_feature (343)..(465): NCBI GI NO: 14334882 NR Description: putative RNA helicase [Arabidopsis thaliana]
  misc_feature (282)..(465): NCBI GI NO: 34912712 NR Description: putative RNA helicase
MGGGPRTFPGGLSKWQYKRMHEKLARQKQRGLLRHEKQLYLARLRSEIRASRLPGAAAEAPPGGEGPTSSRAHIRALADRFRRPGAEDLWNEDDGPLRRVKRPPTGIASGVRHQQQQLDSGKPRGGPSWEDLTSLDQPRPLDRGKGPTSAAFNPRREYLTVVAPWCPRWDPRPLGFVAPKKSYPVMTRCSVSCQPCVDLRPLVASGLTEDGNGRKDTPLAQFNQERFYSVAARRFGRKWRPDSSDQDDKGTSAPKKNLRFGKKFGASSEEDSEIDESGDTGAIRRRWSSAALRNCDVKKERRVLKSYEEESNDLAGRIQELREEIRNREVLGTERRRYESRGESLLTSKRFDQCGVSALTVKALTDAGYVQTTVVQEAALPICLEGKDVLVKAKTGTGKSAAFLLPAIESVLNAMKSNTNQRVSPIFALVLCPTRELAIQLTAEANVLLKYHEGIGVQSLIGGTRFKPIRDD

SEQ ID NO: 39061 - protein, 453 aa, Zea mays subsp. mays
  peptide (1)..(453): Ceres Seq. ID no. 12362472
  misc_feature (343)..(448): Pfam Name: Pfam Description:  DEAD/DEAH box helicase
  misc_feature (243)..(448): NCBI GI NO: 15221724 NR Description: DEAD/DEAH box RNA helicase, putative
  misc_feature (1)..(91): NCBI GI NO: 15221724 NR Description: DEAD/DEAH box RNA helicase, putative
  misc_feature (243)..(448): NCBI GI NO: 15226161 NR Description: DEAD/DEAH box RNA helicase, putative
  misc_feature (1)..(80): NCBI GI NO: 15226161 NR Description: DEAD/DEAH box RNA helicase, putative
  misc_feature (315)..(446): NCBI GI NO: 15242854 NR Description: DEAD/DEAH box RNA helicase, putative
  misc_feature (287)..(446): NCBI GI NO: 9759355 NR Description: RNA helicase-like protein [Arabidopsis thaliana]
  misc_feature (287)..(446): NCBI GI NO: 30682500 NR Description: DEAD box RNA helicase, putative
  misc_feature (324)..(446): NCBI GI NO: 15242323 NR Description: DEAD/DEAH box RNA helicase, putative
  misc_feature (324)..(446): NCBI GI NO: 14334882 NR Description: putative RNA helicase [Arabidopsis thaliana]
  misc_feature (263)..(446): NCBI GI NO: 34912712 NR Description: putative RNA helicase
MHEKLARQKQRGLLRHEKQLYLARLRSEIRASRLPGAAAEAPPGGEGPTSSRAHIRALADRFRRPGAEDLWNEDDGPLRRVKRPPTGIASGVRHQQQQLDSGKPRGGPSWEDLTSLDQPRPLDRGKGPTSAAFNPRREYLTVVAPWCPRWDPRPLGFVAPKKSYPVMTRCSVSCQPCVDLRPLVASGLTEDGNGRKDTPLAQFNQERFYSVAARRFGRKWRPDSSDQDDKGTSAPKKNLRFGKKFGASSEEDSEIDESGDTGAIRRRWSSAALRNCDVKKERRVLKSYEEESNDLAGRIQELREEIRNREVLGTERRRYESRGESLLTSKRFDQCGVSALTVKALTDAGYVQTTVVQEAALPICLEGKDVLVKAKTGTGKSAAFLLPAIESVLNAMKSNTNQRVSPIFALVLCPTRELAIQLTAEANVLLKYHEGIGVQSLIGGTRFKPIRDD

SEQ ID NO: 39062 - protein, 287 aa, Zea mays subsp. mays
  peptide (1)..(287): Ceres Seq. ID no. 12362473
  misc_feature (177)..(282): Pfam Name: Pfam Description:  DEAD/DEAH box helicase
  misc_feature (77)..(282): NCBI GI NO: 15221724 NR Description: DEAD/DEAH box RNA helicase, putative
  misc_feature (77)..(282): NCBI GI NO: 15226161 NR Description: DEAD/DEAH box RNA helicase, putative
  misc_feature (149)..(280): NCBI GI NO: 15242854 NR Description: DEAD/DEAH box RNA helicase, putative
  misc_feature (121)..(280): NCBI GI NO: 9759355 NR Description: RNA helicase-like protein [Arabidopsis thaliana]
  misc_feature (121)..(280): NCBI GI NO: 30682500 NR Description: DEAD box RNA helicase, putative
  misc_feature (158)..(280): NCBI GI NO: 15242323 NR Description: DEAD/DEAH box RNA helicase, putative
  misc_feature (158)..(280): NCBI GI NO: 14334882 NR Description: putative RNA helicase [Arabidopsis thaliana]
  misc_feature (97)..(280): NCBI GI NO: 34912712 NR Description: putative RNA helicase
  misc_feature (159)..(280): NCBI GI NO: 34912714 NR Description: putative RNA helicase
  misc_feature (243)..(280): NCBI GI NO: 11358810 NR Description: RNA helicase RH31
MTRCSVSCQPCVDLRPLVASGLTEDGNGRKDTPLAQFNQERFYSVAARRFGRKWRPDSSDQDDKGTSAPKKNLRFGKKFGASSEEDSEIDESGDTGAIRRRWSSAALRNCDVKKERRVLKSYEEESNDLAGRIQELREEIRNREVLGTERRRYESRGESLLTSKRFDQCGVSALTVKALTDAGYVQTTVVQEAALPICLEGKDVLVKAKTGTGKSAAFLLPAIESVLNAMKSNTNQRVSPIFALVLCPTRELAIQLTAEANVLLKYHEGIGVQSLIGGTRFKPIRDD

SEQ ID NO: 39063 - DNA, 2275 bp, Zea mays subsp. mays; identical to SEQ ID NO: 38877
  misc_feature (1)..(2275): Ceres Seq. ID no. 13495441

SEQ ID NO: 39064 - protein, 574 aa, Zea mays subsp. mays; identical to SEQ ID NO: 38878
  peptide (1)..(574): Ceres Seq. ID no. 13495442
  misc_feature (115)..(504): Pfam Name: Pfam Description:  POT family
  misc_feature (1)..(548): NCBI GI NO: 37530496 NR Description: putative LeOPT1 - oligopeptide transporter
  misc_feature (1)..(574): NCBI GI NO: 37530498 NR Description: putative LeOPT1 - oligopeptide transporter
  misc_feature (1)..(566): NCBI GI NO: 15076661 NR Description: peptide transporter
  misc_feature (19)..(562): NCBI GI NO: 4102839 NR Description: LeOPT1 [Lycopersicon esculentum]
  misc_feature (1)..(566): NCBI GI NO: 15226861 NR Description: histidine transport protein (PTR2-B)
  misc_feature (24)..(562): NCBI GI NO: 30696666 NR Description: oligopeptide transporter -related
  misc_feature (1)..(566): NCBI GI NO: 31088360 NR Description: peptide transporter 1 [Vicia faba]
  misc_feature (42)..(567): NCBI GI NO: 38567969 NR Description: OSJNBa0093F12.10
  misc_feature (20)..(574): NCBI GI NO: 30687920 NR Description: oligopeptide transporter -related
  misc_feature (21)..(559): NCBI GI NO: 30683214 NR Description: nitrate transporter -related

SEQ ID NO: 39065 - protein, 523 aa, Zea mays subsp. mays; identical to SEQ ID NO: 38879
  peptide (1)..(523): Ceres Seq. ID no. 13495443
  misc_feature (64)..(453): Pfam Name: Pfam Description:  POT family
  misc_feature (1)..(497): NCBI GI NO: 37530496 NR Description: putative LeOPT1 - oligopeptide transporter
  misc_feature (1)..(523): NCBI GI NO: 37530498 NR Description: putative LeOPT1 - oligopeptide transporter
  misc_feature (1)..(515): NCBI GI NO: 15076661 NR Description: peptide transporter
  misc_feature (1)..(511): NCBI GI NO: 4102839 NR Description: LeOPT1 [Lycopersicon esculentum]
  misc_feature (1)..(515): NCBI GI NO: 15226861 NR Description: histidine transport protein (PTR2-B)
  misc_feature (1)..(511): NCBI GI NO: 30696666 NR Description: oligopeptide transporter -related
  misc_feature (1)..(515): NCBI GI NO: 31088360 NR Description: peptide transporter 1 [Vicia faba]
  misc_feature (1)..(516): NCBI GI NO: 38567969 NR Description: OSJNBa0093F12.10
  misc_feature (1)..(523): NCBI GI NO: 30687920 NR Description: oligopeptide transporter -related
  misc_feature (1)..(508): NCBI GI NO: 30683214 NR Description: nitrate transporter -related

SEQ ID NO: 39066 - protein, 457 aa, Zea mays subsp. mays; identical to SEQ ID NO: 38880
  peptide (1)..(457): Ceres Seq. ID no. 13495444
  misc_feature (1)..(387): Pfam Name: Pfam Description:  POT family
  misc_feature (1)..(431): NCBI GI NO: 37530496 NR Description: putative LeOPT1 - oligopeptide transporter
  misc_feature (1)..(457): NCBI GI NO: 37530498 NR Description: putative LeOPT1 - oligopeptide transporter
  misc_feature (1)..(449): NCBI GI NO: 15076661 NR Description: peptide transporter
  misc_feature (1)..(445): NCBI GI NO: 4102839 NR Description: LeOPT1 [Lycopersicon esculentum]
  misc_feature (1)..(449): NCBI GI NO: 15226861 NR Description: histidine transport protein (PTR2-B)
  misc_feature (1)..(445): NCBI GI NO: 30696666 NR Description: oligopeptide transporter -related
  misc_feature (1)..(449): NCBI GI NO: 31088360 NR Description: peptide transporter 1 [Vicia faba]
  misc_feature (1)..(450): NCBI GI NO: 38567969 NR Description: OSJNBa0093F12.10
  misc_feature (1)..(457): NCBI GI NO: 30687920 NR Description: oligopeptide transporter -related
  misc_feature (1)..(442): NCBI GI NO: 30683214 NR Description: nitrate transporter -related

SEQ ID NO: 39067 - DNA, 919 bp, Zea mays subsp. mays
  misc_feature (1)..(919): Ceres Seq. ID no. 12435382
  misc_feature (605)..(605): n is a, c, t, g, unknown, or other
  misc_feature (401)..(401): n is a, c, t, g, unknown, or other
  misc_feature (670)..(670): n is a, c, t, g, unknown, or other
  misc_feature (639)..(639): n is a, c, t, g, unknown, or other
  misc_feature (595)..(595): n is a, c, t, g, unknown, or other
ctcttcgtctgcagtctgctcgctcgcgattgcgattcccactcagccctccaggctcgaaacctaacccacccgcccggggatcccaagcggcggcggcggcggccatggagccctcccccgtcggcgacggtggctcggcggagcggtggcgcgcggaggcgtcgcgggcgttccagcactacctggaccgcgcggcgccgcacacggcggggcggtgggcgggcacgctcgtggccgcggcggtgtacgcgcttcgggtctactacgtgcgcggcttctacgtcgtcacctacgggctgggcatctacctgctcaacctcctcatcggcttcctctcccccatggtcgacccggagctcgaggcgctcgaggccgggcccgggctccccacccgcggntccgaagagttcaagcccttcgtccgccgcctccccgagttcaagttctggtatgccataacaaaagccttttgcattgctttcgtcatgaccttcttctctgtattcgatgttcctgtcttctggccaatacttctctgttactggattgtgctctttgtcctgacaatgaagcgacaaattatgcatatggncaagtacaantatgtcccattcagctttggaaagcagaggtatngcggaaagaaacgccctggagccagtgcatnaaaagagtaaagaccggagggtcttgtacctcaaagagcaaatgcctgtgttatctgtgaggcattttgctggcatcatggtattttgagtaccagctactgatagtgaatgcacaccatattcactagtggagtctgcagagaagctaaccagacttttgcattggttaatgattcctgtttcacaagtcggtagtttatgtacaatgacatggaacatagctagtaaatcagattctcagttcctct

SEQ ID NO: 39068 - protein, 225 aa, Zea mays subsp. mays
  peptide (1)..(225): Ceres Seq. ID no. 12435383
  misc_feature (42)..(211): Pfam Name: Pfam Description:  Rer1 family
  misc_feature (1)..(211): NCBI GI NO: 34894094 NR Description: putative Rer1A protein (AtRer1A)
  misc_feature (42)..(222): NCBI GI NO: 15234975 NR Description: AtRer1A; protein id: At4g39220
  misc_feature (36)..(216): NCBI GI NO: 11281669 NR Description: endoplasmatic reticulum retrieval protein Rer1B
  misc_feature (36)..(216): NCBI GI NO: 15226596 NR Description: AtRer1B; protein id: At2g21600
  misc_feature (28)..(151): NCBI GI NO: 35210534 NR Description: putative endoplasmatic reticulum retrieval proteinRer1B
  misc_feature (151)..(210): NCBI GI NO: 35210534 NR Description: putative endoplasmatic reticulum retrieval proteinRer1B
  misc_feature (49)..(209): NCBI GI NO: 18398679 NR Description: putative integral membrane protein
  misc_feature (49)..(209): NCBI GI NO: 25411844 NR Description: probable integral membrane protein
  misc_feature (49)..(209): NCBI GI NO: 30680307 NR Description: integral membrane protein -related
  misc_feature (23)..(222): NCBI GI NO: 18400234 NR Description: putative integral membrane protein
  misc_feature (133)..(133): Xaa is any aa, unknown or other
  misc_feature (198)..(198): Xaa is any aa, unknown or other
  misc_feature (201)..(201): Xaa is any aa, unknown or other
  misc_feature (213)..(213): Xaa is any aa, unknown or other
  misc_feature (223)..(223): Xaa is any aa, unknown or other
LRLQSARSRLRFPLSPPGSKPNPPARGSQAAAAAAMEPSPVGDGGSAERWRAEASRAFQHYLDRAAPHTAGRWAGTLVAAAVYALRVYYVRGFYVVTYGLGIYLLNLLIGFLSPMVDPELEALEAGPGLPTRXSEEFKPFVRRLPEFKFWYAITKAFCIAFVMTFFSVFDVPVFWPILLCYWIVLFVLTMKRQIMHMXKYXYVPFSFGKQRYXGKKRPGASAXKE

SEQ ID NO: 39069 - protein, 190 aa, Zea mays subsp. mays
  peptide (1)..(190): Ceres Seq. ID no. 12435384
  misc_feature (7)..(176): Pfam Name: Pfam Description:  Rer1 family
  misc_feature (1)..(176): NCBI GI NO: 34894094 NR Description: putative Rer1A protein (AtRer1A)
  misc_feature (7)..(187): NCBI GI NO: 15234975 NR Description: AtRer1A; protein id: At4g39220
  misc_feature (1)..(181): NCBI GI NO: 11281669 NR Description: endoplasmatic reticulum retrieval protein Rer1B
  misc_feature (1)..(181): NCBI GI NO: 15226596 NR Description: AtRer1B; protein id: At2g21600
  misc_feature (1)..(116): NCBI GI NO: 35210534 NR Description: putative endoplasmatic reticulum retrieval proteinRer1B
  misc_feature (116)..(175): NCBI GI NO: 35210534 NR Description: putative endoplasmatic reticulum retrieval proteinRer1B
  misc_feature (14)..(174): NCBI GI NO: 18398679 NR Description: putative integral membrane protein
  misc_feature (14)..(174): NCBI GI NO: 25411844 NR Description: probable integral membrane protein
  misc_feature (14)..(174): NCBI GI NO: 30680307 NR Description: integral membrane protein -related
  misc_feature (1)..(187): NCBI GI NO: 18400234 NR Description: putative integral membrane protein
  misc_feature (98)..(98): Xaa is any aa, unknown or other
  misc_feature (163)..(163): Xaa is any aa, unknown or other
  misc_feature (166)..(166): Xaa is any aa, unknown or other
  misc_feature (178)..(178): Xaa is any aa, unknown or other
  misc_feature (188)..(188): Xaa is any aa, unknown or other
MEPSPVGDGGSAERWRAEASRAFQHYLDRAAPHTAGRWAGTLVAAAVYALRVYYVRGFYVVTYGLGIYLLNLLIGFLSPMVDPELEALEAGPGLPTRXSEEFKPFVRRLPEFKFWYAITKAFCIAFVMTFFSVFDVPVFWPILLCYWIVLFVLTMKRQIMHMXKYXYVPFSFGKQRYXGKKRPGASAXKE

SEQ ID NO: 39070 - protein, 153 aa, Zea mays subsp. mays
  peptide (1)..(153): Ceres Seq. ID no. 12435385
  misc_feature (134)..(134): Xaa is any aa, unknown or other
LFVCSLLARDCDSHSALQARNLTHPPGDPKRRRRRPWSPPPSATVARRSGGARRRRGRSSTTWTARRRTRRGGGRARSWPRRCTRFGSTTCAASTSSPTGWASTCSTSSSASSPPWSTRSSRRSRPGPGSPPAXPKSSSPSSAASPSSSSGMP

SEQ ID NO: 39071 - DNA, 1347 bp, Zea mays subsp. mays
  misc_feature (1)..(1347): Ceres Seq. ID no. 12368098
aaacacaaatggcgtattggcgttccacagaacaatggcacggtgtctatgggtaggcaagaacgcagccgctagcggcgctggcgcggccattcccaaacctccggctccccatcccccggcaccgcgatctctgccggccgtggacgactgcccgactctcgcattcctgcggccgaagccgaccgcggtcgggtacgccaccgcgaccgtcccgctcccggcgcactgcttccccgccctccccgtcggcgaccacctcttccaccgcctccagctcgacgggcttatacctcccgtgagcacggcgacgcggccgccggagcatgcgggcgtgacggtggagcaggcgaggaaggtggcgagggcggccgagatggaggtggcgagggcgaggctgaggtcgaacgcccagagcgtcgtgtccgggtcggaattcgccgcgctctgcgtcgacattgccggcggcgtcgagggaggccagccggctggtccgtgcgctggacgagtccggcgtcgtcatcgtcctcggcgacgccgtcttcctccgccccgacatgaaatcgggatcttgcgacgataaatcggagcgaacggcgatactggaacaaacggaaagagagagagcaaaggaaagaaaaaaagaaacagcggcggcggcacgagtcgagggccgccagaacctaggcatgcgccgccgacagcaaggtagcgaaggccatcgggagcatcctccccgggaaacagcagctgcaggcgccgcgagccggagacgggagcgaggcgcgcaagcgcgagctggaggctatggaagctcagaaggcggcgatcgacgcggacgcggccgcgcaggtgcggcgcgagctgtggtgcgggctgggcctgctggcgacgcagacgctggggttcatgcggctcaccttctgggagctgtcgtgggacgtgatggagccggtgtgcttctacgccacgtcgctctacttcatgtccggctacgccttcttcatgcgcacggccacggagccgtccttcgagggcttctaccggagccgcttcgcgtccaagcagcgccgcctcatgcgggcgcgcgggttcgacgtcgaccgctacaacgccctgcggaagggccaggggcaggggctcgttcccctcgccgaccccgacgcgtgtaggcacgtcagccatgtacaatagcgcgtcgctccgcccggacgaggtcgcttgggataaacgtgcgtcgcatcgtcggctcaccgtctaatcgtgaagcaatagctctctgtacagattcaggaggacgagccattgtagaagaaggctcgtcagaacggaaactatatctatact

SEQ ID NO: 39072 - protein, 204 aa, Zea mays subsp. mays
  peptide (1)..(204): Ceres Seq. ID no. 12368099
  misc_feature (1)..(29): NCBI GI NO: 20330769 NR Description: Hypothetical protein
  misc_feature (1)..(31): NCBI GI NO: 34909244 NR Description: B1148D12.10
MKSGSCDDKSERTAILEQTERERAKERKKETAAAARVEGRQNLGMRRRQQGSEGHREHPPRETAAAGAASRRRERGAQARAGGYGSSEGGDRRGRGRAGAARAVVRAGPAGDADAGVHAAHLLGAVVGRDGAGVLLRHVALLHVRLRLLHAHGHGAVLRGLLPEPLRVQAAPPHAGARVRRRPLQRPAEGPGAGARSPRRPRRV

SEQ ID NO: 39073 - protein, 193 aa, Zea mays subsp. mays
  peptide (1)..(193): Ceres Seq. ID no. 12368100
  misc_feature (6)..(161): NCBI GI NO: 20330769 NR Description: Hypothetical protein
  misc_feature (41)..(163): NCBI GI NO: 37535778 NR Description: unknown protein
  misc_feature (81)..(150): NCBI GI NO: 15224063 NR Description: hypothetical protein; protein id: At2g23790.1
  misc_feature (81)..(150): NCBI GI NO: 24496456 NR Description: hypothetical protein [Arabidopsis thaliana]
  misc_feature (89)..(160): NCBI GI NO: 14596231 NR Description: Unknown protein [Arabidopsis thaliana]
  misc_feature (89)..(160): NCBI GI NO: 15240047 NR Description: putative protein; protein id: At5g66650
  misc_feature (90)..(152): NCBI GI NO: 15234535 NR Description: putative protein; protein id: At4g36820.1
  misc_feature (82)..(160): NCBI GI NO: 15239011 NR Description: unknown protein; protein id: At5g42610.1
NTNGVLAFHRTMARCLWVGKNAAASGAGAAIPKPPAPHPPAPRSLPAVDDCPTLAFLRPKPTAVGYATATVPLPAHCFPALPVGDHLFHRLQLDGLIPPVSTATRPPEHAGVTVEQARKVARAAEMEVARARLRSNAQSVVSGSEFAALCVDIAGGVEGGQPAGPCAGRVRRRHRPRRRRLPPPRHEIGILRR

SEQ ID NO: 39074 - protein, 182 aa, Zea mays subsp. mays
  peptide (1)..(182): Ceres Seq. ID no. 12368101
  misc_feature (1)..(150): NCBI GI NO: 20330769 NR Description: Hypothetical protein
  misc_feature (30)..(152): NCBI GI NO: 37535778 NR Description: unknown protein
  misc_feature (70)..(139): NCBI GI NO: 15224063 NR Description: hypothetical protein; protein id: At2g23790.1
  misc_feature (70)..(139): NCBI GI NO: 24496456 NR Description: hypothetical protein [Arabidopsis thaliana]
  misc_feature (78)..(149): NCBI GI NO: 14596231 NR Description: Unknown protein [Arabidopsis thaliana]
  misc_feature (78)..(149): NCBI GI NO: 15240047 NR Description: putative protein; protein id: At5g66650
  misc_feature (79)..(141): NCBI GI NO: 15234535 NR Description: putative protein; protein id: At4g36820.1
  misc_feature (71)..(149): NCBI GI NO: 15239011 NR Description: unknown protein; protein id: At5g42610.1
MARCLWVGKNAAASGAGAAIPKPPAPHPPAPRSLPAVDDCPTLAFLRPKPTAVGYATATVPLPAHCFPALPVGDHLFHRLQLDGLIPPVSTATRPPEHAGVTVEQARKVARAAEMEVARARLRSNAQSVVSGSEFAALCVDIAGGVEGGQPAGPCAGRVRRRHRPRRRRLPPPRHEIGILRR

SEQ ID NO: 39075 - DNA, 2068 bp, Zea mays subsp. mays
  misc_feature (1)..(2068): Ceres Seq. ID no. 12360559
gaaccaagcggcgatcgatcgaaacgaggcgtcgcgtggctgccggagatgtcgcagaagaggcagccggaggagggcgacgtcccgcggcgcgccgccgatgccggcggcggcggcggaggaggagacgagcccggtgggagctcgtcgcgctcctctctgccccagcgccacggcgagccgaagcgacagaggatcgcccttcgcgatgtgatcacggaggtgatgcggaacaccagcatcgagaagtttctaatcgcgctcgagcccctcatcaggagagtggtaaaagaagaaattgagtcggcttttgcaaaccatgcctctatgatggcaaggagtgtcacagacagtgttccatctgtgtcaaagaatttgcagctgcagttcatgaccagactttctcttccaatatttactggatccaagattgaaggagagggctcccttgagtataactattgctctagtcgacgctttgacaagacaaattgtagcaccaggcaaagagttccagataaaggttgagattgtagttctggagggggattttgaaagtggagaagatgatgactggacagctcaggagtttaacaataacattgttaaagaaagagaaggcaaaaggcccttgatttctggggatgcatccattgccctcgtcgatggcattggaacagtaggggaactttcattcacagataactccagctggacacggagccgaaagttcaggctaggagcaagaacagaggatggttctttcaatggtgtaagagtacgggaagcaaaaactgaatcatttgtggttaaggatcatcgaggagaattgtacaagaagcaccacccaccatttcttgaagatgaagtctggcgcctagagaaaattggcaaggaaggtgcttttcacaagcgtttgaatagggagaacatttgcactgtcaaagattttctcaccttgttaaatcttgatgcttctaggcttcgaaagatattaggtagtggcatgtcaacaaagatgtgggaggccactgtggaacatgcaaaaacatgtgttctaactgacaaagtgcatcactactatcctgatggtctaaacaaagctggtgttgtattcaatgtagttggagaagtaagagggttaatatctgataaatatgtttttgttgatgactttactgaaaaggagaaggccgaagcacgtgcagcagtgaagcaagcatatgaacactggaaggatgtccatacttgtgacaatgaaacgcttgtggaaaacccttcacatccattcaatttgggatctccatctttgcatgaaaatcagtataaccagttgcctacacaagtttctactgatggttttagtttgagcaattcggccatactgtcacccaacattttctcaatggagccatcgagtgctttagacccttgtagtatattggagactgaagaaagcagtgctaatcaatttcagtcggtgttgcccccagttgggggccatgaagtgcctcgagaacctcagacgctggataagttctccaactcgttggtatatgatgactgcagcgcccatccctcattcagtgaaagctattacagcagtgtagatcccagcatgtccttcgacacacaagatcttggagctgcactgaaaggcttcattgcaaccatatcgaagcctaaggcggcatatagaggatggagaacattgtcttatgtgctaggatggattttctataccaagagaattgttgcaaggagaaagaaacatgggaaataagtgaacacaagtctttgtgtagttaaatgcgaatataagcttagaaaatgagaaattatgtacattagtttgtttcttgtcacagctggtaagctctgctggtttcttcagctgtaaatggtcatgttctcagctatggttcgctatgcggctgtaaataatcaaatgaagtttgtacagggtgagggatgcgcatagcatttctgatgttttggatggatgccggagcttgctttttgatgcggcccgtgtattatctatgtagtagtatgcagtatgctgctg

SEQ ID NO: 39076 - protein, 258 aa, Zea mays subsp. mays
  peptide (1)..(258): Ceres Seq. ID no. 12360560
  misc_feature (1)..(88): NCBI GI NO: 32482927 NR Description: OSJNBa0058G03.4
  misc_feature (1)..(97): NCBI GI NO: 30687005 NR Description: calmodulin-binding protein [Arabidopsis thaliana]
  misc_feature (1)..(89): NCBI GI NO: 15242785 NR Description: calmodulin-binding protein; protein id:At5g57580
  misc_feature (1)..(253): NCBI GI NO: 22329041 NR Description: calmodulin-binding protein; protein id: At4g31000
  misc_feature (1)..(124): NCBI GI NO: 10178088 NR Description: contains similarity to calmodulin-bindingprotein~gene_id:K19B1
  misc_feature (1)..(206): NCBI GI NO: 25354646 NR Description: probable calmodulin-binding protein
  misc_feature (1)..(124): NCBI GI NO: 30697704 NR Description: calmodulin-binding protein [Arabidopsis thaliana]
  misc_feature (1)..(131): NCBI GI NO: 7489107 NR Description: calmodulin-binding protein TCB60 - common tobacco
  misc_feature (1)..(204): NCBI GI NO: 7484830 NR Description: calmodulin-binding protein homolog F14M19
  misc_feature (1)..(253): NCBI GI NO: 25354643 NR Description: probable calmodulin-binding protein
MSTKMWEATVEHAKTCVLTDKVHHYYPDGLNKAGVVFNVVGEVRGLISDKYVFVDDFTEKEKAEARAAVKQAYEHWKDVHTCDNETLVENPSHPFNLGSPSLHENQYNQLPTQVSTDGFSLSNSAILSPNIFSMEPSSALDPCSILETEESSANQFQSVLPPVGGHEVPREPQTLDKFSNSLVYDDCSAHPSFSESYYSSVDPSMSFDTQDLGAALKGFIATISKPKAAYRGWRTLSYVLGWIFYTKRIVARRKKHGK

SEQ ID NO: 39077 - protein, 254 aa, Zea mays subsp. mays
  peptide (1)..(254): Ceres Seq. ID no. 12360561
  misc_feature (1)..(84): NCBI GI NO: 32482927 NR Description: OSJNBa0058G03.4
  misc_feature (1)..(93): NCBI GI NO: 30687005 NR Description: calmodulin-binding protein [Arabidopsis thaliana]
  misc_feature (1)..(85): NCBI GI NO: 15242785 NR Description: calmodulin-binding protein; protein id:At5g57580
  misc_feature (1)..(249): NCBI GI NO: 22329041 NR Description: calmodulin-binding protein; protein id: At4g31000
  misc_feature (1)..(120): NCBI GI NO: 10178088 NR Description: contains similarity to calmodulin-bindingprotein~gene_id:K19B1
  misc_feature (1)..(202): NCBI GI NO: 25354646 NR Description: probable calmodulin-binding protein
  misc_feature (1)..(120): NCBI GI NO: 30697704 NR Description: calmodulin-binding protein [Arabidopsis thaliana]
  misc_feature (1)..(127): NCBI GI NO: 7489107 NR Description: calmodulin-binding protein TCB60 - common tobacco
  misc_feature (1)..(200): NCBI GI NO: 7484830 NR Description: calmodulin-binding protein homolog F14M19
  misc_feature (1)..(249): NCBI GI NO: 25354643 NR Description: probable calmodulin-binding protein
MWEATVEHAKTCVLTDKVHHYYPDGLNKAGVVFNVVGEVRGLISDKYVFVDDFTEKEKAEARAAVKQAYEHWKDVHTCDNETLVENPSHPFNLGSPSLHENQYNQLPTQVSTDGFSLSNSAILSPNIFSMEPSSALDPCSILETEESSANQFQSVLPPVGGHEVPREPQTLDKFSNSLVYDDCSAHPSFSESYYSSVDPSMSFDTQDLGAALKGFIATISKPKAAYRGWRTLSYVLGWIFYTKRIVARRKKHGK

SEQ ID NO: 39078 - protein, 175 aa, Zea mays subsp. mays
  peptide (1)..(175): Ceres Seq. ID no. 12360562
  misc_feature (30)..(147): NCBI GI NO: 32482927 NR Description: OSJNBa0058G03.4
  misc_feature (60)..(147): NCBI GI NO: 30687005 NR Description: calmodulin-binding protein [Arabidopsis thaliana]
  misc_feature (60)..(147): NCBI GI NO: 15242785 NR Description: calmodulin-binding protein; protein id:At5g57580
  misc_feature (60)..(149): NCBI GI NO: 22329041 NR Description: calmodulin-binding protein; protein id: At4g31000
  misc_feature (71)..(147): NCBI GI NO: 10178088 NR Description: contains similarity to calmodulin-bindingprotein~gene_id:K19B1
  misc_feature (85)..(147): NCBI GI NO: 25354646 NR Description: probable calmodulin-binding protein
  misc_feature (76)..(147): NCBI GI NO: 30697704 NR Description: calmodulin-binding protein [Arabidopsis thaliana]
  misc_feature (56)..(96): NCBI GI NO: 25354646 NR Description: probable calmodulin-binding protein
  misc_feature (56)..(147): NCBI GI NO: 18398836 NR Description: calmodulin-binding protein; protein id:At2g18750
  misc_feature (63)..(145): NCBI GI NO: 34895622 NR Description: putative calmodulin-binding protein
EPSGDRSKRGVAWLPEMSQKRQPEEGDVPRRAADAGGGGGGGDEPGGSSSRSSLPQRHGEPKRQRIALRDVITEVMRNTSIEKFLIALEPLIRRVVKEEIESAFANHASMMARSVTDSVPSVSKNLQLQFMTRLSLPIFTGSKIEGEGSLEYNYCSSRRFDKTNCSTRQRVPDKG

SEQ ID NO: 39079 - DNA, 2151 bp, Zea mays subsp. mays
  misc_feature (1)..(2151): Ceres Seq. ID no. 12383480
ctcgatcacttctctcccgatcctcactcccgtgtcgtgtctagcgccgacggcgttgctaccggagccggccagcggccacgatgcctacaatgcacgcgctccgcctatgcccgctgctctccaccatccgatccacaccaccgcgggccactgccgcagcccgccagggcgcgctcttcgtcgcccgctgctcctccgccgggacgccgtcagccgcccaggcgctcaagatcagttcgatcccgaccaagccagttgaggggcagaagactgggactagtggcctgaggaaaaaggtgaaagtgttccagcaggagaactaccttgctaattggattcaggctctattcaattccttgccccctgaagattatgtgggtgcaacccttgtacttgggggtgatggccggtactttaacaaggaggctgctcagatcatcattaagattgcagctggaaatggagttcagaagatcatagttggcaggaatggtctactgtcaacacctgctgtatctgctgtaattcgtaaaagaaaagccaatggcggctttatcatgagtgcaagccataatccaggtggaccagacaatgactggggtattaagtttaactacagcagtggacagccagcaccggagacgattactgatcaaatttatgggaacacactatcaatttctgaaataaaaacagcagacattcctgatactgatttgtcctctgttggagttgtaagctatggtgatttcgccatagaagtgatagatcctgtttcagattaccttgaactaatggagaatgtgtttgacttccaacttatcaaggatttgctttctcggcctgatttcaggttcatattcgatgcaatgcatgcaattactggtgcgtatgccggacccatttttgttgagaaacttggagctgatccggactgcatattaaatggggtgcctcttgaagattttggaaatggccatccagatccaaatctaacttacgctaaggagcttgtttttactatgtttggaacccatgcacctgactttggtgcagcaagtgatggtgatggtgatcggaacatgattcttgggaaaaggttctttattaccccatcagactctgttgcaataattgcagccaatgcacaggcagcaattccttatttccagtttggtacaaaaggactcgcgagatcaatgccaaccagtggtgctcttgatcgtgttgccgagaaattgaatgttccattctttgaggaaaattgtctatttgtggagaggaaagttttgggactggatctgatcacatcagagagaaggatggcatctgggctgttctggcttggctttccatacttgcacaccggaacaaggataagaaggtcggagagagattagtgtcagttgaagatattgctatggagcactggaaaacctatggcaggaatttcttttctagatacgattatgaggcgtgtgaatcacacagtgcaaaccagatgatggatcaccttagagatgttatggcaaatagcaagcctggagagaaatacggaaattacaccctccaatttgctgatgatttcagctatactgatcctgtagacggtagtacggtatcaaaacaaggacttcgatttgttttcactgatggatctaggattatcttccggctttcgggaaccggatctgctggagctactatccgcctctacatagaacaatttgaatctgatatctcgaagcatagtctcgatgctcaaacagctttgaagcctttaatagacctggctttgtctgtttcgaagctcaaggacttcacaggaagagagaaacctactgtcataacataatatttagatgttgttgtcctcggccataccaactgagcagcatgggccaagaattgaactgatggcaaatatgtatcattaggacaaattgcgccagaataagttgtttctcggaagtgttgagcacctccagcatcttccaaatatatctccaataagatattagtgggataacatatggcagatgttatcaaataatgtaaatatagatcgaacacgagacatgttttacgtggagaactcttgtatgaaaaaaaaatcatggatgctaactcgtgattttcattgtattc

SEQ ID NO: 39080 - protein, 439 aa, Zea mays subsp. mays
  peptide (1)..(439): Ceres Seq. ID no. 12383481
  misc_feature (234)..(342): Pfam Name: Pfam Description:  Phosphoglucomutase/phosphomannomutase
  misc_feature (5)..(393): NCBI GI NO: 22725961 NR Description: putative plastidic phosphoglucomutase
  misc_feature (5)..(393): NCBI GI NO: 37531886 NR Description: putative phosphoglucomutase
  misc_feature (28)..(393): NCBI GI NO: 12585295 NR Description: Phosphoglucomutase, chloroplast precursor
  misc_feature (34)..(393): NCBI GI NO: 15242191 NR Description: phosphoglucomutase (emb|CAB64725
  misc_feature (34)..(393): NCBI GI NO: 25292704 NR Description: phosphoglucomutase (EC 5.4.2.2) precursor
  misc_feature (22)..(393): NCBI GI NO: 12585325 NR Description: Phosphoglucomutase, chloroplast precursor
  misc_feature (38)..(393): NCBI GI NO: 12585317 NR Description: Phosphoglucomutase, chloroplast precursor
  misc_feature (51)..(393): NCBI GI NO: 12585330 NR Description: Phosphoglucomutase, cytoplasmic
  misc_feature (56)..(393): NCBI GI NO: 12585326 NR Description: Phosphoglucomutase, cytoplasmic
  misc_feature (56)..(393): NCBI GI NO: 18076790 NR Description: phosphoglucomutase [Triticum aestivum]
MPTMHALRLCPLLSTIRSTPPRATAAARQGALFVARCSSAGTPSAAQALKISSIPTKPVEGQKTGTSGLRKKVKVFQQENYLANWIQALFNSLPPEDYVGATLVLGGDGRYFNKEAAQIIIKIAAGNGVQKIIVGRNGLLSTPAVSAVIRKRKANGGFIMSASHNPGGPDNDWGIKFNYSSGQPAPETITDQIYGNTLSISEIKTADIPDTDLSSVGVVSYGDFAIEVIDPVSDYLELMENVFDFQLIKDLLSRPDFRFIFDAMHAITGAYAGPIFVEKLGADPDCILNGVPLEDFGNGHPDPNLTYAKELVFTMFGTHAPDFGAASDGDGDRNMILGKRFFITPSDSVAIIAANAQAAIPYFQFGTKGLARSMPTSGALDRVAEKLNVPFFEENCLFVERKVLGLDLITSERRMASGLFWLGFPYLHTGTRIRRSERD

SEQ ID NO: 39081 - protein, 436 aa, Zea mays subsp. mays
  peptide (1)..(436): Ceres Seq. ID no. 12383482
  misc_feature (231)..(339): Pfam Name: Pfam Description:  Phosphoglucomutase/phosphomannomutase
  misc_feature (2)..(390): NCBI GI NO: 22725961 NR Description: putative plastidic phosphoglucomutase
  misc_feature (2)..(390): NCBI GI NO: 37531886 NR Description: putative phosphoglucomutase
  misc_feature (25)..(390): NCBI GI NO: 12585295 NR Description: Phosphoglucomutase, chloroplast precursor
  misc_feature (31)..(390): NCBI GI NO: 15242191 NR Description: phosphoglucomutase (emb|CAB64725
  misc_feature (31)..(390): NCBI GI NO: 25292704 NR Description: phosphoglucomutase (EC 5.4.2.2) precursor
  misc_feature (19)..(390): NCBI GI NO: 12585325 NR Description: Phosphoglucomutase, chloroplast precursor
  misc_feature (35)..(390): NCBI GI NO: 12585317 NR Description: Phosphoglucomutase, chloroplast precursor
  misc_feature (48)..(390): NCBI GI NO: 12585330 NR Description: Phosphoglucomutase, cytoplasmic
  misc_feature (53)..(390): NCBI GI NO: 12585326 NR Description: Phosphoglucomutase, cytoplasmic
  misc_feature (53)..(390): NCBI GI NO: 18076790 NR Description: phosphoglucomutase [Triticum aestivum]
MHALRLCPLLSTIRSTPPRATAAARQGALFVARCSSAGTPSAAQALKISSIPTKPVEGQKTGTSGLRKKVKVFQQENYLANWIQALFNSLPPEDYVGATLVLGGDGRYFNKEAAQIIIKIAAGNGVQKIIVGRNGLLSTPAVSAVIRKRKANGGFIMSASHNPGGPDNDWGIKFNYSSGQPAPETITDQIYGNTLSISEIKTADIPDTDLSSVGVVSYGDFAIEVIDPVSDYLELMENVFDFQLIKDLLSRPDFRFIFDAMHAITGAYAGPIFVEKLGADPDCILNGVPLEDFGNGHPDPNLTYAKELVFTMFGTHAPDFGAASDGDGDRNMILGKRFFITPSDSVAIIAANAQAAIPYFQFGTKGLARSMPTSGALDRVAEKLNVPFFEENCLFVERKVLGLDLITSERRMASGLFWLGFPYLHTGTRIRRSERD

SEQ ID NO: 39082 - protein, 280 aa, Zea mays subsp. mays
  peptide (1)..(280): Ceres Seq. ID no. 12383483
  misc_feature (75)..(183): Pfam Name: Pfam Description:  Phosphoglucomutase/phosphomannomutase
  misc_feature (1)..(234): NCBI GI NO: 22725961 NR Description: putative plastidic phosphoglucomutase
  misc_feature (1)..(234): NCBI GI NO: 37531886 NR Description: putative phosphoglucomutase
  misc_feature (1)..(234): NCBI GI NO: 12585295 NR Description: Phosphoglucomutase, chloroplast precursor
  misc_feature (1)..(234): NCBI GI NO: 15242191 NR Description: phosphoglucomutase (emb|CAB64725
  misc_feature (1)..(234): NCBI GI NO: 25292704 NR Description: phosphoglucomutase (EC 5.4.2.2) precursor
  misc_feature (1)..(234): NCBI GI NO: 12585325 NR Description: Phosphoglucomutase, chloroplast precursor
  misc_feature (1)..(234): NCBI GI NO: 12585317 NR Description: Phosphoglucomutase, chloroplast precursor
  misc_feature (1)..(234): NCBI GI NO: 12585330 NR Description: Phosphoglucomutase, cytoplasmic
  misc_feature (1)..(234): NCBI GI NO: 12585326 NR Description: Phosphoglucomutase, cytoplasmic
  misc_feature (1)..(234): NCBI GI NO: 18076790 NR Description: phosphoglucomutase [Triticum aestivum]
MSASHNPGGPDNDWGIKFNYSSGQPAPETITDQIYGNTLSISEIKTADIPDTDLSSVGVVSYGDFAIEVIDPVSDYLELMENVFDFQLIKDLLSRPDFRFIFDAMHAITGAYAGPIFVEKLGADPDCILNGVPLEDFGNGHPDPNLTYAKELVFTMFGTHAPDFGAASDGDGDRNMILGKRFFITPSDSVAIIAANAQAAIPYFQFGTKGLARSMPTSGALDRVAEKLNVPFFEENCLFVERKVLGLDLITSERRMASGLFWLGFPYLHTGTRIRRSERD

SEQ ID NO: 39083 - DNA, 1739 bp, Zea mays subsp. mays
  misc_feature (1)..(1739): Ceres Seq. ID no. 13494501
tagaacatcctaatcgaaaaaccctaccccccacacggccacacacacaccgccgcgtccgacccccacgccgtcgactgctcgaccggtcggctccgatggggtacgtgctgtcggcggtgggcagggtgctggagcagcccacggcgtggggggcggcctgggagatggcactcctcgcggggcccctgtgggcggcggccctcctcggcctgctgctcggctgggcctggcgcccgcgctgggcatccggcctcgtcgtcgccaccgcggacgacggcggtagccccgccgccgccgcgcagccgcccttcgccacgctcgacttctggaaggcccagctccccgcccgcctccgcgccccgctcggcaccgccgtgcagcagagggagggtgacacggacgccgtgcaacggaaccgcggaacggtggcgcttggcaggtcctcagagacggagacggcgacggtggcggtggggatggccgacctggtgaacctctggaggctggtggagggcgcggacggcggcccggcctggaccaagatgatggagaagtcgctgcccaccatgacctaccgggcgtggaggagggacgcccagaccgggcctccgcagtaccagagcagcagcatcttcgagaacgccagtccagaggaggtgagggacttcttcggggacgacgagttccggatgtccaacaggtgggacgacatgctcatctaccacaagaccctggaggagtgccggaccactgggacgatgaaagtgcattgggtccggaagttccccttcttctgcagcgacagggagtacataatcgcccggcggatatggaagctggggggcgcctattattgcgtcacaaagggcataccatgctcatccattccacggcgtagcagacctcggagagtcgatctgtattactcaagctggtgcatccgcgcagtggagtccaggagagggaacggaggaggaaggggggcgacggcctgtgaggttctgctgttccaccacgaggacatgggcatcccgtacgagatcgccaagctgggcatcaggcaggggatgtgggggtgcgtgaagaggatcgagccggggctccgggcctaccagcaggcgcgggccgcgggggcgccgccgtcgcggagcgccctgatggcccggatcaacaccaaggtcagcgccgacggtttcactcgccagtcgtcgtccagttccagcggcggcgacgggccggagaccgcggacgacgcgcaggagaccgagaacaagaagcccgcgacgaggagccacgcagcggcgaggctcctcgtgctcggcggcgcggtcgctctggcctgctgcacccttgaccaggggctcctgaccaaggctctcatcttcggcgtcgcgcggaggttcgtcgggcagaggaaggacgttgtagcgtcccacacaccttgtcgctcgtacggtcgtgccgtgtgctgatcgccgacgtcgagaagcgggggaaggaggtggtttgtgtgggctttgtggatgtgtaattggtgctgatgccattgtggctgaaagagagcggacgaagagcgttttggtgtctacgtgtgtatacgctgccggctgtcggatcacgagggagaggggtttcctactatatacatgtgtaaaaatttgtttcatgtaatcttgtatctgagtgaccagatcaggtgattatgcagatgagaagaacagagttttttttcggcc

SEQ ID NO: 39084 - protein, 490 aa, Zea mays subsp. mays
  peptide (1)..(490): Ceres Seq. ID no. 13494502
  misc_feature (206)..(287): Pfam Name: Pfam Description:  START domain
  misc_feature (44)..(468): NCBI GI NO: 18033654 NR Description: putative nodule membrane protein [Medicago sativa]
  misc_feature (66)..(470): NCBI GI NO: 38344869 NR Description: OSJNBa0020P07.12
  misc_feature (148)..(413): NCBI GI NO: 15217736 NR Description: membrane related protein CP5 -related
  misc_feature (55)..(82): NCBI GI NO: 15217736 NR Description: membrane related protein CP5 -related
  misc_feature (148)..(405): NCBI GI NO: 22135902 NR Description: membrane related protein CP5, putative
  misc_feature (55)..(82): NCBI GI NO: 22135902 NR Description: membrane related protein CP5, putative
  misc_feature (162)..(473): NCBI GI NO: 10178166 NR Description: membrane related protein-like
  misc_feature (162)..(473): NCBI GI NO: 18423599 NR Description: membrane related protein-like
  misc_feature (56)..(83): NCBI GI NO: 10178166 NR Description: membrane related protein-like
  misc_feature (56)..(83): NCBI GI NO: 18423599 NR Description: membrane related protein-like
EHPNRKTLPPTRPHTHRRVRPPRRRLLDRSAPMGYVLSAVGRVLEQPTAWGAAWEMALLAGPLWAAALLGLLLGWAWRPRWASGLVVATADDGGSPAAAAQPPFATLDFWKAQLPARLRAPLGTAVQQREGDTDAVQRNRGTVALGRSSETETATVAVGMADLVNLWRLVEGADGGPAWTKMMEKSLPTMTYRAWRRDAQTGPPQYQSSSIFENASPEEVRDFFGDDEFRMSNRWDDMLIYHKTLEECRTTGTMKVHWVRKFPFFCSDREYIIARRIWKLGGAYYCVTKGIPCSSIPRRSRPRRVDLYYSSWCIRAVESRRGNGGGRGATACEVLLFHHEDMGIPYEIAKLGIRQGMWGCVKRIEPGLRAYQQARAAGAPPSRSALMARINTKVSADGFTRQSSSSSSGGDGPETADDAQETENKKPATRSHAAARLLVLGGAVALACCTLDQGLLTKALIFGVARRFVGQRKDVVASHTPCRSYGRAVC

SEQ ID NO: 39085 - protein, 458 aa, Zea mays subsp. mays
  peptide (1)..(458): Ceres Seq. ID no. 13494503
  misc_feature (174)..(255): Pfam Name: Pfam Description:  START domain
  misc_feature (12)..(436): NCBI GI NO: 18033654 NR Description: putative nodule membrane protein [Medicago sativa]
  misc_feature (34)..(438): NCBI GI NO: 38344869 NR Description: OSJNBa0020P07.12
  misc_feature (116)..(381): NCBI GI NO: 15217736 NR Description: membrane related protein CP5 -related
  misc_feature (23)..(50): NCBI GI NO: 15217736 NR Description: membrane related protein CP5 -related
  misc_feature (116)..(373): NCBI GI NO: 22135902 NR Description: membrane related protein CP5, putative
  misc_feature (23)..(50): NCBI GI NO: 22135902 NR Description: membrane related protein CP5, putative
  misc_feature (130)..(441): NCBI GI NO: 10178166 NR Description: membrane related protein-like
  misc_feature (130)..(441): NCBI GI NO: 18423599 NR Description: membrane related protein-like
  misc_feature (24)..(51): NCBI GI NO: 10178166 NR Description: membrane related protein-like
  misc_feature (24)..(51): NCBI GI NO: 18423599 NR Description: membrane related protein-like
MGYVLSAVGRVLEQPTAWGAAWEMALLAGPLWAAALLGLLLGWAWRPRWASGLVVATADDGGSPAAAAQPPFATLDFWKAQLPARLRAPLGTAVQQREGDTDAVQRNRGTVALGRSSETETATVAVGMADLVNLWRLVEGADGGPAWTKMMEKSLPTMTYRAWRRDAQTGPPQYQSSSIFENASPEEVRDFFGDDEFRMSNRWDDMLIYHKTLEECRTTGTMKVHWVRKFPFFCSDREYIIARRIWKLGGAYYCVTKGIPCSSIPRRSRPRRVDLYYSSWCIRAVESRRGNGGGRGATACEVLLFHHEDMGIPYEIAKLGIRQGMWGCVKRIEPGLRAYQQARAAGAPPSRSALMARINTKVSADGFTRQSSSSSSGGDGPETADDAQETENKKPATRSHAAARLLVLGGAVALACCTLDQGLLTKALIFGVARRFVGQRKDVVASHTPCRSYGRAVC

SEQ ID NO: 39086 - protein, 435 aa, Zea mays subsp. mays
  peptide (1)..(435): Ceres Seq. ID no. 13494504
  misc_feature (151)..(232): Pfam Name: Pfam Description:  START domain
  misc_feature (1)..(413): NCBI GI NO: 18033654 NR Description: putative nodule membrane protein [Medicago sativa]
  misc_feature (11)..(415): NCBI GI NO: 38344869 NR Description: OSJNBa0020P07.12
  misc_feature (93)..(358): NCBI GI NO: 15217736 NR Description: membrane related protein CP5 -related
  misc_feature (1)..(27): NCBI GI NO: 15217736 NR Description: membrane related protein CP5 -related
  misc_feature (93)..(350): NCBI GI NO: 22135902 NR Description: membrane related protein CP5, putative
  misc_feature (1)..(27): NCBI GI NO: 22135902 NR Description: membrane related protein CP5, putative
  misc_feature (107)..(418): NCBI GI NO: 10178166 NR Description: membrane related protein-like
  misc_feature (107)..(418): NCBI GI NO: 18423599 NR Description: membrane related protein-like
  misc_feature (1)..(28): NCBI GI NO: 10178166 NR Description: membrane related protein-like
  misc_feature (1)..(28): NCBI GI NO: 18423599 NR Description: membrane related protein-like
MALLAGPLWAAALLGLLLGWAWRPRWASGLVVATADDGGSPAAAAQPPFATLDFWKAQLPARLRAPLGTAVQQREGDTDAVQRNRGTVALGRSSETETATVAVGMADLVNLWRLVEGADGGPAWTKMMEKSLPTMTYRAWRRDAQTGPPQYQSSSIFENASPEEVRDFFGDDEFRMSNRWDDMLIYHKTLEECRTTGTMKVHWVRKFPFFCSDREYIIARRIWKLGGAYYCVTKGIPCSSIPRRSRPRRVDLYYSSWCIRAVESRRGNGGGRGATACEVLLFHHEDMGIPYEIAKLGIRQGMWGCVKRIEPGLRAYQQARAAGAPPSRSALMARINTKVSADGFTRQSSSSSSGGDGPETADDAQETENKKPATRSHAAARLLVLGGAVALACCTLDQGLLTKALIFGVARRFVGQRKDVVASHTPCRSYGRAVC

SEQ ID NO: 39087 - DNA, 1623 bp, Zea mays subsp. mays
  misc_feature (1)..(1623): Ceres Seq. ID no. 12435326
aacccaaaatccacgagcacctcccccatcgtcctcacggacctcacgcgccctgcccctctcgctctccgcctccccgccccacacccatcgccacccaccagcacctccggcggcccccacccccgcctcctccccgcgtgtccgcggtctgcacccggcgtccctcgcggcgttgacgcgcgaacgtcccgtcgcccggtgagtaacggagagaccgaaccatgagcggaggggtggaaccggagaccccgccgggtagcagcagcaggagcgggggcagcaggagcgtcggtggcaagccgccacgccaccacctcacgtctatccgccactgcgccagcatcgcccgcatcgccgccgcctccgccggattcgggctggattcggggacgctcagcttgatctcacctaccgcagacatccatccgggcttcttgcctgtgttcaggtcggggagtttcgctgatattggacccaaaacgtacatggaggacgaacatgtctgtgtggacaacctggttgagcacctcgggttctatggcccgggcatccctgcaccgggtgctttctatggggtgtttgatggccatggtggcactgatgctgcctgttttgtccggaaaaatatactgaagttcataaccgaagattgccacttccccaacagcatcgagaaggcaatcagaagcgcttttgtaaaggccgacaatgcaattgcggattcccattctcttgaccggaattctgggaccacagcattgacggtccttatatttggcaggacactgcttgttgcgaatgccggtgactgtcgagctgtattaggaaagcgaggccgagctgttgaactctctagagaccacaaacccagctgcatagttgaaaggctcagaatcgaaaacctgggtggtaccgtctttgatggctacctcaacggtcagctggctgtagcaagggcaatcggtgattggcacatgaaaggctccaagggctctgtatgccctcttacaccagaacctgagtttagggaggttaggcttactgaggaagatgagttcttgataataggctgtgatggcctttgggatgtgatgagcagccagtttgctgtttccatggtcaggaaagagctgatggaacacaatgatccacaacggtgctcgcgagagcttgtccacgaagcgcttaggcgcgactgctgtgataacctaaccgtagttgttgtgtgcttctcagcggacccaccccctcaaatcgagatcccaagattccgagtacgaagaagcatctcaatggaagggcttcataggctgaggggtgctcttgacagtaatatctgaagcttaaaagtgtcccttcggctgtaacttctgtcgtcgttggtatgttgaagttgctccacccattggtgttttgagatagtctcagaataagttttgtagaattattttggaagaaattttgttgaggtgtaggctaattaatcttttttttgttgaggcagtgatttatatgtaccggtcaccatttgattgttggatgctcacgatgtaatcgagcaattaaccgacattgttctggtacgaatgagagttataggagttgatcatttttttctct

SEQ ID NO: 39088 - protein, 372 aa, Zea mays subsp. mays
  peptide (1)..(372): Ceres Seq. ID no. 12435327
  misc_feature (75)..(330): Pfam Name: Pfam Description:  Protein phosphatase 2C
  misc_feature (3)..(371): NCBI GI NO: 37536524 NR Description: putative protein phosphatase-2C
  misc_feature (53)..(371): NCBI GI NO: 10140768 NR Description: putative protein phosphatase-2C [Oryza sativa]
  misc_feature (25)..(369): NCBI GI NO: 15226152 NR Description: protein phosphatase 2C
  misc_feature (22)..(369): NCBI GI NO: 15230495 NR Description: protein phosphatase 2C
  misc_feature (19)..(369): NCBI GI NO: 20146108 NR Description: protein phosphatase 2C
  misc_feature (71)..(369): NCBI GI NO: 15224766 NR Description: protein phosphatase 2C
  misc_feature (71)..(371): NCBI GI NO: 25352221 NR Description: phosphoprotein phosphatase (EC 3.1.3.16) 2C
  misc_feature (71)..(371): NCBI GI NO: 34894410 NR Description: putative protein phosphatase
  misc_feature (71)..(369): NCBI GI NO: 21693562 NR Description: DNA-binding protein phosphatase 2C
  misc_feature (71)..(368): NCBI GI NO: 24413992 NR Description: putative DNA-binding protein phosphatase 2C
MSGGVEPETPPGSSSRSGGSRSVGGKPPRHHLTSIRHCASIARIAAASAGFGLDSGTLSLISPTADIHPGFLPVFRSGSFADIGPKTYMEDEHVCVDNLVEHLGFYGPGIPAPGAFYGVFDGHGGTDAACFVRKNILKFITEDCHFPNSIEKAIRSAFVKADNAIADSHSLDRNSGTTALTVLIFGRTLLVANAGDCRAVLGKRGRAVELSRDHKPSCIVERLRIENLGGTVFDGYLNGQLAVARAIGDWHMKGSKGSVCPLTPEPEFREVRLTEEDEFLIIGCDGLWDVMSSQFAVSMVRKELMEHNDPQRCSRELVHEALRRDCCDNLTVVVVCFSADPPPQIEIPRFRVRRSISMEGLHRLRGALDSNI

SEQ ID NO: 39089 - protein, 284 aa, Zea mays subsp. mays
  peptide (1)..(284): Ceres Seq. ID no. 12435328
  misc_feature (1)..(242): Pfam Name: Pfam Description:  Protein phosphatase 2C
  misc_feature (1)..(283): NCBI GI NO: 37536524 NR Description: putative protein phosphatase-2C
  misc_feature (1)..(283): NCBI GI NO: 10140768 NR Description: putative protein phosphatase-2C [Oryza sativa]
  misc_feature (1)..(281): NCBI GI NO: 15226152 NR Description: protein phosphatase 2C
  misc_feature (1)..(281): NCBI GI NO: 15230495 NR Description: protein phosphatase 2C
  misc_feature (1)..(281): NCBI GI NO: 20146108 NR Description: protein phosphatase 2C
  misc_feature (1)..(281): NCBI GI NO: 15224766 NR Description: protein phosphatase 2C
  misc_feature (1)..(283): NCBI GI NO: 25352221 NR Description: phosphoprotein phosphatase (EC 3.1.3.16) 2C
  misc_feature (1)..(283): NCBI GI NO: 34894410 NR Description: putative protein phosphatase
  misc_feature (1)..(281): NCBI GI NO: 21693562 NR Description: DNA-binding protein phosphatase 2C
  misc_feature (1)..(280): NCBI GI NO: 24413992 NR Description: putative DNA-binding protein phosphatase 2C
MEDEHVCVDNLVEHLGFYGPGIPAPGAFYGVFDGHGGTDAACFVRKNILKFITEDCHFPNSIEKAIRSAFVKADNAIADSHSLDRNSGTTALTVLIFGRTLLVANAGDCRAVLGKRGRAVELSRDHKPSCIVERLRIENLGGTVFDGYLNGQLAVARAIGDWHMKGSKGSVCPLTPEPEFREVRLTEEDEFLIIGCDGLWDVMSSQFAVSMVRKELMEHNDPQRCSRELVHEALRRDCCDNLTVVVVCFSADPPPQIEIPRFRVRRSISMEGLHRLRGALDSNI

SEQ ID NO: 39090 - DNA, 2312 bp, Zea mays subsp. mays
  misc_feature (1)..(2312): Ceres Seq. ID no. 12379167
gcacgagaccattacctagaacatcctaatcgaaaagaggagtcacagagaaagtttggtggtgaggcaaaggtttccttccagggttcgtcaggaacgaggcgactcgcaatctgaagcctttcgtcggttccgtctagctgccccccctcggattcggccatggagcggcagtccagcatccggctgggcgcgctggagaagctgaggagcttccgggggatggagaagcagaagagcttccgcgggatcatgtccctcgagcggcggagcagggacagcccggggaaacgcggcgacacgccgctccacctcgcggcgagggccgggagcgtggcccacgcgcagaggatcctcgcggagctcgaccgggcgctggccgccgagatggccgccaggcagaaccaggacggcgagacgccgctgtacgtcgccgccgagaagggccacgcggaggtcgtgcgcgagatcctcaaggtctgtggcgtgcagacggccggcatcaaggccagcaatagtttcgacgcgttccacatcgccgccaagcagggccaccttgaagttctgaaggagatgctgcaggctcttcctgctcttgctatgacaacaaattctgtaaacgctacggccctggacaccgcggcgattcagggccatgttgacatcgtcaatctcctgctggaaaccgatgctagcctcgccaggatcacgaggaacaacgggaaaacggttttacactcagcagcaagaatgggccacgtggaagttgtaagatcgttgctgaataaggatcccaggattggtttgaggacagacaagaaggggcaaactgcgctgcatatggcttcgaaagcgcagaatgctgagatcgtggtcgagttgttgaagccagatgtctcggtcatccatatcgaagacaacaaggggaacaggcccttgcatgttgctactcggaaggggaatatcattatagtgcagactctgttatcagttgaggggatcgatgtcaatgcagttaacaggtctggagagactgcatttgccatcgccgagaaaatggacagtgtagaactcgtgaacatcctgaaagaggctggtggagaagccgcaaagcagcagcaagtacatcctccgaattcggcgaagcagctgaaggaaacagtcagcgatatcagacacgacgtccagtcccagttcaagcaaacacgtcagaccaagatgcaagtcaaccagatcaagaagaggctggagaagctccacatcggcgggctgaacaacgccatcaactccaacaccgtcgtcgcggtgctcatcgccacggtcgccttcgccgccatattcacggtcccgggaaacttcgtggaggagctgagccaggcgcctccgggcatgtccctggggcaggcgtacgtggcgagcaacccggcgttcatcgtcttcctggtcttcgacgcgctggccctcttcatctcgctcgcggtggtcgtggtgcagacctcgctgatcgtggtggagcggagggcgaagaagcggatggtgttcgtgatgaacaagctcatgtggctggcgtgcctcttcatctcggtggccttcatcgcgctgacctacgtggtggtggggcgcgacgactggtggctggcctggtgcaccatgggcatcggcgccgcgatcatgctcaccaccctcggctccatgtgctactgcatcgtcgcgcacaggctggaggagaagaacaccaggaagatcaggagggcctccgcgagccagtcccgcggctcgtggtcccgatcggtcgactcggacgaggagatacttaacagcgagtacaagacgaagatgtacgcgctgtaggatggatagcaagtgtaacatgacggattcttttgtacataccagtgctttgtttcgccagaggctgctccatggcatgcggcaccacatcagtcttcttcaaccaaagggactgaaggcccttcctgcggaaccaagttcaggtcacttgaccggtgtgcctgttcctggggagtgagagtctgctcaactgtgtggttcttagcgcctgaaaccgtcaatggtgatggagataattcagctagaaatttagaatagaataaagtgtccggtacaaaatgcattgtgtcgtgcagtagatatgatgatcttgtacacgaggatctcatctgagagagtgatttgttgaactcttgtgggcagttttttttcccttgggattgggacttgggcctgtggtctgtgacgcagggaatatatgtgttgacaagatgaaaactatcattgatcggccatttccg

SEQ ID NO: 39091 - protein, 562 aa, Zea mays subsp. mays
  peptide (1)..(562): Ceres Seq. ID no. 12379168
  misc_feature (186)..(218): Pfam Name: Pfam Description:  Ankyrin repeat
  misc_feature (1)..(562): NCBI GI NO: 15225141 NR Description: ankyrin-like protein; protein id: At2g31820.1
  misc_feature (1)..(562): NCBI GI NO: 15220595 NR Description: unknown protein; protein id: At1g05640.1
  misc_feature (42)..(562): NCBI GI NO: 15222993 NR Description: hypothetical protein; protein id: At1g07710.1
  misc_feature (20)..(562): NCBI GI NO: 24796797 NR Description: putative ankyrin repeat containing protein
  misc_feature (42)..(539): NCBI GI NO: 15238604 NR Description: ankyrin-like protein; protein id: At5g60070.1
  misc_feature (37)..(562): NCBI GI NO: 11357168 NR Description: ankyrin-like protein - Arabidopsis thaliana
  misc_feature (37)..(562): NCBI GI NO: 30679697 NR Description: ankyrin repeat protein family
  misc_feature (42)..(550): NCBI GI NO: 15230470 NR Description: ankyrin-like protein; protein id: At3g12360.1
  misc_feature (42)..(550): NCBI GI NO: 21553618 NR Description: ankyrin-like protein [Arabidopsis thaliana]
  misc_feature (1)..(562): NCBI GI NO: 34908074 NR Description: P0506B12.26
MERQSSIRLGALEKLRSFRGMEKQKSFRGIMSLERRSRDSPGKRGDTPLHLAARAGSVAHAQRILAELDRALAAEMAARQNQDGETPLYVAAEKGHAEVVREILKVCGVQTAGIKASNSFDAFHIAAKQGHLEVLKEMLQALPALAMTTNSVNATALDTAAIQGHVDIVNLLLETDASLARITRNNGKTVLHSAARMGHVEVVRSLLNKDPRIGLRTDKKGQTALHMASKAQNAEIVVELLKPDVSVIHIEDNKGNRPLHVATRKGNIIIVQTLLSVEGIDVNAVNRSGETAFAIAEKMDSVELVNILKEAGGEAAKQQQVHPPNSAKQLKETVSDIRHDVQSQFKQTRQTKMQVNQIKKRLEKLHIGGLNNAINSNTVVAVLIATVAFAAIFTVPGNFVEELSQAPPGMSLGQAYVASNPAFIVFLVFDALALFISLAVVVVQTSLIVVERRAKKRMVFVMNKLMWLACLFISVAFIALTYVVVGRDDWWLAWCTMGIGAAIMLTTLGSMCYCIVAHRLEEKNTRKIRRASASQSRGSWSRSVDSDEEILNSEYKTKMYAL

SEQ ID NO: 39092 - protein, 542 aa, Zea mays subsp. mays
  peptide (1)..(542): Ceres Seq. ID no. 12379169
  misc_feature (166)..(198): Pfam Name: Pfam Description:  Ankyrin repeat
  misc_feature (1)..(542): NCBI GI NO: 15225141 NR Description: ankyrin-like protein; protein id: At2g31820.1
  misc_feature (1)..(542): NCBI GI NO: 15220595 NR Description: unknown protein; protein id: At1g05640.1
  misc_feature (22)..(542): NCBI GI NO: 15222993 NR Description: hypothetical protein; protein id: At1g07710.1
  misc_feature (1)..(542): NCBI GI NO: 24796797 NR Description: putative ankyrin repeat containing protein
  misc_feature (22)..(519): NCBI GI NO: 15238604 NR Description: ankyrin-like protein; protein id: At5g60070.1
  misc_feature (17)..(542): NCBI GI NO: 11357168 NR Description: ankyrin-like protein - Arabidopsis thaliana
  misc_feature (17)..(542): NCBI GI NO: 30679697 NR Description: ankyrin repeat protein family
  misc_feature (22)..(530): NCBI GI NO: 15230470 NR Description: ankyrin-like protein; protein id: At3g12360.1
  misc_feature (22)..(530): NCBI GI NO: 21553618 NR Description: ankyrin-like protein [Arabidopsis thaliana]
  misc_feature (1)..(542): NCBI GI NO: 34908074 NR Description: P0506B12.26
MEKQKSFRGIMSLERRSRDSPGKRGDTPLHLAARAGSVAHAQRILAELDRALAAEMAARQNQDGETPLYVAAEKGHAEVVREILKVCGVQTAGIKASNSFDAFHIAAKQGHLEVLKEMLQALPALAMTTNSVNATALDTAAIQGHVDIVNLLLETDASLARITRNNGKTVLHSAARMGHVEVVRSLLNKDPRIGLRTDKKGQTALHMASKAQNAEIVVELLKPDVSVIHIEDNKGNRPLHVATRKGNIIIVQTLLSVEGIDVNAVNRSGETAFAIAEKMDSVELVNILKEAGGEAAKQQQVHPPNSAKQLKETVSDIRHDVQSQFKQTRQTKMQVNQIKKRLEKLHIGGLNNAINSNTVVAVLIATVAFAAIFTVPGNFVEELSQAPPGMSLGQAYVASNPAFIVFLVFDALALFISLAVVVVQTSLIVVERRAKKRMVFVMNKLMWLACLFISVAFIALTYVVVGRDDWWLAWCTMGIGAAIMLTTLGSMCYCIVAHRLEEKNTRKIRRASASQSRGSWSRSVDSDEEILNSEYKTKMYAL

SEQ ID NO: 39093 - protein, 532 aa, Zea mays subsp. mays
  peptide (1)..(532): Ceres Seq. ID no. 12379170
  misc_feature (156)..(188): Pfam Name: Pfam Description:  Ankyrin repeat
  misc_feature (1)..(532): NCBI GI NO: 15225141 NR Description: ankyrin-like protein; protein id: At2g31820.1
  misc_feature (1)..(532): NCBI GI NO: 15220595 NR Description: unknown protein; protein id: At1g05640.1
  misc_feature (12)..(532): NCBI GI NO: 15222993 NR Description: hypothetical protein; protein id: At1g07710.1
  misc_feature (1)..(532): NCBI GI NO: 24796797 NR Description: putative ankyrin repeat containing protein
  misc_feature (12)..(509): NCBI GI NO: 15238604 NR Description: ankyrin-like protein; protein id: At5g60070.1
  misc_feature (7)..(532): NCBI GI NO: 11357168 NR Description: ankyrin-like protein - Arabidopsis thaliana
  misc_feature (7)..(532): NCBI GI NO: 30679697 NR Description: ankyrin repeat protein family
  misc_feature (12)..(520): NCBI GI NO: 15230470 NR Description: ankyrin-like protein; protein id: At3g12360.1
  misc_feature (12)..(520): NCBI GI NO: 21553618 NR Description: ankyrin-like protein [Arabidopsis thaliana]
  misc_feature (1)..(532): NCBI GI NO: 34908074 NR Description: P0506B12.26
MSLERRSRDSPGKRGDTPLHLAARAGSVAHAQRILAELDRALAAEMAARQNQDGETPLYVAAEKGHAEVVREILKVCGVQTAGIKASNSFDAFHIAAKQGHLEVLKEMLQALPALAMTTNSVNATALDTAAIQGHVDIVNLLLETDASLARITRNNGKTVLHSAARMGHVEVVRSLLNKDPRIGLRTDKKGQTALHMASKAQNAEIVVELLKPDVSVIHIEDNKGNRPLHVATRKGNIIIVQTLLSVEGIDVNAVNRSGETAFAIAEKMDSVELVNILKEAGGEAAKQQQVHPPNSAKQLKETVSDIRHDVQSQFKQTRQTKMQVNQIKKRLEKLHIGGLNNAINSNTVVAVLIATVAFAAIFTVPGNFVEELSQAPPGMSLGQAYVASNPAFIVFLVFDALALFISLAVVVVQTSLIVVERRAKKRMVFVMNKLMWLACLFISVAFIALTYVVVGRDDWWLAWCTMGIGAAIMLTTLGSMCYCIVAHRLEEKNTRKIRRASASQSRGSWSRSVDSDEEILNSEYKTKMYAL

SEQ ID NO: 39094 - DNA, 2125 bp, Zea mays subsp. mays
  misc_feature (1)..(2125): Ceres Seq. ID no. 12366165
gcacgagaccattacctagaacatcctaatcgaaaagaaagccgaagcgagtgcgagtgcggccctcagctgctgcagttgctcctgcagtcctgctcgtttctgcggcggcggcggcggcctagcacctgagcggggcggcgagaggggacggagatggatatcgcgcgggcggctgctggcgtggcctgctgcaaggagcaccagaggatctacgccgagtggttcgccctcgccgacccagatggcgacggccgcgtcacgggcgccgatgccaccagcttcttcgccatgtccgcgctttcacgcgccgatctcaagcaggtgtgggcgatcgcggattccaggcggcaggggtacctcggattcgccgagttcgtcacagcaatgcagctcgtgtctctggcccaagcagggaacgagatcacacaggacagtctgaaacgtgaagacctgagcaccttggatccgcctgtgatggaaggtgttgatgagctactggctagatccaaggctgttgtaaagagagttcacccagatgacaatggcaccactcaggcccaagcaccttccatatatcactggtttggttcaaaatcagcacagaaggtgcagatgcctctgactgctgttacctctgtaattgatggcttgaaaagactctatgttgaaaaactgaagcctttggaagtcgcctacagatacaatgatttttctcacccattattgacaaacagtgactttgaagcaaagccaatggttatgctcttgggtcagtattcaacaggcaaaacaacattcattaagcatctgctaaagacaagctacccaggagctcacgtcggaccagagccaacaactgatagattcgtagttgtcatgtcaggatctgatggaaggaccattcctggcaatactattgccgttcaagccgacatgccattcactggtcttacaacctttgggggagcgtttctgtcgaagtttgaatgctctcagatgccacatcccctgctagagcatatcacctttgtggacactcctggtgttctctctggggaaaagcaacggacccaacgtagctatgatttcactggtgtgacctcatggtttgctgccaagtgtgaccttatccttcttctgtttgaccctcacaagcttgatataagtgatgagttcaaacgtgtcatttcatctttacgtgggcatgatgacaaaatacgcgtagtgttgaacaaggccgaccaagttgacacacaacagcttatgagagtgtatggtgcattgatgtggtctcttgggaaagtgctaaatactcctgaggttgcgcgtgtgtatatcggatcatttaatgataagccagtgaatgattcagctgttgggccaattggaaaagacttgtttgagagggagcaagatgacctcctctgtgacctgaaggacattcctaagaaggcttgtgatcgacgggtcaatgagtttgttaagcgtgcccgagctgccaagatccatgcttacataattggccatctgaagaaggagatgcctgcagtgatgggaaaagccaaggctcagcagcgactcatagacaacttagaggaggagtttgcaaaggtgcagagggaatatcatctccccgccggagacttccccgacgtcgagcacttcaagcaggtgctgggcgggtacagcatcgacaagttcgagaagctgaagccgaagatggtgcaggcggtggacgacatgctcgctcacgacatcccggagctcctcaagaacttgcggaacccgtacgagtgaaactgacctgacctctcgcgtccgtcggttgtaaaaagattatcttagctgtcacgtccggtgatggcggacggacgaggcagacgttcctgggagagagatgcctagacggttacgggtcactactcactcactagctgtccgcagctgtgccaaaaccgagaggacacatgagggttcagatcggacagccacagcgcatagcctgtgttggtttcggcgtcagtgctctctgcacgcgaaggagctgctgcggcaccgttgccgtgccgtctcgctgtgatacatttcccctcgtgacgagatgaaaagagttgcaggcggc

SEQ ID NO: 39095 - protein, 547 aa, Zea mays subsp. mays
  peptide (1)..(547): Ceres Seq. ID no. 12366166
  misc_feature (53)..(81): Pfam Name: Pfam Description:  EF hand
  misc_feature (1)..(547): NCBI GI NO: 18402561 NR Description: expressed protein; protein id: At3g20290
  misc_feature (123)..(547): NCBI GI NO: 9294546 NR Description: contains similarity to EH domain containingproteins~gene_id:MQC12
  misc_feature (1)..(110): NCBI GI NO: 9294546 NR Description: contains similarity to EH domain containingproteins~gene_id:MQC12
  misc_feature (14)..(547): NCBI GI NO: 38345297 NR Description: OSJNBa0043A12.19
  misc_feature (11)..(493): NCBI GI NO: 18412957 NR Description: score=11.7, E=0.66,N=1; protein id: At4g05520.1
  misc_feature (129)..(542): NCBI GI NO: 39594267 NR Description: Hypothetical protein CBG18887
  misc_feature (126)..(542): NCBI GI NO: 17565130 NR Description: Receptor Mediated Endocytosis 1 isoform 1
  misc_feature (118)..(542): NCBI GI NO: 7206819 NR Description: Receptor mediated endocytosis protein 1, isoform a
  misc_feature (118)..(542): NCBI GI NO: 17565132 NR Description: Receptor Mediated Endocytosis 1 RME-1 isoform 2
  misc_feature (139)..(543): NCBI GI NO: 34861835 NR Description: similar to EH-domain containing 1
MDIARAAAGVACCKEHQRIYAEWFALADPDGDGRVTGADATSFFAMSALSRADLKQVWAIADSRRQGYLGFAEFVTAMQLVSLAQAGNEITQDSLKREDLSTLDPPVMEGVDELLARSKAVVKRVHPDDNGTTQAQAPSIYHWFGSKSAQKVQMPLTAVTSVIDGLKRLYVEKLKPLEVAYRYNDFSHPLLTNSDFEAKPMVMLLGQYSTGKTTFIKHLLKTSYPGAHVGPEPTTDRFVVVMSGSDGRTIPGNTIAVQADMPFTGLTTFGGAFLSKFECSQMPHPLLEHITFVDTPGVLSGEKQRTQRSYDFTGVTSWFAAKCDLILLLFDPHKLDISDEFKRVISSLRGHDDKIRVVLNKADQVDTQQLMRVYGALMWSLGKVLNTPEVARVYIGSFNDKPVNDSAVGPIGKDLFEREQDDLLCDLKDIPKKACDRRVNEFVKRARAAKIHAYIIGHLKKEMPAVMGKAKAQQRLIDNLEEEFAKVQREYHLPAGDFPDVEHFKQVLGGYSIDKFEKLKPKMVQAVDDMLAHDIPELLKNLRNPYE

SEQ ID NO: 39096 - protein, 502 aa, Zea mays subsp. mays
  peptide (1)..(502): Ceres Seq. ID no. 12366167
  misc_feature (8)..(36): Pfam Name: Pfam Description:  EF hand
  misc_feature (1)..(502): NCBI GI NO: 18402561 NR Description: expressed protein; protein id: At3g20290
  misc_feature (78)..(502): NCBI GI NO: 9294546 NR Description: contains similarity to EH domain containingproteins~gene_id:MQC12
  misc_feature (1)..(65): NCBI GI NO: 9294546 NR Description: contains similarity to EH domain containingproteins~gene_id:MQC12
  misc_feature (1)..(502): NCBI GI NO: 38345297 NR Description: OSJNBa0043A12.19
  misc_feature (1)..(448): NCBI GI NO: 18412957 NR Description: score=11.7, E=0.66,N=1; protein id: At4g05520.1
  misc_feature (84)..(497): NCBI GI NO: 39594267 NR Description: Hypothetical protein CBG18887
  misc_feature (81)..(497): NCBI GI NO: 17565130 NR Description: Receptor Mediated Endocytosis 1 isoform 1
  misc_feature (73)..(497): NCBI GI NO: 7206819 NR Description: Receptor mediated endocytosis protein 1, isoform a
  misc_feature (73)..(497): NCBI GI NO: 17565132 NR Description: Receptor Mediated Endocytosis 1 RME-1 isoform 2
  misc_feature (94)..(498): NCBI GI NO: 34861835 NR Description: similar to EH-domain containing 1
MSALSRADLKQVWAIADSRRQGYLGFAEFVTAMQLVSLAQAGNEITQDSLKREDLSTLDPPVMEGVDELLARSKAVVKRVHPDDNGTTQAQAPSIYHWFGSKSAQKVQMPLTAVTSVIDGLKRLYVEKLKPLEVAYRYNDFSHPLLTNSDFEAKPMVMLLGQYSTGKTTFIKHLLKTSYPGAHVGPEPTTDRFVVVMSGSDGRTIPGNTIAVQADMPFTGLTTFGGAFLSKFECSQMPHPLLEHITFVDTPGVLSGEKQRTQRSYDFTGVTSWFAAKCDLILLLFDPHKLDISDEFKRVISSLRGHDDKIRVVLNKADQVDTQQLMRVYGALMWSLGKVLNTPEVARVYIGSFNDKPVNDSAVGPIGKDLFEREQDDLLCDLKDIPKKACDRRVNEFVKRARAAKIHAYIIGHLKKEMPAVMGKAKAQQRLIDNLEEEFAKVQREYHLPAGDFPDVEHFKQVLGGYSIDKFEKLKPKMVQAVDDMLAHDIPELLKNLRNPYE

SEQ ID NO: 39097 - protein, 470 aa, Zea mays subsp. mays
  peptide (1)..(470): Ceres Seq. ID no. 12366168
  misc_feature (1)..(470): NCBI GI NO: 18402561 NR Description: expressed protein; protein id: At3g20290
  misc_feature (46)..(470): NCBI GI NO: 9294546 NR Description: contains similarity to EH domain containingproteins~gene_id:MQC12
  misc_feature (1)..(33): NCBI GI NO: 9294546 NR Description: contains similarity to EH domain containingproteins~gene_id:MQC12
  misc_feature (1)..(470): NCBI GI NO: 38345297 NR Description: OSJNBa0043A12.19
  misc_feature (1)..(416): NCBI GI NO: 18412957 NR Description: score=11.7, E=0.66,N=1; protein id: At4g05520.1
  misc_feature (52)..(465): NCBI GI NO: 39594267 NR Description: Hypothetical protein CBG18887
  misc_feature (49)..(465): NCBI GI NO: 17565130 NR Description: Receptor Mediated Endocytosis 1 isoform 1
  misc_feature (41)..(465): NCBI GI NO: 7206819 NR Description: Receptor mediated endocytosis protein 1, isoform a
  misc_feature (41)..(465): NCBI GI NO: 17565132 NR Description: Receptor Mediated Endocytosis 1 RME-1 isoform 2
  misc_feature (62)..(466): NCBI GI NO: 34861835 NR Description: similar to EH-domain containing 1
MQLVSLAQAGNEITQDSLKREDLSTLDPPVMEGVDELLARSKAVVKRVHPDDNGTTQAQAPSIYHWFGSKSAQKVQMPLTAVTSVIDGLKRLYVEKLKPLEVAYRYNDFSHPLLTNSDFEAKPMVMLLGQYSTGKTTFIKHLLKTSYPGAHVGPEPTTDRFVVVMSGSDGRTIPGNTIAVQADMPFTGLTTFGGAFLSKFECSQMPHPLLEHITFVDTPGVLSGEKQRTQRSYDFTGVTSWFAAKCDLILLLFDPHKLDISDEFKRVISSLRGHDDKIRVVLNKADQVDTQQLMRVYGALMWSLGKVLNTPEVARVYIGSFNDKPVNDSAVGPIGKDLFEREQDDLLCDLKDIPKKACDRRVNEFVKRARAAKIHAYIIGHLKKEMPAVMGKAKAQQRLIDNLEEEFAKVQREYHLPAGDFPDVEHFKQVLGGYSIDKFEKLKPKMVQAVDDMLAHDIPELLKNLRNPYE

SEQ ID NO: 39098 - DNA, 1144 bp, Zea mays subsp. mays
  misc_feature (1)..(1144): Ceres Seq. ID no. 12417524
agcctcagcctcagcctcacacggccgaagcagaacccgtgaacacctcaaacctcacggctcacgccaccgtcctccagccccgttctccggcgatcctgtcattccagacgcgtctccgcccctctcggtccaccaccccgacgccgccacatgtcgacgcagtccatttcgccggcctctgcgtccgcgcagttcacctacccggcggcagcggccccgtcttacttccccgtgcccttccacctccagaacgcgcaatacaccgcatggaccgcagccgcgccggcggtgcctgtgtacaacgccatctatcccatgccccaagtccagcaggcccaacagttgttccaaaaggactcgaagataattactcctgaagctctagctactgttaaggctgctattgcaaatagtgagaaagacaagaaggttgatgcaacaaaaaaggcagtgcctcgaaaggcagctgggcaaagttgggaggaccctaccttggctgattggcctgaaaatgatttccgtttgttctgcggtgatcttggaaatgaagtgaatgatgatgttcttgcaaaggcattctcaaaatatccatccttcaatatggccagggtttatacgggacaagtggactggtaaaactaaaggatatggttttgttagttttgctgatgcgtctgatcttacttctgccttgaaagatatgaatggtaaatatgtaggaaatcggccaatcaaattacggaagagcacatggaagaacaggatagacttagaagctttggagaagggaaagacccaaccacagaagaaaatcaaactgcagaaaagaagtgttcttcacaaatgaatctgaaaaattctgctcgttcatcgtctgtcagtatcgtttgggaaagctgtctgaagcattaacagttttacttaacgtcagatgtgtaggactgatggtcaccaagttcccggtgacactgtatacaatcgcagacgcgatgctatgttggtgattgaacaggtgtagccgaatagttggatccaataacttcacctgtagtgtaatggtccaattttatcatgggaactgtagttctaaatactccagtgaccagtgctattgtggtgaattattctgtgatctttattc

SEQ ID NO: 39099 - protein, 161 aa, Zea mays subsp. mays
  peptide (1)..(161): Ceres Seq. ID no. 12417525
  misc_feature (7)..(154): NCBI GI NO: 15229308 NR Description: RRM-containing protein; protein id: At3g04500.1
  misc_feature (1)..(154): NCBI GI NO: 21357051 NR Description: CG2931-PA [Drosophila melanogaster]
  misc_feature (1)..(154): NCBI GI NO: 39582665 NR Description: Hypothetical protein CBG21313
  misc_feature (1)..(154): NCBI GI NO: 17556216 NR Description: RNA recognition motif containing protein
  misc_feature (81)..(154): NCBI GI NO: 2098575 NR Description: F25451_2 [Homo sapiens]
  misc_feature (88)..(154): NCBI GI NO: 23619522 NR Description: hypothetical protein, conserved
  misc_feature (81)..(154): NCBI GI NO: 12804031 NR Description: Unknown (protein for MGC:10433) [Homo sapiens]
  misc_feature (81)..(154): NCBI GI NO: 21594922 NR Description: hypothetical protein MGC10433 [Homo sapiens]
  misc_feature (81)..(154): NCBI GI NO: 19526864 NR Description: RIKEN cDNA 3100004P22 [Mus musculus]
  misc_feature (81)..(154): NCBI GI NO: 21359951 NR Description: hypothetical protein MGC10433 [Homo sapiens]
MSTQSISPASASAQFTYPAAAAPSYFPVPFHLQNAQYTAWTAAAPAVPVYNAIYPMPQVQQAQQLFQKDSKIITPEALATVKAAIANSEKDKKVDATKKAVPRKAAGQSWEDPTLADWPENDFRLFCGDLGNEVNDDVLAKAFSKYPSFNMARVYTGQVDW

SEQ ID NO: 39100 - protein, 125 aa, Zea mays subsp. mays
  peptide (1)..(125): Ceres Seq. ID no. 12417526
PQPQPHTAEAEPVNTSNLTAHATVLQPRSPAILSFQTRLRPSRSTTPTPPHVDAVHFAGLCVRAVHLPGGSGPVLLPRALPPPERAIHRMDRSRAGGACVQRHLSHAPSPAGPTVVPKGLEDNYS

SEQ ID NO: 39101 - protein, 122 aa, Zea mays subsp. mays
  peptide (1)..(122): Ceres Seq. ID no. 12417527
ASASASHGRSRTREHLKPHGSRHRPPAPFSGDPVIPDASPPLSVHHPDAATCRRSPFRRPLRPRSSPTRRQRPRLTSPCPSTSRTRNTPHGPQPRRRCLCTTPSIPCPKSSRPNSCSKRTRR

SEQ ID NO: 39102 - DNA, 950 bp, Zea mays subsp. mays
  misc_feature (1)..(950): Ceres Seq. ID no. 14312576
aaggcccagatcaaaagaaaagagcagcggagcggagcatgctcttcctccggtgccagcctcgcgtctcgtccccgtccgcatccgcgtccgcgccgccttttcgtccccgcgtcggcgtcgcggctccactgggcgtacgcgtcaccggcggaaggcgagggcaggcggtggtcgcgatggcgtccgccgacgcgcgcttggcggggattgcctcctccatccgcgtcatccccgacttccccaagccagggatcatgttccaggacatcacgacactgctgctcgaccccaaggcgttccgtgacaccatcgacgtcttcgttgagcggtacaaggaccaagggatcaccgtagttgctggtgtggaagctagagggttcatttttggtcctcctatcgctctagccatcagtgcgaaatttgtacctttgaggaagcctaagaagttgccaggcgaggtgatctccgaagaatattctctggaatacggaactgacaagatagagatgcatgttggagctgtacaggccaacgatcgggctcttgtagtcgatgatcttattgccaccggtggaacactctgtgcagctgtcaaacttattgaacgtgttggagcaaaggttgttgagtgtgcttgcgtcattgaattggcagaactgaagggccgagacaaacttggggacaggccagtttttgttcttgtcgaagcagatgcttgagcggaacttgggacttctcttctcagtgagttagagttggtgctgttgatgctacctctctgtcaacaacaaagtttcccatgttggctatattcttgctgacacgtaataaagtttcattccaaattgtgatcccctgaatgatttgtcaatgtagacatgattgctggtccttgtatactgtggcttattattcacatcaattaaggataatcctgattggagctc

SEQ ID NO: 39103 - protein, 239 aa, Zea mays subsp. mays
  peptide (1)..(239): Ceres Seq. ID no. 14312577
  misc_feature (60)..(238): NCBI GI NO: 2499932 NR Description: Adenine phosphoribosyltransferase 1 (APRT)
  misc_feature (60)..(238): NCBI GI NO: 9711921 NR Description: Adenine phosphoribosyltransferase
  misc_feature (64)..(239): NCBI GI NO: 32492063 NR Description: adenine phosphoribosyltransferase [Brassica napus]
  misc_feature (64)..(239): NCBI GI NO: 18396344 NR Description: adenine phosphoribosyltransferase 1, APRT
  misc_feature (64)..(239): NCBI GI NO: 30689934 NR Description: adenine phosphoribosyltransferase 1, APRT
  misc_feature (64)..(236): NCBI GI NO: 15235709 NR Description: adenine phosphoribosyltransferase (EC 2
  misc_feature (150)..(239): NCBI GI NO: 25286872 NR Description: protein F17L21.24
  misc_feature (64)..(151): NCBI GI NO: 25286872 NR Description: protein F17L21.24
  misc_feature (64)..(236): NCBI GI NO: 21536749 NR Description: adenine phosphoribosyltransferase (EC 2
  misc_feature (64)..(236): NCBI GI NO: 15234553 NR Description: adenine phosphoribosyltransferase -related
GPDQKKRAAERSMLFLRCQPRVSSPSASASAPPFRPRVGVAAPLGVRVTGGRRGQAVVAMASADARLAGIASSIRVIPDFPKPGIMFQDITTLLLDPKAFRDTIDVFVERYKDQGITVVAGVEARGFIFGPPIALAISAKFVPLRKPKKLPGEVISEEYSLEYGTDKIEMHVGAVQANDRALVVDDLIATGGTLCAAVKLIERVGAKVVECACVIELAELKGRDKLGDRPVFVLVEADA

SEQ ID NO: 39104 - protein, 227 aa, Zea mays subsp. mays
  peptide (1)..(227): Ceres Seq. ID no. 14312578
  misc_feature (48)..(226): NCBI GI NO: 2499932 NR Description: Adenine phosphoribosyltransferase 1 (APRT)
  misc_feature (48)..(226): NCBI GI NO: 9711921 NR Description: Adenine phosphoribosyltransferase
  misc_feature (52)..(227): NCBI GI NO: 32492063 NR Description: adenine phosphoribosyltransferase [Brassica napus]
  misc_feature (52)..(227): NCBI GI NO: 18396344 NR Description: adenine phosphoribosyltransferase 1, APRT
  misc_feature (52)..(227): NCBI GI NO: 30689934 NR Description: adenine phosphoribosyltransferase 1, APRT
  misc_feature (52)..(224): NCBI GI NO: 15235709 NR Description: adenine phosphoribosyltransferase (EC 2
  misc_feature (138)..(227): NCBI GI NO: 25286872 NR Description: protein F17L21.24
  misc_feature (52)..(139): NCBI GI NO: 25286872 NR Description: protein F17L21.24
  misc_feature (52)..(224): NCBI GI NO: 21536749 NR Description: adenine phosphoribosyltransferase (EC 2
  misc_feature (52)..(224): NCBI GI NO: 15234553 NR Description: adenine phosphoribosyltransferase -related
MLFLRCQPRVSSPSASASAPPFRPRVGVAAPLGVRVTGGRRGQAVVAMASADARLAGIASSIRVIPDFPKPGIMFQDITTLLLDPKAFRDTIDVFVERYKDQGITVVAGVEARGFIFGPPIALAISAKFVPLRKPKKLPGEVISEEYSLEYGTDKIEMHVGAVQANDRALVVDDLIATGGTLCAAVKLIERVGAKVVECACVIELAELKGRDKLGDRPVFVLVEADA

SEQ ID NO: 39105 - protein, 180 aa, Zea mays subsp. mays
  peptide (1)..(180): Ceres Seq. ID no. 14312579
  misc_feature (1)..(179): NCBI GI NO: 2499932 NR Description: Adenine phosphoribosyltransferase 1 (APRT)
  misc_feature (1)..(179): NCBI GI NO: 9711921 NR Description: Adenine phosphoribosyltransferase
  misc_feature (5)..(180): NCBI GI NO: 32492063 NR Description: adenine phosphoribosyltransferase [Brassica napus]
  misc_feature (5)..(180): NCBI GI NO: 18396344 NR Description: adenine phosphoribosyltransferase 1, APRT
  misc_feature (5)..(180): NCBI GI NO: 30689934 NR Description: adenine phosphoribosyltransferase 1, APRT
  misc_feature (5)..(177): NCBI GI NO: 15235709 NR Description: adenine phosphoribosyltransferase (EC 2
  misc_feature (91)..(180): NCBI GI NO: 25286872 NR Description: protein F17L21.24
  misc_feature (5)..(92): NCBI GI NO: 25286872 NR Description: protein F17L21.24
  misc_feature (5)..(177): NCBI GI NO: 21536749 NR Description: adenine phosphoribosyltransferase (EC 2
  misc_feature (5)..(177): NCBI GI NO: 15234553 NR Description: adenine phosphoribosyltransferase -related
MASADARLAGIASSIRVIPDFPKPGIMFQDITTLLLDPKAFRDTIDVFVERYKDQGITVVAGVEARGFIFGPPIALAISAKFVPLRKPKKLPGEVISEEYSLEYGTDKIEMHVGAVQANDRALVVDDLIATGGTLCAAVKLIERVGAKVVECACVIELAELKGRDKLGDRPVFVLVEADA

SEQ ID NO: 39106 - DNA, 1903 bp, Zea mays subsp. mays
  misc_feature (1)..(1903): Ceres Seq. ID no. 12375174
aattattaaacaaaagcagttgtctcgataccaaaaccgcgtatctcaccccgcctccttttcttcgcgtcccccgcctcgatccgatcggggacgggtcgaggggcaggggaatgtcgtcgtcgtctgcgtcatcttcggcggcggcgcaccaccagcagcattaccggcggcagacaggagggagcggtctcgtgccgctcgccgcgctcatcaaggaggaggcccgcacggagcgccaatccatagccggcggcgaaagcaggatctccgcgcgcgacgatgacgcggcaggagtaggaagctccggcgtaggaggggaggcggcggaggcggcggtggagtcgcggctggagcgcccgctgctgcgctatgggtgcgccgctcagtgcaaaaagggcgaggacttctttttgctcagaacggactgtcttcgtcccgccatctccgtctcctcctcggcctccccgcaccccatcttcgccgtattcgctatacttgatggccataatggtaacgcagccgcaatatacacaagggacaatttgctcaaccatgtccttagtgctatgccacgggggctgtccagggaggagtggttgcacatgttgccccgagcactggttgcagggtttgttaagacggacaaggagttccagagcaaagggcaaacttctggcaccaccgctacatttgtgataattgatgggtggactatcactgttgcctctgttggtgattctcgctgtattttagatgctcagggtggggctgtttctttgcttactgtggatcacagactagaagaaaatgttgaggagagggagcgcgttacagcaagtggaggtgaagttggaagactcagtgttgttggtggagcagagattggtccgctacgatgctggcctggaggtctatgcttatcaagatccattggagatatcgatgttggcgaatttattgtccctgttccatatgtgaagcaagtgaagttgtcaaatgctggaggaagacttattattgcttcagatggcatttgggatgcattatcctcagaagccgctgctaagtcttgcagaggtttgcctgctgagcttgccgcaaagcaagttgttaaggaggcactcaggacaagagggctaaaggatgatacaacttgcattgttgttgacataatcccacctggtcaaacaatacggcctctgtctcctcctaaaaagacgagcaagctgaagtcttttatttttagaaagaaagcgaaggacccttctcagaagttgactaaacagcattcagctgttggtatcgttgaagagatatttgaagaaggttcagcgatgctatcagaaaggttaggtcctgatttggatggcaggagaacctcaagcctgtttacatgtgccatctgccagttagacctggagccaagtgaaggcatttcggtgcatgctggatcgatcttctcttcgacctccaggccatgggaaggcccattcctctgctcggactgccgtgagaagaaggatgccatggaaggcaaacggcccagtggcgtcaaggttctgtagtatacagcaaccgatccttgtagctgcccgaaaaatcccacccttcttatttccttttctcgtgaggaccctttcaaagttttacaatttgtttcctttaaattcggatgattttaggatgcgtcttattttgcgaggaaatagccaactatgtaagtagctgttggcaaaaggaaatgtgaagcgagcgaatagggcatcccttcatttttctttctctcttccattcggaatggatgaatagggttgccttcaatttttgttctcttccattcggaatggacagacagtaactcagctcacgagtaatgacagctaacatattctttatttgt

SEQ ID NO: 39107 - protein, 521 aa, Zea mays subsp. mays
  peptide (1)..(521): Ceres Seq. ID no. 12375175
  misc_feature (138)..(384): Pfam Name: Pfam Description:  Protein phosphatase 2C
  misc_feature (38)..(521): NCBI GI NO: 34914644 NR Description: OSJNBa0054L14.21
  misc_feature (115)..(521): NCBI GI NO: 15221404 NR Description: putative protein phosphatase; protein id:At1g68410
  misc_feature (116)..(516): NCBI GI NO: 15217454 NR Description: putative protein phosphatase 2C
  misc_feature (118)..(516): NCBI GI NO: 34394411 NR Description: protein phosphatase 2C-like
  misc_feature (110)..(517): NCBI GI NO: 18401703 NR Description: expressed protein; protein id: At1g47380.1
  misc_feature (110)..(517): NCBI GI NO: 15292869 NR Description: unknown protein [Arabidopsis thaliana]
  misc_feature (116)..(448): NCBI GI NO: 16930415 NR Description: At1g09160/T12M4_13 [Arabidopsis thaliana]
  misc_feature (116)..(514): NCBI GI NO: 14029015 NR Description: Unknown protein [Oryza sativa]
  misc_feature (118)..(450): NCBI GI NO: 34898168 NR Description: protein phosphatase 2C-like
  misc_feature (75)..(516): NCBI GI NO: 38344839 NR Description: OSJNBa0064H22.20
LLNKSSCLDTKTAYLTPPPFLRVPRLDPIGDGSRGRGMSSSSASSSAAAHHQQHYRRQTGGSGLVPLAALIKEEARTERQSIAGGESRISARDDDAAGVGSSGVGGEAAEAAVESRLERPLLRYGCAAQCKKGEDFFLLRTDCLRPAISVSSSASPHPIFAVFAILDGHNGNAAAIYTRDNLLNHVLSAMPRGLSREEWLHMLPRALVAGFVKTDKEFQSKGQTSGTTATFVIIDGWTITVASVGDSRCILDAQGGAVSLLTVDHRLEENVEERERVTASGGEVGRLSVVGGAEIGPLRCWPGGLCLSRSIGDIDVGEFIVPVPYVKQVKLSNAGGRLIIASDGIWDALSSEAAAKSCRGLPAELAAKQVVKEALRTRGLKDDTTCIVVDIIPPGQTIRPLSPPKKTSKLKSFIFRKKAKDPSQKLTKQHSAVGIVEEIFEEGSAMLSERLGPDLDGRRTSSLFTCAICQLDLEPSEGISVHAGSIFSSTSRPWEGPFLCSDCREKKDAMEGKRPSGVKVL

SEQ ID NO: 39108 - protein, 484 aa, Zea mays subsp. mays
  peptide (1)..(484): Ceres Seq. ID no. 12375176
  misc_feature (101)..(347): Pfam Name: Pfam Description:  Protein phosphatase 2C
  misc_feature (1)..(484): NCBI GI NO: 34914644 NR Description: OSJNBa0054L14.21
  misc_feature (78)..(484): NCBI GI NO: 15221404 NR Description: putative protein phosphatase; protein id:At1g68410
  misc_feature (79)..(479): NCBI GI NO: 15217454 NR Description: putative protein phosphatase 2C
  misc_feature (81)..(479): NCBI GI NO: 34394411 NR Description: protein phosphatase 2C-like
  misc_feature (73)..(480): NCBI GI NO: 18401703 NR Description: expressed protein; protein id: At1g47380.1
  misc_feature (73)..(480): NCBI GI NO: 15292869 NR Description: unknown protein [Arabidopsis thaliana]
  misc_feature (79)..(411): NCBI GI NO: 16930415 NR Description: At1g09160/T12M4_13 [Arabidopsis thaliana]
  misc_feature (79)..(477): NCBI GI NO: 14029015 NR Description: Unknown protein [Oryza sativa]
  misc_feature (81)..(413): NCBI GI NO: 34898168 NR Description: protein phosphatase 2C-like
  misc_feature (38)..(479): NCBI GI NO: 38344839 NR Description: OSJNBa0064H22.20
MSSSSASSSAAAHHQQHYRRQTGGSGLVPLAALIKEEARTERQSIAGGESRISARDDDAAGVGSSGVGGEAAEAAVESRLERPLLRYGCAAQCKKGEDFFLLRTDCLRPAISVSSSASPHPIFAVFAILDGHNGNAAAIYTRDNLLNHVLSAMPRGLSREEWLHMLPRALVAGFVKTDKEFQSKGQTSGTTATFVIIDGWTITVASVGDSRCILDAQGGAVSLLTVDHRLEENVEERERVTASGGEVGRLSVVGGAEIGPLRCWPGGLCLSRSIGDIDVGEFIVPVPYVKQVKLSNAGGRLIIASDGIWDALSSEAAAKSCRGLPAELAAKQVVKEALRTRGLKDDTTCIVVDIIPPGQTIRPLSPPKKTSKLKSFIFRKKAKDPSQKLTKQHSAVGIVEEIFEEGSAMLSERLGPDLDGRRTSSLFTCAICQLDLEPSEGISVHAGSIFSSTSRPWEGPFLCSDCREKKDAMEGKRPSGVKVL

SEQ ID NO: 39109 - protein, 332 aa, Zea mays subsp. mays
  peptide (1)..(332): Ceres Seq. ID no. 12375177
  misc_feature (1)..(195): Pfam Name: Pfam Description:  Protein phosphatase 2C
  misc_feature (1)..(332): NCBI GI NO: 34914644 NR Description: OSJNBa0054L14.21
  misc_feature (1)..(332): NCBI GI NO: 15221404 NR Description: putative protein phosphatase; protein id:At1g68410
  misc_feature (1)..(327): NCBI GI NO: 15217454 NR Description: putative protein phosphatase 2C
  misc_feature (1)..(327): NCBI GI NO: 34394411 NR Description: protein phosphatase 2C-like
  misc_feature (1)..(328): NCBI GI NO: 18401703 NR Description: expressed protein; protein id: At1g47380.1
  misc_feature (1)..(328): NCBI GI NO: 15292869 NR Description: unknown protein [Arabidopsis thaliana]
  misc_feature (1)..(259): NCBI GI NO: 16930415 NR Description: At1g09160/T12M4_13 [Arabidopsis thaliana]
  misc_feature (1)..(325): NCBI GI NO: 14029015 NR Description: Unknown protein [Oryza sativa]
  misc_feature (1)..(261): NCBI GI NO: 34898168 NR Description: protein phosphatase 2C-like
  misc_feature (1)..(327): NCBI GI NO: 38344839 NR Description: OSJNBa0064H22.20
MPRGLSREEWLHMLPRALVAGFVKTDKEFQSKGQTSGTTATFVIIDGWTITVASVGDSRCILDAQGGAVSLLTVDHRLEENVEERERVTASGGEVGRLSVVGGAEIGPLRCWPGGLCLSRSIGDIDVGEFIVPVPYVKQVKLSNAGGRLIIASDGIWDALSSEAAAKSCRGLPAELAAKQVVKEALRTRGLKDDTTCIVVDIIPPGQTIRPLSPPKKTSKLKSFIFRKKAKDPSQKLTKQHSAVGIVEEIFEEGSAMLSERLGPDLDGRRTSSLFTCAICQLDLEPSEGISVHAGSIFSSTSRPWEGPFLCSDCREKKDAMEGKRPSGVKVL

SEQ ID NO: 39110 - DNA, 1286 bp, Zea mays subsp. mays; identical to SEQ ID NO: 38581
  misc_feature (1)..(1286): Ceres Seq. ID no. 13494497

SEQ ID NO: 39111 - protein, 265 aa, Zea mays subsp. mays; identical to SEQ ID NO: 38582
  peptide (1)..(265): Ceres Seq. ID no. 13494498
  misc_feature (77)..(212): Pfam Name: Pfam Description:  Vesicle transport v-SNARE protein
  misc_feature (1)..(264): NCBI GI NO: 23237830 NR Description: contains ESTs C19491
  misc_feature (1)..(261): NCBI GI NO: 34896946 NR Description: putative vesicle soluble NSF attachment proteinreceptor
  misc_feature (1)..(258): NCBI GI NO: 18401508 NR Description: expressed protein [Arabidopsis thaliana]
  misc_feature (1)..(258): NCBI GI NO: 22330102 NR Description: expressed protein [Arabidopsis thaliana]
  misc_feature (1)..(258): NCBI GI NO: 21536876 NR Description: unknown [Arabidopsis thaliana]
  misc_feature (7)..(258): NCBI GI NO: 18403771 NR Description: expressed protein [Arabidopsis thaliana]
  misc_feature (7)..(258): NCBI GI NO: 27805643 NR Description: Novel plant SNARE 11 (AtNPSN11)
  misc_feature (7)..(248): NCBI GI NO: 25370780 NR Description: hypothetical protein At2g35190
  misc_feature (12)..(258): NCBI GI NO: 25370781 NR Description: F11A17.20 [imported] - Arabidopsis thaliana
  misc_feature (1)..(182): NCBI GI NO: 25370781 NR Description: F11A17.20 [imported] - Arabidopsis thaliana

SEQ ID NO: 39112 - protein, 259 aa, Zea mays subsp. mays; identical to SEQ ID NO: 38583
  peptide (1)..(259): Ceres Seq. ID no. 13494499
  misc_feature (71)..(206): Pfam Name: Pfam Description:  Vesicle transport v-SNARE protein
  misc_feature (1)..(258): NCBI GI NO: 23237830 NR Description: contains ESTs C19491
  misc_feature (1)..(255): NCBI GI NO: 34896946 NR Description: putative vesicle soluble NSF attachment proteinreceptor
  misc_feature (1)..(252): NCBI GI NO: 18401508 NR Description: expressed protein [Arabidopsis thaliana]
  misc_feature (1)..(252): NCBI GI NO: 22330102 NR Description: expressed protein [Arabidopsis thaliana]
  misc_feature (1)..(252): NCBI GI NO: 21536876 NR Description: unknown [Arabidopsis thaliana]
  misc_feature (1)..(252): NCBI GI NO: 18403771 NR Description: expressed protein [Arabidopsis thaliana]
  misc_feature (1)..(252): NCBI GI NO: 27805643 NR Description: Novel plant SNARE 11 (AtNPSN11)
  misc_feature (1)..(242): NCBI GI NO: 25370780 NR Description: hypothetical protein At2g35190
  misc_feature (6)..(252): NCBI GI NO: 25370781 NR Description: F11A17.20 [imported] - Arabidopsis thaliana
  misc_feature (1)..(176): NCBI GI NO: 25370781 NR Description: F11A17.20 [imported] - Arabidopsis thaliana

SEQ ID NO: 39113 - protein, 234 aa, Zea mays subsp. mays; identical to SEQ ID NO: 38584
  peptide (1)..(234): Ceres Seq. ID no. 13494500
  misc_feature (46)..(181): Pfam Name: Pfam Description:  Vesicle transport v-SNARE protein
  misc_feature (1)..(233): NCBI GI NO: 23237830 NR Description: contains ESTs C19491
  misc_feature (1)..(230): NCBI GI NO: 34896946 NR Description: putative vesicle soluble NSF attachment proteinreceptor
  misc_feature (1)..(227): NCBI GI NO: 18401508 NR Description: expressed protein [Arabidopsis thaliana]
  misc_feature (1)..(227): NCBI GI NO: 22330102 NR Description: expressed protein [Arabidopsis thaliana]
  misc_feature (1)..(227): NCBI GI NO: 21536876 NR Description: unknown [Arabidopsis thaliana]
  misc_feature (1)..(227): NCBI GI NO: 18403771 NR Description: expressed protein [Arabidopsis thaliana]
  misc_feature (1)..(227): NCBI GI NO: 27805643 NR Description: Novel plant SNARE 11 (AtNPSN11)
  misc_feature (1)..(217): NCBI GI NO: 25370780 NR Description: hypothetical protein At2g35190
  misc_feature (1)..(227): NCBI GI NO: 25370781 NR Description: F11A17.20 [imported] - Arabidopsis thaliana
  misc_feature (1)..(151): NCBI GI NO: 25370781 NR Description: F11A17.20 [imported] - Arabidopsis thaliana

SEQ ID NO: 39114 - DNA, 2187 bp, Zea mays subsp. mays; identical to SEQ ID NO: 25652
  misc_feature (1)..(2187): Ceres Seq. ID no. 12362634

SEQ ID NO: 39115 - protein, 533 aa, Zea mays subsp. mays; identical to SEQ ID NO: 25653
  peptide (1)..(533): Ceres Seq. ID no. 12362635
  misc_feature (13)..(531): Pfam Name: MAP65/ASE1 family Pfam Description: Microtubule associated protein
  misc_feature (13)..(533): NCBI GI NO: 11558252 NR Description: microtubule-associated protein MAP65-1a
  misc_feature (13)..(533): NCBI GI NO: 11558256 NR Description: microtubule-associated protein MAP65-1c
  misc_feature (13)..(533): NCBI GI NO: 15240485 NR Description: putative protein; protein id: At5g55230.1
  misc_feature (13)..(533): NCBI GI NO: 11558254 NR Description: microtubule-associated protein MAP65-1b
  misc_feature (13)..(533): NCBI GI NO: 28200790 NR Description: 65kD microtubule associated protein
  misc_feature (5)..(524): NCBI GI NO: 18416818 NR Description: putative protein; protein id: At4g26760
  misc_feature (5)..(385): NCBI GI NO: 7485328 NR Description: hypothetical protein F10M23
  misc_feature (12)..(533): NCBI GI NO: 27357984 NR Description: Unknown protein
  misc_feature (14)..(485): NCBI GI NO: 15242132 NR Description: putative protein; protein id: At5g51600.1
  misc_feature (13)..(491): NCBI GI NO: 15217774 NR Description: hypothetical protein; protein id: At1g27920.1

SEQ ID NO: 39116 - protein, 382 aa, Zea mays subsp. mays; identical to SEQ ID NO: 25654
  peptide (1)..(382): Ceres Seq. ID no. 12362636
  misc_feature (1)..(380): Pfam Name: MAP65/ASE1 family Pfam Description: Microtubule associated protein
  misc_feature (1)..(382): NCBI GI NO: 11558252 NR Description: microtubule-associated protein MAP65-1a
  misc_feature (1)..(382): NCBI GI NO: 11558256 NR Description: microtubule-associated protein MAP65-1c
  misc_feature (1)..(382): NCBI GI NO: 15240485 NR Description: putative protein; protein id: At5g55230.1
  misc_feature (1)..(382): NCBI GI NO: 11558254 NR Description: microtubule-associated protein MAP65-1b
  misc_feature (1)..(382): NCBI GI NO: 28200790 NR Description: 65kD microtubule associated protein
  misc_feature (1)..(373): NCBI GI NO: 18416818 NR Description: putative protein; protein id: At4g26760
  misc_feature (1)..(234): NCBI GI NO: 7485328 NR Description: hypothetical protein F10M23
  misc_feature (1)..(382): NCBI GI NO: 27357984 NR Description: Unknown protein
  misc_feature (1)..(334): NCBI GI NO: 15242132 NR Description: putative protein; protein id: At5g51600.1
  misc_feature (1)..(340): NCBI GI NO: 15217774 NR Description: hypothetical protein; protein id: At1g27920.1

SEQ ID NO: 39117 - protein, 347 aa, Zea mays subsp. mays; identical to SEQ ID NO: 25655
  peptide (1)..(347): Ceres Seq. ID no. 12362637
  misc_feature (1)..(345): Pfam Name: MAP65/ASE1 family Pfam Description: Microtubule associated protein
  misc_feature (1)..(347): NCBI GI NO: 11558252 NR Description: microtubule-associated protein MAP65-1a
  misc_feature (1)..(347): NCBI GI NO: 11558256 NR Description: microtubule-associated protein MAP65-1c
  misc_feature (1)..(347): NCBI GI NO: 15240485 NR Description: putative protein; protein id: At5g55230.1
  misc_feature (1)..(347): NCBI GI NO: 11558254 NR Description: microtubule-associated protein MAP65-1b
  misc_feature (1)..(347): NCBI GI NO: 28200790 NR Description: 65kD microtubule associated protein
  misc_feature (1)..(338): NCBI GI NO: 18416818 NR Description: putative protein; protein id: At4g26760
  misc_feature (1)..(199): NCBI GI NO: 7485328 NR Description: hypothetical protein F10M23
  misc_feature (1)..(347): NCBI GI NO: 27357984 NR Description: Unknown protein
  misc_feature (1)..(299): NCBI GI NO: 15242132 NR Description: putative protein; protein id: At5g51600.1
  misc_feature (1)..(305): NCBI GI NO: 15217774 NR Description: hypothetical protein; protein id: At1g27920.1

SEQ ID NO: 39118 - DNA, 442 bp, Zea mays subsp. mays
  misc_feature (1)..(442): Ceres Seq. ID no. 13586300
  misc_feature (437)..(437): n is a, c, t, g, unknown, or other
cataacaagagctctatctatgaagttaatgggagtcccatcacaaagcacatgggtttcttgattttcaactttagtgactacaattgcacggtggaatactacagatccccttttatagtccttcaaggccgtgcgccagcaggagcccctgagattgttaggtacagtattcgagtggattcaatggattggatgtctgaccgcggcaagtggaaggatgctgatgtattgatcttcaacactgggcattggtggaacaatgagaaaacaatcagagggggtgcctactttcaagtaggagatgaggtcaaaatgggcatgaatgttgcagatgcttacagaagatcgatacagacattgtccgattggcttcgcaaagaagttaacacgagcaagactcatgtcatctaccgcacatatgcccctgtgcattncagag

SEQ ID NO: 39119 - protein, 147 aa, Zea mays subsp. mays
  peptide (1)..(147): Ceres Seq. ID no. 13586301
  misc_feature (85)..(146): Pfam Name: Pfam Description:  Arabidopsis proteins of unknown function
  misc_feature (2)..(146): NCBI GI NO: 15239660 NR Description: hypothetical protein [Arabidopsis thaliana]
  misc_feature (2)..(146): NCBI GI NO: 6862912 NR Description: unknown protein [Arabidopsis thaliana]
  misc_feature (2)..(146): NCBI GI NO: 18397465 NR Description: expressed protein [Arabidopsis thaliana]
  misc_feature (2)..(146): NCBI GI NO: 15229797 NR Description: expressed protein [Arabidopsis thaliana]
  misc_feature (2)..(146): NCBI GI NO: 9759321 NR Description: gb|AAF00670
  misc_feature (2)..(146): NCBI GI NO: 18415139 NR Description: expressed protein [Arabidopsis thaliana]
  misc_feature (4)..(146): NCBI GI NO: 23617116 NR Description: leaf senescence related protein-like
  misc_feature (2)..(145): NCBI GI NO: 15221991 NR Description: hypothetical protein [Arabidopsis thaliana]
  misc_feature (2)..(145): NCBI GI NO: 34907406 NR Description: P0018C10.29
  misc_feature (2)..(146): NCBI GI NO: 15242021 NR Description: expressed protein [Arabidopsis thaliana]
  misc_feature (146)..(146): Xaa is any aa, unknown or other
HNKSSIYEVNGSPITKHMGFLIFNFSDYNCTVEYYRSPFIVLQGRAPAGAPEIVRYSIRVDSMDWMSDRGKWKDADVLIFNTGHWWNNEKTIRGGAYFQVGDEVKMGMNVADAYRRSIQTLSDWLRKEVNTSKTHVIYRTYAPVHXR

SEQ ID NO: 39120 - protein, 130 aa, Zea mays subsp. mays
  peptide (1)..(130): Ceres Seq. ID no. 13586302
  misc_feature (68)..(129): Pfam Name: Pfam Description:  Arabidopsis proteins of unknown function
  misc_feature (1)..(129): NCBI GI NO: 15239660 NR Description: hypothetical protein [Arabidopsis thaliana]
  misc_feature (1)..(129): NCBI GI NO: 6862912 NR Description: unknown protein [Arabidopsis thaliana]
  misc_feature (1)..(129): NCBI GI NO: 18397465 NR Description: expressed protein [Arabidopsis thaliana]
  misc_feature (1)..(129): NCBI GI NO: 15229797 NR Description: expressed protein [Arabidopsis thaliana]
  misc_feature (1)..(129): NCBI GI NO: 9759321 NR Description: gb|AAF00670
  misc_feature (1)..(129): NCBI GI NO: 18415139 NR Description: expressed protein [Arabidopsis thaliana]
  misc_feature (1)..(129): NCBI GI NO: 23617116 NR Description: leaf senescence related protein-like
  misc_feature (1)..(128): NCBI GI NO: 15221991 NR Description: hypothetical protein [Arabidopsis thaliana]
  misc_feature (1)..(128): NCBI GI NO: 34907406 NR Description: P0018C10.29
  misc_feature (1)..(129): NCBI GI NO: 15242021 NR Description: expressed protein [Arabidopsis thaliana]
  misc_feature (129)..(129): Xaa is any aa, unknown or other
MGFLIFNFSDYNCTVEYYRSPFIVLQGRAPAGAPEIVRYSIRVDSMDWMSDRGKWKDADVLIFNTGHWWNNEKTIRGGAYFQVGDEVKMGMNVADAYRRSIQTLSDWLRKEVNTSKTHVIYRTYAPVHXR

SEQ ID NO: 39121 - protein, 85 aa, Zea mays subsp. mays
  peptide (1)..(85): Ceres Seq. ID no. 13586303
  misc_feature (23)..(84): Pfam Name: Pfam Description:  Arabidopsis proteins of unknown function
  misc_feature (1)..(84): NCBI GI NO: 15239660 NR Description: hypothetical protein [Arabidopsis thaliana]
  misc_feature (1)..(84): NCBI GI NO: 6862912 NR Description: unknown protein [Arabidopsis thaliana]
  misc_feature (1)..(84): NCBI GI NO: 18397465 NR Description: expressed protein [Arabidopsis thaliana]
  misc_feature (1)..(84): NCBI GI NO: 15229797 NR Description: expressed protein [Arabidopsis thaliana]
  misc_feature (1)..(84): NCBI GI NO: 9759321 NR Description: gb|AAF00670
  misc_feature (1)..(84): NCBI GI NO: 18415139 NR Description: expressed protein [Arabidopsis thaliana]
  misc_feature (1)..(84): NCBI GI NO: 23617116 NR Description: leaf senescence related protein-like
  misc_feature (1)..(83): NCBI GI NO: 15221991 NR Description: hypothetical protein [Arabidopsis thaliana]
  misc_feature (1)..(83): NCBI GI NO: 34907406 NR Description: P0018C10.29
  misc_feature (1)..(84): NCBI GI NO: 15242021 NR Description: expressed protein [Arabidopsis thaliana]
  misc_feature (84)..(84): Xaa is any aa, unknown or other
MDWMSDRGKWKDADVLIFNTGHWWNNEKTIRGGAYFQVGDEVKMGMNVADAYRRSIQTLSDWLRKEVNTSKTHVIYRTYAPVHXR

SEQ ID NO: 39122 - DNA, 1528 bp, Zea mays subsp. mays; identical to SEQ ID NO: 30268
  misc_feature (1)..(1528): Ceres Seq. ID no. 12408393

SEQ ID NO: 39123 - protein, 508 aa, Zea mays subsp. mays; identical to SEQ ID NO: 30269
  peptide (1)..(508): Ceres Seq. ID no. 12408394
  misc_feature (48)..(507): NCBI GI NO: 34909602 NR Description: P0435B05.21
  misc_feature (62)..(267): NCBI GI NO: 18405962 NR Description: expressed protein; protein id: At2g42400
  misc_feature (294)..(504): NCBI GI NO: 18405962 NR Description: expressed protein; protein id: At2g42400
  misc_feature (105)..(507): NCBI GI NO: 15218694 NR Description: unknown protein; protein id: At1g28520.1
  misc_feature (62)..(504): NCBI GI NO: 25370817 NR Description: hypothetical protein At2g42400
  misc_feature (386)..(507): NCBI GI NO: 6691215 NR Description: F1K23.24 [Arabidopsis thaliana]
  misc_feature (47)..(217): NCBI GI NO: 15218694 NR Description: unknown protein; protein id: At1g28520.1

SEQ ID NO: 39124 - protein, 471 aa, Zea mays subsp. mays; identical to SEQ ID NO: 30270
  peptide (1)..(471): Ceres Seq. ID no. 12408395
  misc_feature (11)..(470): NCBI GI NO: 34909602 NR Description: P0435B05.21
  misc_feature (25)..(230): NCBI GI NO: 18405962 NR Description: expressed protein; protein id: At2g42400
  misc_feature (257)..(467): NCBI GI NO: 18405962 NR Description: expressed protein; protein id: At2g42400
  misc_feature (68)..(470): NCBI GI NO: 15218694 NR Description: unknown protein; protein id: At1g28520.1
  misc_feature (25)..(467): NCBI GI NO: 25370817 NR Description: hypothetical protein At2g42400
  misc_feature (349)..(470): NCBI GI NO: 6691215 NR Description: F1K23.24 [Arabidopsis thaliana]
  misc_feature (10)..(180): NCBI GI NO: 15218694 NR Description: unknown protein; protein id: At1g28520.1

SEQ ID NO: 39125 - protein, 469 aa, Zea mays subsp. mays; identical to SEQ ID NO: 30271
  peptide (1)..(469): Ceres Seq. ID no. 12408396
  misc_feature (9)..(468): NCBI GI NO: 34909602 NR Description: P0435B05.21
  misc_feature (23)..(228): NCBI GI NO: 18405962 NR Description: expressed protein; protein id: At2g42400
  misc_feature (255)..(465): NCBI GI NO: 18405962 NR Description: expressed protein; protein id: At2g42400
  misc_feature (66)..(468): NCBI GI NO: 15218694 NR Description: unknown protein; protein id: At1g28520.1
  misc_feature (23)..(465): NCBI GI NO: 25370817 NR Description: hypothetical protein At2g42400
  misc_feature (347)..(468): NCBI GI NO: 6691215 NR Description: F1K23.24 [Arabidopsis thaliana]
  misc_feature (8)..(178): NCBI GI NO: 15218694 NR Description: unknown protein; protein id: At1g28520.1

SEQ ID NO: 39126 - DNA, 457 bp, Zea mays subsp. mays
  misc_feature (1)..(457): Ceres Seq. ID no. 1674133
gtggtgttcatttgttctcactaaaattatgtgtgcagctgtagcttcgtcgcctgtatggacatgtttatttctgaaatcaagtggatattcaaatgcatcttctggcatgggagttgctcctaacattagggagacattcgttgagcttcaaatgaagaaggcattccgatatgttatcttcaaaatcgaagagaagcaaaagcaggtggttgtggagaagacaggggctactactgaaagctatgatgattttttggcctctctcccagagaatgactgccgatatgcgctgtatgattttgattttgttactggggagaatgtgcagaaaagcaagattttcttcattgcctggtccccatcgacatcccgcatacgtgctaagatgctgtactccacgtcgaaggaccgcatcaagtacgagcttgacgggttccactacgaaatccaggcg

SEQ ID NO: 39127 - protein, 152 aa, Zea mays subsp. mays
  peptide (1)..(152): Ceres Seq. ID no. 1674134
  misc_feature (41)..(151): Pfam Name: Pfam Description:  Cofilin/tropomyosin-type actin-binding protein
  misc_feature (24)..(151): NCBI GI NO: 34897072 NR Description: putative actin-depolymerizing factor
  misc_feature (32)..(151): NCBI GI NO: 4566614 NR Description: actin depolymerizing factor [Populus x canescens]
  misc_feature (32)..(151): NCBI GI NO: 32363121 NR Description: Actin-depolymerizing factor (ADF)
  misc_feature (32)..(151): NCBI GI NO: 18402587 NR Description: actin depolymerizing factor 6
  misc_feature (32)..(151): NCBI GI NO: 21554405 NR Description: Actin-depolymerizing factor ADF-6
  misc_feature (31)..(151): NCBI GI NO: 24745620 NR Description: actin depolymerizing factor 6 [Solanum tuberosum]
  misc_feature (35)..(151): NCBI GI NO: 7330254 NR Description: actin depolymerizing factor [Elaeis guineensis]
  misc_feature (37)..(151): NCBI GI NO: 25295741 NR Description: actin depolymerizing factor 6
  misc_feature (31)..(151): NCBI GI NO: 17366768 NR Description: Actin-depolymerizing factor 1 (ADF 1)
  misc_feature (31)..(151): NCBI GI NO: 17366765 NR Description: Actin-depolymerizing factor 2 (ADF 2)
WCSFVLTKIMCAAVASSPVWTCLFLKSSGYSNASSGMGVAPNIRETFVELQMKKAFRYVIFKIEEKQKQVVVEKTGATTESYDDFLASLPENDCRYALYDFDFVTGENVQKSKIFFIAWSPSTSRIRAKMLYSTSKDRIKYELDGFHYEIQA

SEQ ID NO: 39128 - protein, 143 aa, Zea mays subsp. mays
  peptide (1)..(143): Ceres Seq. ID no. 1674135
  misc_feature (32)..(142): Pfam Name: Pfam Description:  Cofilin/tropomyosin-type actin-binding protein
  misc_feature (15)..(142): NCBI GI NO: 34897072 NR Description: putative actin-depolymerizing factor
  misc_feature (23)..(142): NCBI GI NO: 4566614 NR Description: actin depolymerizing factor [Populus x canescens]
  misc_feature (23)..(142): NCBI GI NO: 32363121 NR Description: Actin-depolymerizing factor (ADF)
  misc_feature (23)..(142): NCBI GI NO: 18402587 NR Description: actin depolymerizing factor 6
  misc_feature (23)..(142): NCBI GI NO: 21554405 NR Description: Actin-depolymerizing factor ADF-6
  misc_feature (22)..(142): NCBI GI NO: 24745620 NR Description: actin depolymerizing factor 6 [Solanum tuberosum]
  misc_feature (26)..(142): NCBI GI NO: 7330254 NR Description: actin depolymerizing factor [Elaeis guineensis]
  misc_feature (28)..(142): NCBI GI NO: 25295741 NR Description: actin depolymerizing factor 6
  misc_feature (22)..(142): NCBI GI NO: 17366768 NR Description: Actin-depolymerizing factor 1 (ADF 1)
  misc_feature (22)..(142): NCBI GI NO: 17366765 NR Description: Actin-depolymerizing factor 2 (ADF 2)
MCAAVASSPVWTCLFLKSSGYSNASSGMGVAPNIRETFVELQMKKAFRYVIFKIEEKQKQVVVEKTGATTESYDDFLASLPENDCRYALYDFDFVTGENVQKSKIFFIAWSPSTSRIRAKMLYSTSKDRIKYELDGFHYEIQA

SEQ ID NO: 39129 - protein, 116 aa, Zea mays subsp. mays
  peptide (1)..(116): Ceres Seq. ID no. 1674136
  misc_feature (5)..(115): Pfam Name: Pfam Description:  Cofilin/tropomyosin-type actin-binding protein
  misc_feature (1)..(115): NCBI GI NO: 34897072 NR Description: putative actin-depolymerizing factor
  misc_feature (1)..(115): NCBI GI NO: 4566614 NR Description: actin depolymerizing factor [Populus x canescens]
  misc_feature (1)..(115): NCBI GI NO: 32363121 NR Description: Actin-depolymerizing factor (ADF)
  misc_feature (1)..(115): NCBI GI NO: 18402587 NR Description: actin depolymerizing factor 6
  misc_feature (1)..(115): NCBI GI NO: 21554405 NR Description: Actin-depolymerizing factor ADF-6
  misc_feature (1)..(115): NCBI GI NO: 24745620 NR Description: actin depolymerizing factor 6 [Solanum tuberosum]
  misc_feature (1)..(115): NCBI GI NO: 7330254 NR Description: actin depolymerizing factor [Elaeis guineensis]
  misc_feature (1)..(115): NCBI GI NO: 25295741 NR Description: actin depolymerizing factor 6
  misc_feature (1)..(115): NCBI GI NO: 17366768 NR Description: Actin-depolymerizing factor 1 (ADF 1)
  misc_feature (1)..(115): NCBI GI NO: 17366765 NR Description: Actin-depolymerizing factor 2 (ADF 2)
MGVAPNIRETFVELQMKKAFRYVIFKIEEKQKQVVVEKTGATTESYDDFLASLPENDCRYALYDFDFVTGENVQKSKIFFIAWSPSTSRIRAKMLYSTSKDRIKYELDGFHYEIQA

SEQ ID NO: 39130 - DNA, 1480 bp, Zea mays subsp. mays
  misc_feature (1)..(1480): Ceres Seq. ID no. 12359859
cttgtggacttgtggccttgtggggcaattggctagatgggaaagaaggtggctgttgtggtgggagggagtgttgctgggctagcgtgcgctcacgccgtggctggcgcgggatgggaggtggttgtgctggagaaggcggcagcgccggcggcggggagcggcacgggcgccggactgggcctcgacgcgcagtctatggagattctctcgcgctggatcccggggtggggaatcgacgcggtcacgctgccgctcgccgtcgatctgaacgtagccacggacagcgcgacgaaggcggtgaggacgctggcgagggacgaagacttcaaattccgggcggcccactggggcgacctgcaccggcggctgcacgaggagctgccgcccgcggtgagcgtgctgtgggggcaccagttcctgtcgttcgaggcgccggacgacacacgcggggtcgtcgcgacggcccgcgtgctgcggacgggagggacggttgaggccacgggggacctgctcatcgccgcggacggctccacgtcgtctgtccgtcgcagcttcttgccagacctcaagctcaggtattccgggtactgcgcgtggcggggcgtgtttgatttcagcgggaaggagagctctgacaccatgaccagcatccgaagagcctacccggagctcggcaactgcctctacttcgaccttgcttacaagacccacgccgtgctctacgagctgcccaggagcaggctcaactggctctggtacatcaacggcccagaaccggagctcgcggggaactcggtgaccatggaggcgactgacgccatggtgggacgaatgcggaacgaggcggagcgcgtctggtgccccgagctggcgcgtctggtcagggagaccgcggcgccgttcgtaaacgtgatctacgacgcagacccgctgccgcggttgtcgtggacgggcggccgcgtggtactggtcggcgacgcggcgcacccgacgactccgcacgggctgcggagcaccaacatgtcggtcatggacgcgtgcacgctcgggcagtgcttggcgaactggaactcagagccgacgcctgcgcgcgcgctggcagagtacgaggcggtgcgcctgcccgttgtggcggaacaagtgctccacgcccgccagctcgggaggctcaagcagggcctgccagtggacggtgaggcggaggacgggtttgacgtgacgacggcaaaggccgaggtgctgcagctacggcagaggacaatgccgttcttcgatggcgcacctgccgcagttggcggtgattttcctctcgttggcagtacaagatgaatcgagacagcattacctgtatgactctgacatttaatcatggtttggcatagcttcaccaaatacaattaaaaaatatatagtttagaattacctgtatgactatgaaatttaatgatggcttggcatagcttcaccaaatacaatt

SEQ ID NO: 39131 - protein, 431 aa, Zea mays subsp. mays
  peptide (1)..(431): Ceres Seq. ID no. 12359860
  misc_feature (157)..(374): Pfam Name: Pfam Description:  Monooxygenase
  misc_feature (1)..(417): NCBI GI NO: 15239022 NR Description: 2,6-dihydroxypyridine 3-hydroxylase
  misc_feature (2)..(377): NCBI GI NO: 34766436 NR Description: FscO [Streptomyces sp. FR-008]
  misc_feature (6)..(359): NCBI GI NO: 17549132 NR Description: PUTATIVE SALICYLATE HYDROXYLASE OXIDOREDUCTASEPROTEIN
  misc_feature (43)..(390): NCBI GI NO: 33601729 NR Description: putative monooxygenase [Bordetella bronchiseptica]
  misc_feature (154)..(383): NCBI GI NO: 5916090 NR Description: hypothetical protein [Ralstonia eutropha]
  misc_feature (6)..(53): NCBI GI NO: 5916090 NR Description: hypothetical protein [Ralstonia eutropha]
  misc_feature (105)..(363): NCBI GI NO: 22986825 NR Description: hypothetical protein [Burkholderia fungorum]
  misc_feature (3)..(131): NCBI GI NO: 22986825 NR Description: hypothetical protein [Burkholderia fungorum]
  misc_feature (6)..(394): NCBI GI NO: 27381191 NR Description: bll6080 [Bradyrhizobium japonicum]
  misc_feature (7)..(191): NCBI GI NO: 33601754 NR Description: putative monooxygenase [Bordetella bronchiseptica]
MGKKVAVVVGGSVAGLACAHAVAGAGWEVVVLEKAAAPAAGSGTGAGLGLDAQSMEILSRWIPGWGIDAVTLPLAVDLNVATDSATKAVRTLARDEDFKFRAAHWGDLHRRLHEELPPAVSVLWGHQFLSFEAPDDTRGVVATARVLRTGGTVEATGDLLIAADGSTSSVRRSFLPDLKLRYSGYCAWRGVFDFSGKESSDTMTSIRRAYPELGNCLYFDLAYKTHAVLYELPRSRLNWLWYINGPEPELAGNSVTMEATDAMVGRMRNEAERVWCPELARLVRETAAPFVNVIYDADPLPRLSWTGGRVVLVGDAAHPTTPHGLRSTNMSVMDACTLGQCLANWNSEPTPARALAEYEAVRLPVVAEQVLHARQLGRLKQGLPVDGEAEDGFDVTTAKAEVLQLRQRTMPFFDGAPAAVGGDFPLVGSTR

SEQ ID NO: 39132 - protein, 377 aa, Zea mays subsp. mays
  peptide (1)..(377): Ceres Seq. ID no. 12359861
  misc_feature (103)..(320): Pfam Name: Pfam Description:  Monooxygenase
  misc_feature (1)..(363): NCBI GI NO: 15239022 NR Description: 2,6-dihydroxypyridine 3-hydroxylase
  misc_feature (1)..(323): NCBI GI NO: 34766436 NR Description: FscO [Streptomyces sp. FR-008]
  misc_feature (1)..(305): NCBI GI NO: 17549132 NR Description: PUTATIVE SALICYLATE HYDROXYLASE OXIDOREDUCTASEPROTEIN
  misc_feature (1)..(336): NCBI GI NO: 33601729 NR Description: putative monooxygenase [Bordetella bronchiseptica]
  misc_feature (100)..(329): NCBI GI NO: 5916090 NR Description: hypothetical protein [Ralstonia eutropha]
  misc_feature (51)..(309): NCBI GI NO: 22986825 NR Description: hypothetical protein [Burkholderia fungorum]
  misc_feature (1)..(77): NCBI GI NO: 22986825 NR Description: hypothetical protein [Burkholderia fungorum]
  misc_feature (1)..(340): NCBI GI NO: 27381191 NR Description: bll6080 [Bradyrhizobium japonicum]
  misc_feature (1)..(137): NCBI GI NO: 33601754 NR Description: putative monooxygenase [Bordetella bronchiseptica]
  misc_feature (172)..(316): NCBI GI NO: 33601754 NR Description: putative monooxygenase [Bordetella bronchiseptica]
MEILSRWIPGWGIDAVTLPLAVDLNVATDSATKAVRTLARDEDFKFRAAHWGDLHRRLHEELPPAVSVLWGHQFLSFEAPDDTRGVVATARVLRTGGTVEATGDLLIAADGSTSSVRRSFLPDLKLRYSGYCAWRGVFDFSGKESSDTMTSIRRAYPELGNCLYFDLAYKTHAVLYELPRSRLNWLWYINGPEPELAGNSVTMEATDAMVGRMRNEAERVWCPELARLVRETAAPFVNVIYDADPLPRLSWTGGRVVLVGDAAHPTTPHGLRSTNMSVMDACTLGQCLANWNSEPTPARALAEYEAVRLPVVAEQVLHARQLGRLKQGLPVDGEAEDGFDVTTAKAEVLQLRQRTMPFFDGAPAAVGGDFPLVGSTR

SEQ ID NO: 39133 - protein, 229 aa, Zea mays subsp. mays
  peptide (1)..(229): Ceres Seq. ID no. 12359862
  misc_feature (1)..(172): Pfam Name: Pfam Description:  Monooxygenase
  misc_feature (1)..(215): NCBI GI NO: 15239022 NR Description: 2,6-dihydroxypyridine 3-hydroxylase
  misc_feature (1)..(175): NCBI GI NO: 34766436 NR Description: FscO [Streptomyces sp. FR-008]
  misc_feature (1)..(157): NCBI GI NO: 17549132 NR Description: PUTATIVE SALICYLATE HYDROXYLASE OXIDOREDUCTASEPROTEIN
  misc_feature (1)..(188): NCBI GI NO: 33601729 NR Description: putative monooxygenase [Bordetella bronchiseptica]
  misc_feature (1)..(181): NCBI GI NO: 5916090 NR Description: hypothetical protein [Ralstonia eutropha]
  misc_feature (1)..(161): NCBI GI NO: 22986825 NR Description: hypothetical protein [Burkholderia fungorum]
  misc_feature (1)..(192): NCBI GI NO: 27381191 NR Description: bll6080 [Bradyrhizobium japonicum]
  misc_feature (24)..(168): NCBI GI NO: 33601754 NR Description: putative monooxygenase [Bordetella bronchiseptica]
  misc_feature (73)..(161): NCBI GI NO: 22989579 NR Description: hypothetical protein [Burkholderia fungorum]
  misc_feature (1)..(177): NCBI GI NO: 13476746 NR Description: salicylate hydroxylase [Mesorhizobium loti]
MTSIRRAYPELGNCLYFDLAYKTHAVLYELPRSRLNWLWYINGPEPELAGNSVTMEATDAMVGRMRNEAERVWCPELARLVRETAAPFVNVIYDADPLPRLSWTGGRVVLVGDAAHPTTPHGLRSTNMSVMDACTLGQCLANWNSEPTPARALAEYEAVRLPVVAEQVLHARQLGRLKQGLPVDGEAEDGFDVTTAKAEVLQLRQRTMPFFDGAPAAVGGDFPLVGSTR

SEQ ID NO: 39134 - DNA, 1285 bp, Zea mays subsp. mays
  misc_feature (1)..(1285): Ceres Seq. ID no. 12383461
atacatccctctccgtctccctaccgctcccgtcccgtccgctgctggctctgcatatcccgcgcccgactcccgttgctgcgtgcggcggcccgactagtcgcgccgcgctgcgctcggcttgattgaaccggccgggatgggggtgttggaggacctcgtggcgagagcgggcgggtgcgcggtcatcgacggcggcttcgccacgcagctggaggcgctcggcgccgacatcaacgacccgctctggagcgccgcttgcctcatcaccaggccgcacctcgtcaaggaggttcatatgcagtatcttgaagctggtgcggacgtcatcatttcatcatcttaccaggcaacaatcccgggtttcatagctagaggaatgtctgtcgctgaggcagaagatttactgcgaacaagtgtaaaactggccaatgaagctcgagatgaattttggaagtcaacactgaggaagtccaaacctatttacaaccgtgctctggttgctgcatccattggtagctacggagcctatcttgctgatggatcggagtacagtggatcatacggagctgacatcacagccgagaagctgaaggacttccacaggcgccggctgcaggttcttgcaagtgccggtcctgacctgattgcgtttgaggccattcctaaccaaatggaggcacaggcattggttgagcttctggaggaagagaaagtccagatcccttcctggatctgcttcagctccgtggacggtaagaacctgtgctctggggagagttttgcggactgccttaagatcctcaacgcgagcgagaaggtggccgttgtaggcgtgaactgcacacctcctcagttcatcgagggcatcatatgtgaatttaggaagcaaaccaagaaggcgattgcagtttacccgaacagcggcgaagtttgggacgggagagcgaagaggtggctgccggttgagtgcttgggtcacaaaagcttcgacgctctcgcgaagagatggcaggaggcgggggccagcctcatcggagggtgctgccggacaacgccttcaactattagggctgtttccaagatcctcaaaggaaggacggggcattgatttgtttattataattgagctgttgttgcattatgtcactagccagaataacattcagaatatgtatcctgttgctcttccgttcccctttctaaaataaggtatcaatataattttgcagtgtaaaacgtaatactagtttgtagcgctgacccacagtattgcttagtctcc

SEQ ID NO: 39135 - protein, 323 aa, Zea mays subsp. mays
  peptide (1)..(323): Ceres Seq. ID no. 12383462
  misc_feature (14)..(319): Pfam Name: Pfam Description:  Homocysteine S-methyltransferase
  misc_feature (1)..(323): NCBI GI NO: 10732785 NR Description: homocysteine S-methyltransferase-1 [Zea mays]
  misc_feature (4)..(323): NCBI GI NO: 22748320 NR Description: Putative homocysteine S-methyltransferase-1
  misc_feature (3)..(320): NCBI GI NO: 15230929 NR Description: homocysteine S-methyltransferase AtHMT-1
  misc_feature (4)..(320): NCBI GI NO: 15229396 NR Description: homocysteine S-methyltransferase AtHMT-2
  misc_feature (4)..(320): NCBI GI NO: 25453566 NR Description: homocysteine S-methyltransferase (EC 2
  misc_feature (1)..(317): NCBI GI NO: 10732789 NR Description: homocysteine S-methyltransferase-3 [Zea mays]
  misc_feature (3)..(317): NCBI GI NO: 18403505 NR Description: putative selenocysteine methyltransferase
  misc_feature (2)..(317): NCBI GI NO: 10732787 NR Description: homocysteine S-methyltransferase-2 [Zea mays]
  misc_feature (3)..(317): NCBI GI NO: 21593147 NR Description: putative selenocysteine methyltransferase
  misc_feature (1)..(318): NCBI GI NO: 10732791 NR Description: homocysteine S-methyltransferase-4 [Zea mays]
MGVLEDLVARAGGCAVIDGGFATQLEALGADINDPLWSAACLITRPHLVKEVHMQYLEAGADVIISSSYQATIPGFIARGMSVAEAEDLLRTSVKLANEARDEFWKSTLRKSKPIYNRALVAASIGSYGAYLADGSEYSGSYGADITAEKLKDFHRRRLQVLASAGPDLIAFEAIPNQMEAQALVELLEEEKVQIPSWICFSSVDGKNLCSGESFADCLKILNASEKVAVVGVNCTPPQFIEGIICEFRKQTKKAIAVYPNSGEVWDGRAKRWLPVECLGHKSFDALAKRWQEAGASLIGGCCRTTPSTIRAVSKILKGRTGH

SEQ ID NO: 39136 - protein, 270 aa, Zea mays subsp. mays
  peptide (1)..(270): Ceres Seq. ID no. 12383463
  misc_feature (1)..(266): Pfam Name: Pfam Description:  Homocysteine S-methyltransferase
  misc_feature (1)..(270): NCBI GI NO: 10732785 NR Description: homocysteine S-methyltransferase-1 [Zea mays]
  misc_feature (1)..(270): NCBI GI NO: 22748320 NR Description: Putative homocysteine S-methyltransferase-1
  misc_feature (1)..(267): NCBI GI NO: 15230929 NR Description: homocysteine S-methyltransferase AtHMT-1
  misc_feature (1)..(267): NCBI GI NO: 15229396 NR Description: homocysteine S-methyltransferase AtHMT-2
  misc_feature (1)..(267): NCBI GI NO: 25453566 NR Description: homocysteine S-methyltransferase (EC 2
  misc_feature (1)..(264): NCBI GI NO: 10732789 NR Description: homocysteine S-methyltransferase-3 [Zea mays]
  misc_feature (1)..(264): NCBI GI NO: 18403505 NR Description: putative selenocysteine methyltransferase
  misc_feature (1)..(264): NCBI GI NO: 10732787 NR Description: homocysteine S-methyltransferase-2 [Zea mays]
  misc_feature (1)..(264): NCBI GI NO: 21593147 NR Description: putative selenocysteine methyltransferase
  misc_feature (1)..(265): NCBI GI NO: 10732791 NR Description: homocysteine S-methyltransferase-4 [Zea mays]
MQYLEAGADVIISSSYQATIPGFIARGMSVAEAEDLLRTSVKLANEARDEFWKSTLRKSKPIYNRALVAASIGSYGAYLADGSEYSGSYGADITAEKLKDFHRRRLQVLASAGPDLIAFEAIPNQMEAQALVELLEEEKVQIPSWICFSSVDGKNLCSGESFADCLKILNASEKVAVVGVNCTPPQFIEGIICEFRKQTKKAIAVYPNSGEVWDGRAKRWLPVECLGHKSFDALAKRWQEAGASLIGGCCRTTPSTIRAVSKILKGRTGH

SEQ ID NO: 39137 - protein, 243 aa, Zea mays subsp. mays
  peptide (1)..(243): Ceres Seq. ID no. 12383464
  misc_feature (1)..(239): Pfam Name: Pfam Description:  Homocysteine S-methyltransferase
  misc_feature (1)..(243): NCBI GI NO: 10732785 NR Description: homocysteine S-methyltransferase-1 [Zea mays]
  misc_feature (1)..(243): NCBI GI NO: 22748320 NR Description: Putative homocysteine S-methyltransferase-1
  misc_feature (1)..(240): NCBI GI NO: 15230929 NR Description: homocysteine S-methyltransferase AtHMT-1
  misc_feature (1)..(240): NCBI GI NO: 15229396 NR Description: homocysteine S-methyltransferase AtHMT-2
  misc_feature (1)..(240): NCBI GI NO: 25453566 NR Description: homocysteine S-methyltransferase (EC 2
  misc_feature (1)..(237): NCBI GI NO: 10732789 NR Description: homocysteine S-methyltransferase-3 [Zea mays]
  misc_feature (1)..(237): NCBI GI NO: 18403505 NR Description: putative selenocysteine methyltransferase
  misc_feature (1)..(237): NCBI GI NO: 10732787 NR Description: homocysteine S-methyltransferase-2 [Zea mays]
  misc_feature (1)..(237): NCBI GI NO: 21593147 NR Description: putative selenocysteine methyltransferase
  misc_feature (1)..(238): NCBI GI NO: 10732791 NR Description: homocysteine S-methyltransferase-4 [Zea mays]
MSVAEAEDLLRTSVKLANEARDEFWKSTLRKSKPIYNRALVAASIGSYGAYLADGSEYSGSYGADITAEKLKDFHRRRLQVLASAGPDLIAFEAIPNQMEAQALVELLEEEKVQIPSWICFSSVDGKNLCSGESFADCLKILNASEKVAVVGVNCTPPQFIEGIICEFRKQTKKAIAVYPNSGEVWDGRAKRWLPVECLGHKSFDALAKRWQEAGASLIGGCCRTTPSTIRAVSKILKGRTGH

SEQ ID NO: 39138 - DNA, 1658 bp, Zea mays subsp. mays
  misc_feature (1)..(1658): Ceres Seq. ID no. 13493696
gcacgagaccattacctagaacatcctaatcaaaaagcaaccagcaggccattctctcgccgtctcatcacaactagcgccactctagtagtaagtactaagtagtagtaggaggtggcagcagcagccaatcttgccacgatgacactctgcaccgtcttgctccagatcctccttccaacgctgctcttggtttctgccatcacaggcgcggacgctagcggcatcggcgtcaactacggcacgcggggcacgacgctcccggcgccggccgacgtggcgcggttcctggcccgggacaccatcttcgaccgcgtgaggctgttggacgccgacccggtcctgctgcgggccttcgcaggcacgggcctcgccgtggacgtgacggtgcccaacggcgtcgtcccgcgcctgttgaatctgaccttcgcgcggcgctgggtgcgcgacaacgtgacgccctacgcgggcgccaccaacatctcgcgcctcctggtcggcgacgaggtgaccaccgaggccaaccggacgctgctgctggcgctggtgccggccatgcagaacctgcacaccgcgctggtcgccgcgtccctgcacggccgggtgaaggtctccaccacgcactcgctcggggtgctcaccaccacggagcagccgtcggcggcgcggttccgcgacggctacgacgcggccatcgtgaggccgctgctcaggttcctccgcgcgaccggcgcgccgttcatggtgaacgcgtacccgttctacgcgctcgccaacgacagcagcctcgacttcgcgctgttccgggtgaacgacggcgtcatggaccagggcaccgggctggtgtacggcaacatgctggacgcgcagctcgacgccgtgcactcggccgtcaggcggatgggcttcggggacgtcgacatcgccgtgtcggagaccgggtggccatcggccggggaggactgggaggtcggcgtcggcgcggacctcgcccgggactacaacatcaacgccatccgccacctcggctccggcgtcggcacgccgctcatgcccaaccgcaccttcgaggtctccatcttctccctcttcgacgagaacctcaagccagggccggtgtcggagaggaatttcggcttgttccgcggcgacatgacgccggtctacgacgtcggcatcttcactgatccggagacccttgagccggtgagagcgaaggtgacgagccggaaatggtgcgtgccggagccggcggcggacgagatggtgctgcaggaaaacatcgacttcgcgtgcggccaaaagggcgtcgactgtaccgcgatccggccgggcggcgtctgctacgagccggacacggtgcaggcccacgcggcgtacgccatgaacctctacttccaggccaatggccagcatgcctttgactgcgattttggacagacaggcattgttaccacagctgatcccagttatggaggctgcaaattcatgtgaacaaggcataggggatgtttgttttgaggaatcactctattgaaatttagatggtacatcatgagtccatttctcaaatttgttgggatgattatattacttatattaatactaactaactatgaaaaatgagatagtgatagataaactcattttatttcatc

SEQ ID NO: 39139 - protein, 450 aa, Zea mays subsp. mays
  peptide (1)..(450): Ceres Seq. ID no. 13493697
  misc_feature (29)..(346): Pfam Name: Pfam Description:  Glycosyl hydrolases family 17
  misc_feature (8)..(450): NCBI GI NO: 1706551 NR Description: GLUCAN ENDO-1,3-BETA-GLUCOSIDASE PRECURSOR ((1-
  misc_feature (1)..(448): NCBI GI NO: 11279328 NR Description: glucan endo-1,3-beta-D-glucosidase (EC 3.2.1.39)
  misc_feature (8)..(443): NCBI GI NO: 15226720 NR Description: glycosyl hydrolase family 17
  misc_feature (1)..(449): NCBI GI NO: 14279169 NR Description: beta-1,3-glucanase-like protein [Olea europaea]
  misc_feature (7)..(449): NCBI GI NO: 31126737 NR Description: putative beta 1,3-glucanase
  misc_feature (15)..(449): NCBI GI NO: 21617932 NR Description: beta-1,3-glucanase-like protein
  misc_feature (15)..(449): NCBI GI NO: 15233271 NR Description: glycosyl hydrolase family 17 (beta-1,3-glucanase)
  misc_feature (15)..(449): NCBI GI NO: 15028379 NR Description: putative beta-1,3-glucanase [Arabidopsis thaliana]
  misc_feature (7)..(349): NCBI GI NO: 30678225 NR Description: glycosyl hydrolase family 17
  misc_feature (336)..(449): NCBI GI NO: 30678225 NR Description: glycosyl hydrolase family 17
MTLCTVLLQILLPTLLLVSAITGADASGIGVNYGTRGTTLPAPADVARFLARDTIFDRVRLLDADPVLLRAFAGTGLAVDVTVPNGVVPRLLNLTFARRWVRDNVTPYAGATNISRLLVGDEVTTEANRTLLLALVPAMQNLHTALVAASLHGRVKVSTTHSLGVLTTTEQPSAARFRDGYDAAIVRPLLRFLRATGAPFMVNAYPFYALANDSSLDFALFRVNDGVMDQGTGLVYGNMLDAQLDAVHSAVRRMGFGDVDIAVSETGWPSAGEDWEVGVGADLARDYNINAIRHLGSGVGTPLMPNRTFEVSIFSLFDENLKPGPVSERNFGLFRGDMTPVYDVGIFTDPETLEPVRAKVTSRKWCVPEPAADEMVLQENIDFACGQKGVDCTAIRPGGVCYEPDTVQAHAAYAMNLYFQANGQHAFDCDFGQTGIVTTADPSYGGCKFM

SEQ ID NO: 39140 - protein, 312 aa, Zea mays subsp. mays
  peptide (1)..(312): Ceres Seq. ID no. 13493698
  misc_feature (1)..(208): Pfam Name: Pfam Description:  Glycosyl hydrolases family 17
  misc_feature (1)..(312): NCBI GI NO: 1706551 NR Description: GLUCAN ENDO-1,3-BETA-GLUCOSIDASE PRECURSOR ((1-
  misc_feature (1)..(310): NCBI GI NO: 11279328 NR Description: glucan endo-1,3-beta-D-glucosidase (EC 3.2.1.39)
  misc_feature (1)..(305): NCBI GI NO: 15226720 NR Description: glycosyl hydrolase family 17
  misc_feature (1)..(311): NCBI GI NO: 14279169 NR Description: beta-1,3-glucanase-like protein [Olea europaea]
  misc_feature (1)..(311): NCBI GI NO: 31126737 NR Description: putative beta 1,3-glucanase
  misc_feature (1)..(311): NCBI GI NO: 21617932 NR Description: beta-1,3-glucanase-like protein
  misc_feature (1)..(311): NCBI GI NO: 15233271 NR Description: glycosyl hydrolase family 17 (beta-1,3-glucanase)
  misc_feature (1)..(311): NCBI GI NO: 15028379 NR Description: putative beta-1,3-glucanase [Arabidopsis thaliana]
  misc_feature (1)..(211): NCBI GI NO: 30678225 NR Description: glycosyl hydrolase family 17
  misc_feature (198)..(311): NCBI GI NO: 30678225 NR Description: glycosyl hydrolase family 17
MQNLHTALVAASLHGRVKVSTTHSLGVLTTTEQPSAARFRDGYDAAIVRPLLRFLRATGAPFMVNAYPFYALANDSSLDFALFRVNDGVMDQGTGLVYGNMLDAQLDAVHSAVRRMGFGDVDIAVSETGWPSAGEDWEVGVGADLARDYNINAIRHLGSGVGTPLMPNRTFEVSIFSLFDENLKPGPVSERNFGLFRGDMTPVYDVGIFTDPETLEPVRAKVTSRKWCVPEPAADEMVLQENIDFACGQKGVDCTAIRPGGVCYEPDTVQAHAAYAMNLYFQANGQHAFDCDFGQTGIVTTADPSYGGCKFM

SEQ ID NO: 39141 - protein, 250 aa, Zea mays subsp. mays
  peptide (1)..(250): Ceres Seq. ID no. 13493699
  misc_feature (1)..(146): Pfam Name: Pfam Description:  Glycosyl hydrolases family 17
  misc_feature (1)..(250): NCBI GI NO: 1706551 NR Description: GLUCAN ENDO-1,3-BETA-GLUCOSIDASE PRECURSOR ((1-
  misc_feature (1)..(248): NCBI GI NO: 11279328 NR Description: glucan endo-1,3-beta-D-glucosidase (EC 3.2.1.39)
  misc_feature (1)..(243): NCBI GI NO: 15226720 NR Description: glycosyl hydrolase family 17
  misc_feature (1)..(249): NCBI GI NO: 14279169 NR Description: beta-1,3-glucanase-like protein [Olea europaea]
  misc_feature (1)..(249): NCBI GI NO: 31126737 NR Description: putative beta 1,3-glucanase
  misc_feature (1)..(249): NCBI GI NO: 21617932 NR Description: beta-1,3-glucanase-like protein
  misc_feature (1)..(249): NCBI GI NO: 15233271 NR Description: glycosyl hydrolase family 17 (beta-1,3-glucanase)
  misc_feature (1)..(249): NCBI GI NO: 15028379 NR Description: putative beta-1,3-glucanase [Arabidopsis thaliana]
  misc_feature (1)..(149): NCBI GI NO: 30678225 NR Description: glycosyl hydrolase family 17
  misc_feature (136)..(249): NCBI GI NO: 30678225 NR Description: glycosyl hydrolase family 17
MVNAYPFYALANDSSLDFALFRVNDGVMDQGTGLVYGNMLDAQLDAVHSAVRRMGFGDVDIAVSETGWPSAGEDWEVGVGADLARDYNINAIRHLGSGVGTPLMPNRTFEVSIFSLFDENLKPGPVSERNFGLFRGDMTPVYDVGIFTDPETLEPVRAKVTSRKWCVPEPAADEMVLQENIDFACGQKGVDCTAIRPGGVCYEPDTVQAHAAYAMNLYFQANGQHAFDCDFGQTGIVTTADPSYGGCKFM

SEQ ID NO: 39142 - DNA, 1863 bp, Zea mays subsp. mays
  misc_feature (1)..(1863): Ceres Seq. ID no. 12387583
gcacgagaccattacctagaacatcctaatcgaaaaaccatttcgtttcggcttgagcagccggggagctgagcagcgcggcgcccatgtcggactccgagctgtcccagggcacgctagtgttcggcctccacctctgggagctcgtcggcatcggtgtcggtgccgcattcgtgctcctcctcgtcctcctctccctgctctgcctcctcgcctcccgccgccgccgacgccgccgtgctgcccccgtcctccacctccccgccgtcgtgcccaatgcccagcccaagcaccccgccaagccccccaaggacatccaagaggtgccctcccgcggcaccgcggcccccgccgccccggccaaggcgccgctcgcccaggtgctgcaggcgccgccgccggactccatccagatcgagacggggaaggagcaccgtatcacgttcccggagcagccgccgcccccgcaccaccagcggagcggggggccgtcgtctcggggcgccagcggggagagccgtggcggtggtggggaaccgggggtcccggaggtgtcgcacctggggtggggccactggtacacactcaaggagctggaggacgccacgtgcatgttcgccgacgagaaggtgatcggcgagggcggctacggcatagtgtaccacggcgtgctggagggcggagtgcaggtcgccgtcaaaaacttgctcaacaacagggggcaggcagaacgggaattcaaggttgaggtggaagctatcgggcgagtgcgacacaagaaccttgttcggttgttaggatactgcgctgaaggcaaccaaaggatgcttgtgtatgagtacgttaataatggaaacttggagcaatggctccatggggatgttggccctgtgagccctcttacatgggatatcagaatgaagattattctgggaacagcaaaagggttaatgtatttgcacgagggacttgagccaaaggttgttcaccgtgatgtcaagtcgagcaatattcttcttgacaagcattggaatgcaaagctttctgattttgggctagcgaaacttttgggttcagaaaggagttatgtcacaaccagggtcatggggacatttgggtatgttgcgccagagtatgcgggcactggcatgttgaatgaaactagcgatgtctatagtttcggaattcttatcatggaaataatatctggccgtgtacctgttgattacaacaggccgccaggggagattaatctagttgagtggctgaagacgatggtcagcaacagaaattctgaaggggttttggatccaaagatgaccgagaagcctacttctagggcattgaagaaggctttgctagtggctctgcggtgcgtagaccccgaagctcgcaagaggccaaagattgggcatgtcattcacatgcttgaggttgacgatttcccgtacagagatgagcgccggggtggcaaagctccagcccaagcaagatcggtggaaacgccacctgcaagcgaacctggcgatagcagcggaaacaacactccaaaggacgcgcctaatggagaacctttcaagtggagaaactaagaggactagccaccaggaaaacggtggttgcttgagtttgtgcctgataaagaagctggatatggttggttggttggttggttggttggtcgggcatgcaaactccacaagcaccagtgtcggtcgtcgtcgtgacagtatatgtacattgttgaatcgatatgttagccatagcgattttttttccagttggttttcttggggccgtatatttatgcgaaggatgattttgtgtgataaaggcgcgcgctctcgtgtgtattcctgaggc

SEQ ID NO: 39143 - protein, 501 aa, Zea mays subsp. mays
  peptide (1)..(501): Ceres Seq. ID no. 12387584
  misc_feature (179)..(448): Pfam Name: Pfam Description:  Protein kinase domain
  misc_feature (21)..(501): NCBI GI NO: 34897534 NR Description: OSJNBa0042L16.4
  misc_feature (83)..(486): NCBI GI NO: 14194119 NR Description: At1g01540/F22L4_6 [Arabidopsis thaliana]
  misc_feature (83)..(486): NCBI GI NO: 15223428 NR Description: protein serine/threonine kinase, putative
  misc_feature (1)..(89): NCBI GI NO: 14194119 NR Description: At1g01540/F22L4_6 [Arabidopsis thaliana]
  misc_feature (1)..(89): NCBI GI NO: 15223428 NR Description: protein serine/threonine kinase, putative
  misc_feature (64)..(457): NCBI GI NO: 15234142 NR Description: putative protein kinase; protein id: At4g01330.1
  misc_feature (3)..(96): NCBI GI NO: 15234142 NR Description: putative protein kinase; protein id: At4g01330.1
  misc_feature (64)..(486): NCBI GI NO: 15235432 NR Description: putative serine/threonine protein kinase
  misc_feature (211)..(486): NCBI GI NO: 25518287 NR Description: hypothetical protein F22L4
  misc_feature (83)..(211): NCBI GI NO: 25518287 NR Description: hypothetical protein F22L4
MSDSELSQGTLVFGLHLWELVGIGVGAAFVLLLVLLSLLCLLASRRRRRRRAAPVLHLPAVVPNAQPKHPAKPPKDIQEVPSRGTAAPAAPAKAPLAQVLQAPPPDSIQIETGKEHRITFPEQPPPPHHQRSGGPSSRGASGESRGGGGEPGVPEVSHLGWGHWYTLKELEDATCMFADEKVIGEGGYGIVYHGVLEGGVQVAVKNLLNNRGQAEREFKVEVEAIGRVRHKNLVRLLGYCAEGNQRMLVYEYVNNGNLEQWLHGDVGPVSPLTWDIRMKIILGTAKGLMYLHEGLEPKVVHRDVKSSNILLDKHWNAKLSDFGLAKLLGSERSYVTTRVMGTFGYVAPEYAGTGMLNETSDVYSFGILIMEIISGRVPVDYNRPPGEINLVEWLKTMVSNRNSEGVLDPKMTEKPTSRALKKALLVALRCVDPEARKRPKIGHVIHMLEVDDFPYRDERRGGKAPAQARSVETPPASEPGDSSGNNTPKDAPNGEPFKWRN

SEQ ID NO: 39144 - protein, 326 aa, Zea mays subsp. mays
  peptide (1)..(326): Ceres Seq. ID no. 12387585
  misc_feature (4)..(273): Pfam Name: Pfam Description:  Protein kinase domain
  misc_feature (1)..(326): NCBI GI NO: 34897534 NR Description: OSJNBa0042L16.4
  misc_feature (1)..(311): NCBI GI NO: 14194119 NR Description: At1g01540/F22L4_6 [Arabidopsis thaliana]
  misc_feature (1)..(311): NCBI GI NO: 15223428 NR Description: protein serine/threonine kinase, putative
  misc_feature (1)..(282): NCBI GI NO: 15234142 NR Description: putative protein kinase; protein id: At4g01330.1
  misc_feature (1)..(311): NCBI GI NO: 15235432 NR Description: putative serine/threonine protein kinase
  misc_feature (36)..(311): NCBI GI NO: 25518287 NR Description: hypothetical protein F22L4
  misc_feature (1)..(36): NCBI GI NO: 25518287 NR Description: hypothetical protein F22L4
  misc_feature (1)..(283): NCBI GI NO: 37536398 NR Description: putative receptor-like protein kinase
  misc_feature (1)..(310): NCBI GI NO: 37535714 NR Description: putative kinase
  misc_feature (1)..(288): NCBI GI NO: 30690058 NR Description: protein kinase family [Arabidopsis thaliana]
MFADEKVIGEGGYGIVYHGVLEGGVQVAVKNLLNNRGQAEREFKVEVEAIGRVRHKNLVRLLGYCAEGNQRMLVYEYVNNGNLEQWLHGDVGPVSPLTWDIRMKIILGTAKGLMYLHEGLEPKVVHRDVKSSNILLDKHWNAKLSDFGLAKLLGSERSYVTTRVMGTFGYVAPEYAGTGMLNETSDVYSFGILIMEIISGRVPVDYNRPPGEINLVEWLKTMVSNRNSEGVLDPKMTEKPTSRALKKALLVALRCVDPEARKRPKIGHVIHMLEVDDFPYRDERRGGKAPAQARSVETPPASEPGDSSGNNTPKDAPNGEPFKWRN

SEQ ID NO: 39145 - protein, 255 aa, Zea mays subsp. mays
  peptide (1)..(255): Ceres Seq. ID no. 12387586
  misc_feature (1)..(202): Pfam Name: Pfam Description:  Protein kinase domain
  misc_feature (1)..(255): NCBI GI NO: 34897534 NR Description: OSJNBa0042L16.4
  misc_feature (1)..(240): NCBI GI NO: 14194119 NR Description: At1g01540/F22L4_6 [Arabidopsis thaliana]
  misc_feature (1)..(240): NCBI GI NO: 15223428 NR Description: protein serine/threonine kinase, putative
  misc_feature (1)..(211): NCBI GI NO: 15234142 NR Description: putative protein kinase; protein id: At4g01330.1
  misc_feature (1)..(240): NCBI GI NO: 15235432 NR Description: putative serine/threonine protein kinase
  misc_feature (1)..(240): NCBI GI NO: 25518287 NR Description: hypothetical protein F22L4
  misc_feature (1)..(212): NCBI GI NO: 37536398 NR Description: putative receptor-like protein kinase
  misc_feature (1)..(239): NCBI GI NO: 37535714 NR Description: putative kinase
  misc_feature (1)..(217): NCBI GI NO: 30690058 NR Description: protein kinase family [Arabidopsis thaliana]
  misc_feature (1)..(210): NCBI GI NO: 7488207 NR Description: probable serine/threonine-specific protein kinase
MLVYEYVNNGNLEQWLHGDVGPVSPLTWDIRMKIILGTAKGLMYLHEGLEPKVVHRDVKSSNILLDKHWNAKLSDFGLAKLLGSERSYVTTRVMGTFGYVAPEYAGTGMLNETSDVYSFGILIMEIISGRVPVDYNRPPGEINLVEWLKTMVSNRNSEGVLDPKMTEKPTSRALKKALLVALRCVDPEARKRPKIGHVIHMLEVDDFPYRDERRGGKAPAQARSVETPPASEPGDSSGNNTPKDAPNGEPFKWRN

SEQ ID NO: 39146 - DNA, 1821 bp, Zea mays subsp. mays
  misc_feature (1)..(1821): Ceres Seq. ID no. 12375293
attaccgcctccgcaaccagcccgccgcgcccccgagcgtttcgttccgggagcggcaagactgggacacgccagccctttatttcgagctttctgcgtgcgggaggggggttgacaggcgatggcggccgagggcgaggcggcggcgctggagttcacaccgacgtggatcgtcgcggcggtctgctctctcatcgtgctcctctcgctcgtcgccgagcgatgcctccactacctcggcaagacgctcaagaggaagaaccagaagccgctcttcgaggcgctgctcaaggtcaaagaagagttgatgcttctggggttcatctccctgctgctgacggtgttccaggggatgatccggaggacgtgcatccctgaacgctggacattccacatgctgccatgcgagaagccagatgagaaggccggtgaggccgccaccatggagcattttgtagggacgcttggcaggatcggtaggcgtctgttgcaggaaggcactgctggggctgagcaatgccagaagaagggaaaagttccacttttgtcccttgaagccatacatcagctgcacattttcatatttgttctggcaatcacacatgttattttcagcgtcacaactatgcttttaggaggtgcacagatacaccaatggaaacagtgggagaatggaattaaaaaagatgctcctggaaatgggcctaaggtaaccaatgtacatcatcatgaatttatcaagaaacgttttaagggtattggcaaagattctataatattgagttggctgcattcttttggtaagcagttttatagatcagtatctaaatcagattacaccacaatgcgtcttggttttatcatgactcactgccctggaaatccaaaatttgatttccatagatacatggtaagggttttagaggcggattttaagaaagtggtaggcataagctggtacttgtgggtcttcgtggtgatatttctgttgctgaatgttaatggctgggcacacatacttttggattgctttccttccccttattcttctgttagccattggcactaagctggagcatgtcatagctcagctagcccatgatgtagctgagaagcacacagcggtcgagggcgatgtgatcgtaaaaccatcagatgaacacttctggttcggcaagcctagggttatcctttacctgatccacttcatcctctttcagaatgcgtttgagattgcgtttttcttctggatactgagcacttatggattcgactcgtgcatcatgggacaagttcgttttattgtgccaaggcttgtcatcggggtggttattcagcttctctgcagctacagcaccttgcctctgtatgcaattgtaacccagatggggagctgctacaagaaggagatcttcaacgagcatgtgcagcagggcgtcctgggctgggctcagaaggtcaagatgaaaaagggactgaagggagctgcatctgctagcaaggacgaatcgattaccaatgccgattcggcaggaccttccgttaagattgaaatggcgaaggctggggaggatgttgagatcgttggaaacacaggttgattgggacaatagggtgcccgtgttgtaatgatgtaacaggctaatatgccatcatcttttttttgtagatactagatagcttgctgtggcaataccgcaatagcggtgaactagagaaggtttgggcccgggagcctcatctgttatcggtccagtaggaagcaaattcttatatacgggatatcgataaaaaatgaactaagttcctggattcattacc

SEQ ID NO: 39147 - protein, 315 aa, Zea mays subsp. mays
  peptide (1)..(315): Ceres Seq. ID no. 12375294
  misc_feature (5)..(296): Pfam Name: Pfam Description:  Mlo family
  misc_feature (1)..(296): NCBI GI NO: 13784989 NR Description: seven transmembrane protein Mlo8 [Zea mays]
  misc_feature (1)..(296): NCBI GI NO: 34907492 NR Description: putative seven transmembrane protein
  misc_feature (1)..(296): NCBI GI NO: 15235429 NR Description: AtMlo-h1-like protein; protein id: At4g02600
  misc_feature (5)..(299): NCBI GI NO: 15224823 NR Description: similar to Mlo proteins from H
  misc_feature (3)..(296): NCBI GI NO: 18416311 NR Description: Mlo-like protein; protein id: At4g24250
  misc_feature (6)..(296): NCBI GI NO: 13784979 NR Description: seven transmembrane protein Mlo3 [Zea mays]
  misc_feature (5)..(296): NCBI GI NO: 13784987 NR Description: seven transmembrane protein Mlo7 [Zea mays]
  misc_feature (84)..(296): NCBI GI NO: 7487333 NR Description: hypothetical protein T22A6
  misc_feature (1)..(299): NCBI GI NO: 13784977 NR Description: seven transmembrane protein Mlo2 [Zea mays]
  misc_feature (121)..(301): NCBI GI NO: 13784985 NR Description: seven transmembrane protein Mlo6 [Zea mays]
MAAEGEAAALEFTPTWIVAAVCSLIVLLSLVAERCLHYLGKTLKRKNQKPLFEALLKVKEELMLLGFISLLLTVFQGMIRRTCIPERWTFHMLPCEKPDEKAGEAATMEHFVGTLGRIGRRLLQEGTAGAEQCQKKGKVPLLSLEAIHQLHIFIFVLAITHVIFSVTTMLLGGAQIHQWKQWENGIKKDAPGNGPKVTNVHHHEFIKKRFKGIGKDSIILSWLHSFGKQFYRSVSKSDYTTMRLGFIMTHCPGNPKFDFHRYMVRVLEADFKKVVGISWYLWVFVVIFLLLNVNGWAHILLDCFPSPYSSVSHWH

SEQ ID NO: 39148 - protein, 253 aa, Zea mays subsp. mays
  peptide (1)..(253): Ceres Seq. ID no. 12375295
  misc_feature (1)..(234): Pfam Name: Pfam Description:  Mlo family
  misc_feature (1)..(234): NCBI GI NO: 13784989 NR Description: seven transmembrane protein Mlo8 [Zea mays]
  misc_feature (1)..(234): NCBI GI NO: 34907492 NR Description: putative seven transmembrane protein
  misc_feature (1)..(234): NCBI GI NO: 15235429 NR Description: AtMlo-h1-like protein; protein id: At4g02600
  misc_feature (1)..(237): NCBI GI NO: 15224823 NR Description: similar to Mlo proteins from H
  misc_feature (1)..(234): NCBI GI NO: 18416311 NR Description: Mlo-like protein; protein id: At4g24250
  misc_feature (1)..(234): NCBI GI NO: 13784979 NR Description: seven transmembrane protein Mlo3 [Zea mays]
  misc_feature (1)..(234): NCBI GI NO: 13784987 NR Description: seven transmembrane protein Mlo7 [Zea mays]
  misc_feature (22)..(234): NCBI GI NO: 7487333 NR Description: hypothetical protein T22A6
  misc_feature (1)..(237): NCBI GI NO: 13784977 NR Description: seven transmembrane protein Mlo2 [Zea mays]
  misc_feature (59)..(239): NCBI GI NO: 13784985 NR Description: seven transmembrane protein Mlo6 [Zea mays]
MLLGFISLLLTVFQGMIRRTCIPERWTFHMLPCEKPDEKAGEAATMEHFVGTLGRIGRRLLQEGTAGAEQCQKKGKVPLLSLEAIHQLHIFIFVLAITHVIFSVTTMLLGGAQIHQWKQWENGIKKDAPGNGPKVTNVHHHEFIKKRFKGIGKDSIILSWLHSFGKQFYRSVSKSDYTTMRLGFIMTHCPGNPKFDFHRYMVRVLEADFKKVVGISWYLWVFVVIFLLLNVNGWAHILLDCFPSPYSSVSHWH

SEQ ID NO: 39149 - protein, 238 aa, Zea mays subsp. mays
  peptide (1)..(238): Ceres Seq. ID no. 12375296
  misc_feature (1)..(219): Pfam Name: Pfam Description:  Mlo family
  misc_feature (1)..(219): NCBI GI NO: 13784989 NR Description: seven transmembrane protein Mlo8 [Zea mays]
  misc_feature (1)..(219): NCBI GI NO: 34907492 NR Description: putative seven transmembrane protein
  misc_feature (1)..(219): NCBI GI NO: 15235429 NR Description: AtMlo-h1-like protein; protein id: At4g02600
  misc_feature (1)..(222): NCBI GI NO: 15224823 NR Description: similar to Mlo proteins from H
  misc_feature (1)..(219): NCBI GI NO: 18416311 NR Description: Mlo-like protein; protein id: At4g24250
  misc_feature (1)..(219): NCBI GI NO: 13784979 NR Description: seven transmembrane protein Mlo3 [Zea mays]
  misc_feature (1)..(219): NCBI GI NO: 13784987 NR Description: seven transmembrane protein Mlo7 [Zea mays]
  misc_feature (7)..(219): NCBI GI NO: 7487333 NR Description: hypothetical protein T22A6
  misc_feature (1)..(222): NCBI GI NO: 13784977 NR Description: seven transmembrane protein Mlo2 [Zea mays]
  misc_feature (44)..(224): NCBI GI NO: 13784985 NR Description: seven transmembrane protein Mlo6 [Zea mays]
MIRRTCIPERWTFHMLPCEKPDEKAGEAATMEHFVGTLGRIGRRLLQEGTAGAEQCQKKGKVPLLSLEAIHQLHIFIFVLAITHVIFSVTTMLLGGAQIHQWKQWENGIKKDAPGNGPKVTNVHHHEFIKKRFKGIGKDSIILSWLHSFGKQFYRSVSKSDYTTMRLGFIMTHCPGNPKFDFHRYMVRVLEADFKKVVGISWYLWVFVVIFLLLNVNGWAHILLDCFPSPYSSVSHWH

SEQ ID NO: 39150 - DNA, 2228 bp, Zea mays subsp. mays
  misc_feature (1)..(2228): Ceres Seq. ID no. 12377954
gcacgagaccattacctagaacatcctaatcgaaaaaccttcctccgttgcctcctcttccgcggccccgtcgatgggcttggctttaccagtggcgggttcccacacgggggctagacgccgccaccgctgaccccgtctacaccgaatcccccgcgcgatttaacccctcgcctcgctcgccgcctccgcttccatacaaccgcgcactccaaacgcgcacgcgctgttcgttcctcggccgctctgtccacccccgtccttctccgccctcaacagatctccgccggccgtgcggttccttaattcgccttctccgggactgtcggatctccgcggcggctggggatgggcaactgctgcgtgacgccgaaagcagccgacgacgccggcggcggcaagaagcccaaggagccgaagcagaagaagggtaagaagccgaaccccttctcgatcgattacaaccgctcggggccaggcgagcgcgccaaagctggtggtgctgcgggatcccacggggcgggacatcgcggcgcggtacgagctcggcgcggagctcgggcgcggcgagttcggggttacctacctctgcacagaccgtgcctcaggggaggcgctggcctgcaagtctatctccaagaagaagctccgcaccgccgtcgacctcgaggacgtgcgccgggaggtggagatcatgcgccacctccccaagcaccccaacgtcgtcacgctcagggacacgtacgaggacgacaatgccgtgcacctcgtcatggagctctgcgagggcggtgagctcttcgaccgcatcgtggcgcggggacactacactgagcgtgctgccgccttggtcttacgcactatcgttgaggtcgtgcagatgtgccataagcatggagtgatgcacagggatctcaaaccagaaaatttcttgtttgcaaacaagaaagaatcagcggcacttaaggccattgattttggcctgtctgtatttttcacaccaggcgaacggttttctgagattgttggaagtccttattacatggctccagaggtgctaaagagaaactatggcccagaggttgatgtttggagtgcaggagtgattctgtacattcttctttgtggtgtccccccattctgggcagaaacggaacagggtgttgctcaggcaatcattcgatctgtcattgatttcaaaagagatccatggccaagggtgtctgataatgccaaagaccttgtcagaggaatgctgaatccggacccaaaacgacgattgacagctcaccaagtgcttggtcacccatggttgcagaacattaagaaggctccaaatgtcaatttgggtgaaactgttaaggccagactccaacaattctctgtgatgaacaagttcaagaagcatgcacttagggttatagctgagcatctttcggtagaagaggctgctgacataaaggatatgtttgagaagatggatcttaacaaggatcaaatgcttagtttcgaggagctgaagcttggtctgcataagtttggtcaccagatgcctgatgcagatgttcaaacactaatggaagcggcggatgctgatggaaatggatccttgaattatggagaatttgttacattatttgttcatctaagaaagattggaaatgatgagcatctgcataaggcatttgcatacttcgaccggaaccagagtggttatattgaaattgatgaactccgtgagtcattagctgatgaccttggacaaaaccgtgaagagattatcaatgccatcatccgtgatgtagacaccgataaggatggcaagataagctacgatgagtttgcgacgatgatgaaggccggaacagactggaggaaagcatccagacagtactcgagagagcggttcaccagtctgagccttaagctgcaaaaggatggatcgctgcagatgacgagtacacggtagcccgataacaccataggcaagttgtgaattacagatggaaaccatgtgtagatttttctggttgtttgttgacagctcttctgcttgtcctgatgttccattgctttgtattcttcgcttgcggcctgtttgaaggattaggggggattgtttatgctatgattgtatttagactgcatgatccatgcctcgctcgtttccaaagtgtactgtacaaaagaaagaggagaaagggattatgaggctctgctcatttctt

SEQ ID NO: 39151 - protein, 424 aa, Zea mays subsp. mays
  peptide (1)..(424): Ceres Seq. ID no. 12377955
  misc_feature (1)..(207): Pfam Name: Pfam Description:  Protein kinase domain
  misc_feature (1)..(424): NCBI GI NO: 34899838 NR Description: putative calcium-dependent protein kinase
  misc_feature (1)..(420): NCBI GI NO: 15239742 NR Description: calcium-dependent protein kinase
  misc_feature (1)..(420): NCBI GI NO: 18416872 NR Description: calcium-dependent protein kinase-like protein
  misc_feature (1)..(419): NCBI GI NO: 2665890 NR Description: calcium-dependent protein kinase
  misc_feature (1)..(424): NCBI GI NO: 30694663 NR Description: calcium-dependent protein kinase, putative (CDPK)
  misc_feature (1)..(419): NCBI GI NO: 11259874 NR Description: calcium-dependent protein kinase
  misc_feature (1)..(419): NCBI GI NO: 15227452 NR Description: putative calcium-dependent protein kinase
  misc_feature (1)..(420): NCBI GI NO: 22331739 NR Description: calcium-dependent protein kinase
  misc_feature (1)..(420): NCBI GI NO: 17064926 NR Description: calcium-dependent protein kinase
  misc_feature (1)..(422): NCBI GI NO: 34907990 NR Description: putative calcium-dependent protein kinase
MRHLPKHPNVVTLRDTYEDDNAVHLVMELCEGGELFDRIVARGHYTERAAALVLRTIVEVVQMCHKHGVMHRDLKPENFLFANKKESAALKAIDFGLSVFFTPGERFSEIVGSPYYMAPEVLKRNYGPEVDVWSAGVILYILLCGVPPFWAETEQGVAQAIIRSVIDFKRDPWPRVSDNAKDLVRGMLNPDPKRRLTAHQVLGHPWLQNIKKAPNVNLGETVKARLQQFSVMNKFKKHALRVIAEHLSVEEAADIKDMFEKMDLNKDQMLSFEELKLGLHKFGHQMPDADVQTLMEAADADGNGSLNYGEFVTLFVHLRKIGNDEHLHKAFAYFDRNQSGYIEIDELRESLADDLGQNREEIINAIIRDVDTDKDGKISYDEFATMMKAGTDWRKASRQYSRERFTSLSLKLQKDGSLQMTSTR

SEQ ID NO: 39152 - protein, 398 aa, Zea mays subsp. mays
  peptide (1)..(398): Ceres Seq. ID no. 12377956
  misc_feature (1)..(181): Pfam Name: Pfam Description:  Protein kinase domain
  misc_feature (1)..(398): NCBI GI NO: 34899838 NR Description: putative calcium-dependent protein kinase
  misc_feature (1)..(394): NCBI GI NO: 15239742 NR Description: calcium-dependent protein kinase
  misc_feature (1)..(394): NCBI GI NO: 18416872 NR Description: calcium-dependent protein kinase-like protein
  misc_feature (1)..(393): NCBI GI NO: 2665890 NR Description: calcium-dependent protein kinase
  misc_feature (1)..(398): NCBI GI NO: 30694663 NR Description: calcium-dependent protein kinase, putative (CDPK)
  misc_feature (1)..(393): NCBI GI NO: 11259874 NR Description: calcium-dependent protein kinase
  misc_feature (1)..(393): NCBI GI NO: 15227452 NR Description: putative calcium-dependent protein kinase
  misc_feature (1)..(394): NCBI GI NO: 22331739 NR Description: calcium-dependent protein kinase
  misc_feature (1)..(394): NCBI GI NO: 17064926 NR Description: calcium-dependent protein kinase
  misc_feature (1)..(396): NCBI GI NO: 34907990 NR Description: putative calcium-dependent protein kinase
MELCEGGELFDRIVARGHYTERAAALVLRTIVEVVQMCHKHGVMHRDLKPENFLFANKKESAALKAIDFGLSVFFTPGERFSEIVGSPYYMAPEVLKRNYGPEVDVWSAGVILYILLCGVPPFWAETEQGVAQAIIRSVIDFKRDPWPRVSDNAKDLVRGMLNPDPKRRLTAHQVLGHPWLQNIKKAPNVNLGETVKARLQQFSVMNKFKKHALRVIAEHLSVEEAADIKDMFEKMDLNKDQMLSFEELKLGLHKFGHQMPDADVQTLMEAADADGNGSLNYGEFVTLFVHLRKIGNDEHLHKAFAYFDRNQSGYIEIDELRESLADDLGQNREEIINAIIRDVDTDKDGKISYDEFATMMKAGTDWRKASRQYSRERFTSLSLKLQKDGSLQMTSTR

SEQ ID NO: 39153 - protein, 362 aa, Zea mays subsp. mays
  peptide (1)..(362): Ceres Seq. ID no. 12377957
  misc_feature (1)..(145): Pfam Name: Pfam Description:  Protein kinase domain
  misc_feature (1)..(362): NCBI GI NO: 34899838 NR Description: putative calcium-dependent protein kinase
  misc_feature (1)..(358): NCBI GI NO: 15239742 NR Description: calcium-dependent protein kinase
  misc_feature (1)..(358): NCBI GI NO: 18416872 NR Description: calcium-dependent protein kinase-like protein
  misc_feature (1)..(357): NCBI GI NO: 2665890 NR Description: calcium-dependent protein kinase
  misc_feature (1)..(362): NCBI GI NO: 30694663 NR Description: calcium-dependent protein kinase, putative (CDPK)
  misc_feature (1)..(357): NCBI GI NO: 11259874 NR Description: calcium-dependent protein kinase
  misc_feature (1)..(357): NCBI GI NO: 15227452 NR Description: putative calcium-dependent protein kinase
  misc_feature (1)..(358): NCBI GI NO: 22331739 NR Description: calcium-dependent protein kinase
  misc_feature (1)..(358): NCBI GI NO: 17064926 NR Description: calcium-dependent protein kinase
  misc_feature (1)..(360): NCBI GI NO: 34907990 NR Description: putative calcium-dependent protein kinase
MCHKHGVMHRDLKPENFLFANKKESAALKAIDFGLSVFFTPGERFSEIVGSPYYMAPEVLKRNYGPEVDVWSAGVILYILLCGVPPFWAETEQGVAQAIIRSVIDFKRDPWPRVSDNAKDLVRGMLNPDPKRRLTAHQVLGHPWLQNIKKAPNVNLGETVKARLQQFSVMNKFKKHALRVIAEHLSVEEAADIKDMFEKMDLNKDQMLSFEELKLGLHKFGHQMPDADVQTLMEAADADGNGSLNYGEFVTLFVHLRKIGNDEHLHKAFAYFDRNQSGYIEIDELRESLADDLGQNREEIINAIIRDVDTDKDGKISYDEFATMMKAGTDWRKASRQYSRERFTSLSLKLQKDGSLQMTSTR

SEQ ID NO: 39154 - DNA, 2039 bp, Zea mays subsp. mays
  misc_feature (1)..(2039): Ceres Seq. ID no. 12375245
gcacgagaccattacctagaacatcctaatcgaaaaaaaaataggaaacgagcaaaggtctggcgagctacctaccaataaactaccatctccacaaacaggctagcacgtagctatatgccagaactgacctagtagaggatcgatcgcagatggtgtttcctgccatcctccccaaggtggccgcacgatggctcttcacgttctaccgcgccgccagaaagctcaggcgccacgccttccagctctactaccgcaacaccgccgccaagccgtcgtccgccgtctcgcagcagcaggccggggccgccgccactgtcactgccgccgccgccttcaagaccggcgccgccatccctgacgccggcggccggaccgttgtgtgcgacatgcacggcgccctgctgcgctccaccgcgctcttcccctacttcatgctcgtggcctgcgagggcggcagcctcgtccgcgccatgctgctgctctgcgccttccccctcgtctgggcgctcggggagcgccgcggcgccggcgtccgggtgatggcgttcgtcaccttcgcggggctcaggcccagggacgtggacctcgtggcccgcgccgtcctgcccaagcactacatggagcagctcagcgcgctggcgtacggcagcctctggctcccggccaggaggaaggtggcggtgaccagcgcgccgcgggtcatgtccgagtggttcctcaaggagtacatggccgccgacgcggtggtcgggctcgagctgcagcacgtcaacgtcggccgccgccggtacttcactgggttgctgctgtcgtccggtcacgcgacgggaacggagctgaggcagaaggcgatcacggaggcgttgttaggcgccgaggacgaccccattgccgtcgtgggcatcatcagcgactccagcccgctcgacgacgagctcttcgtcccctactgcaaggaactttacgtcgtgagcagagagagcgcaaagaacgacaagctctcgcgggagaaatacccaaagccgctcatcttccacgacgggcgcctcgccttcctccccacccccgccgccatgctcgccttcttcctcttccttccgctcggcgtcgtcctctccgtcatccgcattaacatcggtatcgttctcccttacaagatcaacttcgcgacagccgcgatcttcggcgtccgcttccgcgcctccggcctccgcgccccgccggcagacggcgagcggcggaggggcgtcctctacgtgtgcacgcaccggacgcttgtcgaccccatcatgctcaccacggcgctgcagaagcccgtgccggccttgacgtacagcctcagccgcctgtccgagctgatcgcgcccatcaagacggtgcggctgacgcgcgaccgcgcgcgggacgccgagaccatgtccaggctgctggcgcagggcgacctcgcggtctgccccgagggaaccacctgccgcgagccttacctcctgccttcagcccgctgttcgcggagctcgcggacgacatggagcccgtggcgctggacgctcaggtgacgacgctctacggcaccacggcgagcggacacaagtggctcgaccctgtggcgttcttcgccaacccggtgccctcgtaccgggtggagtttctgggtgccgtcccgcgggagtggacgcgcgccgggggcaggacaggcgtcgaggtggctaactgggtgcagcggcggctgggccaggctctggacttcgagtgcaccgggctgactcgccgcgacaagtacatgatgctcgccggtaacgatggcgtggtcgccaagtagagagagcgcccggcgcgcgctgcaacagctgggtgtgtttttattatgcatacatgctgagtaaattattgtcgaaagctagttactgtaatttgcatggcagtaatggatcttttggttccgctgtgtagagaaattttgattagctgcaaaactaatcaaatactagatgcttggatttaaattcaaatcaaaatagtatatatatattttgtct

SEQ ID NO: 39155 - protein, 468 aa, Zea mays subsp. mays
  peptide (1)..(468): Ceres Seq. ID no. 12375246
  misc_feature (75)..(447): NCBI GI NO: 21618047 NR Description: unknown [Arabidopsis thaliana]
  misc_feature (75)..(447): NCBI GI NO: 18390661 NR Description: expressed protein; protein id: At1g06520
  misc_feature (49)..(447): NCBI GI NO: 37534314 NR Description: hypothetical protein
  misc_feature (70)..(447): NCBI GI NO: 38000002 NR Description: unknown protein
  misc_feature (70)..(447): NCBI GI NO: 18378959 NR Description: expressed protein; protein id: At1g02390
  misc_feature (75)..(447): NCBI GI NO: 18481713 NR Description: hypothetical protein [Sorghum bicolor]
  misc_feature (73)..(447): NCBI GI NO: 34902820 NR Description: unnamed protein product
  misc_feature (68)..(447): NCBI GI NO: 15224445 NR Description: unknown protein; protein id: At2g38110
  misc_feature (97)..(447): NCBI GI NO: 29788867 NR Description: hypothetical protein
  misc_feature (70)..(447): NCBI GI NO: 15235185 NR Description: unknown protein; protein id: At4g01950
MVFPAILPKVAARWLFTFYRAARKLRRHAFQLYYRNTAAKPSSAVSQQQAGAAATVTAAAAFKTGAAIPDAGGRTVVCDMHGALLRSTALFPYFMLVACEGGSLVRAMLLLCAFPLVWALGERRGAGVRVMAFVTFAGLRPRDVDLVARAVLPKHYMEQLSALAYGSLWLPARRKVAVTSAPRVMSEWFLKEYMAADAVVGLELQHVNVGRRRYFTGLLLSSGHATGTELRQKAITEALLGAEDDPIAVVGIISDSSPLDDELFVPYCKELYVVSRESAKNDKLSREKYPKPLIFHDGRLAFLPTPAAMLAFFLFLPLGVVLSVIRINIGIVLPYKINFATAAIFGVRFRASGLRAPPADGERRRGVLYVCTHRTLVDPIMLTTALQKPVPALTYSLSRLSELIAPIKTVRLTRDRARDAETMSRLLAQGDLAVCPEGTTCREPYLLPSARCSRSSRTTWSPWRWTLR

SEQ ID NO: 39156 - protein, 389 aa, Zea mays subsp. mays
  peptide (1)..(389): Ceres Seq. ID no. 12375247
  misc_feature (1)..(368): NCBI GI NO: 21618047 NR Description: unknown [Arabidopsis thaliana]
  misc_feature (1)..(368): NCBI GI NO: 18390661 NR Description: expressed protein; protein id: At1g06520
  misc_feature (1)..(368): NCBI GI NO: 37534314 NR Description: hypothetical protein
  misc_feature (1)..(368): NCBI GI NO: 38000002 NR Description: unknown protein
  misc_feature (1)..(368): NCBI GI NO: 18378959 NR Description: expressed protein; protein id: At1g02390
  misc_feature (1)..(368): NCBI GI NO: 18481713 NR Description: hypothetical protein [Sorghum bicolor]
  misc_feature (1)..(368): NCBI GI NO: 34902820 NR Description: unnamed protein product
  misc_feature (1)..(368): NCBI GI NO: 15224445 NR Description: unknown protein; protein id: At2g38110
  misc_feature (18)..(368): NCBI GI NO: 29788867 NR Description: hypothetical protein
  misc_feature (1)..(368): NCBI GI NO: 15235185 NR Description: unknown protein; protein id: At4g01950
MHGALLRSTALFPYFMLVACEGGSLVRAMLLLCAFPLVWALGERRGAGVRVMAFVTFAGLRPRDVDLVARAVLPKHYMEQLSALAYGSLWLPARRKVAVTSAPRVMSEWFLKEYMAADAVVGLELQHVNVGRRRYFTGLLLSSGHATGTELRQKAITEALLGAEDDPIAVVGIISDSSPLDDELFVPYCKELYVVSRESAKNDKLSREKYPKPLIFHDGRLAFLPTPAAMLAFFLFLPLGVVLSVIRINIGIVLPYKINFATAAIFGVRFRASGLRAPPADGERRRGVLYVCTHRTLVDPIMLTTALQKPVPALTYSLSRLSELIAPIKTVRLTRDRARDAETMSRLLAQGDLAVCPEGTTCREPYLLPSARCSRSSRTTWSPWRWTLR

SEQ ID NO: 39157 - protein, 374 aa, Zea mays subsp. mays
  peptide (1)..(374): Ceres Seq. ID no. 12375248
  misc_feature (1)..(353): NCBI GI NO: 21618047 NR Description: unknown [Arabidopsis thaliana]
  misc_feature (1)..(353): NCBI GI NO: 18390661 NR Description: expressed protein; protein id: At1g06520
  misc_feature (1)..(353): NCBI GI NO: 37534314 NR Description: hypothetical protein
  misc_feature (1)..(353): NCBI GI NO: 38000002 NR Description: unknown protein
  misc_feature (1)..(353): NCBI GI NO: 18378959 NR Description: expressed protein; protein id: At1g02390
  misc_feature (1)..(353): NCBI GI NO: 18481713 NR Description: hypothetical protein [Sorghum bicolor]
  misc_feature (1)..(353): NCBI GI NO: 34902820 NR Description: unnamed protein product
  misc_feature (1)..(353): NCBI GI NO: 15224445 NR Description: unknown protein; protein id: At2g38110
  misc_feature (3)..(353): NCBI GI NO: 29788867 NR Description: hypothetical protein
  misc_feature (1)..(353): NCBI GI NO: 15235185 NR Description: unknown protein; protein id: At4g01950
MLVACEGGSLVRAMLLLCAFPLVWALGERRGAGVRVMAFVTFAGLRPRDVDLVARAVLPKHYMEQLSALAYGSLWLPARRKVAVTSAPRVMSEWFLKEYMAADAVVGLELQHVNVGRRRYFTGLLLSSGHATGTELRQKAITEALLGAEDDPIAVVGIISDSSPLDDELFVPYCKELYVVSRESAKNDKLSREKYPKPLIFHDGRLAFLPTPAAMLAFFLFLPLGVVLSVIRINIGIVLPYKINFATAAIFGVRFRASGLRAPPADGERRRGVLYVCTHRTLVDPIMLTTALQKPVPALTYSLSRLSELIAPIKTVRLTRDRARDAETMSRLLAQGDLAVCPEGTTCREPYLLPSARCSRSSRTTWSPWRWTLR

SEQ ID NO: 39158 - DNA, 2124 bp, Zea mays subsp. mays
  misc_feature (1)..(2124): Ceres Seq. ID no. 12417416
atccaacgacccacactgagacgtcccctccccgctccgtcctctctcctctgccgccgagacgacgcgatggcggggtccgccgccttgccgccgctcgccgccttcgcgtcgctccttaccgcgcggcgcttcgccgccgccaggtccaagctccggtccctgctcacgccgcgcctactggcggtgccgttcgcggacctcgccgcctcgtcgctcccgcgcggcgcgccgccgcacgccgtggcggcgttccacgacatgctcttccgcgcgtacgcggacgcgggcgcggcgtgccgcgcggccgaggcgctcgacgccgccgtgtcccgcctcggcagcctcgacccgcgctcgctcacgttctcgctgctctcgctccgccgcgccgggcgcctcgcggacgccgcgggcctcctggagcgggcgctcggctcgtgcccgggctccgtctcgccgttcgccgcgtccgtcgtcgtcgacgggctctgcaagtcggggcgcgtggacgacgcgcgccggctgctcgacgatatgcctcgccacggcgtgagtctgaatgcgctgtgctacaactcgctgcttgactgttacgtgcgacaaaaggatgacgggcgggtccaggagattctagagatcatggagaacgaaggcatcgaggcgacggtcgggacgtatacgatccttgtggatagtttgtcgaccgccagggacatcagcaaggtcgaggctctgtttaatgagatgaaggcgaataatgttgtgggggatgtgtacctgtacaccgctgtcatcaacgcgtattgccgagcagggaacatgcggagggccgccaaggttttggatgaatgcgttggcaatggcgttgagccaaacgagcgtacatatggtgtattgatcaaagggttctgcaagattgggcagatggaggctgcagagatgttgctggcagacatgcaagggcaaggtgtagggcttaaccaaatcattttcaataccatgattgatggctattgtcgcaaagggatggtggacgatgctcttaaaataaaggcggccatggagaaaattggcgtcgaactgaacatctacacatacaacacactggcctgtggactgtgcagggtgaatagattggatgaggcaaagactctattgcacatcatgatcgagatgggtgtcgtgccaaattacgtcacttacactacactgatcagcatacactgcaaggatggcgacatggtggaggctagaaggctgttccgagaaatggcagagaaaggggcgacgcccagtgttgtgacctacagtgttatgattcatgggtacgccaagaaggggaggatccgtgaggctgagaggttcagaaagcagatggagaagaaagggtttgttccagatgtatacacctatgcatcgctagttcatgggcactgtgtcaatgggaaggtggatgtggcgctgaagctattcgaagagatgaagcagaggggaacggaacctaatgtcgtggcctatacggctctgatatcaggtctggcgaaggaagggagatcagaggcggcgttccagctgtatgatgatatgctgaaagctggattgatcccagatgactccctatattctgcccttgtaggaagccttcacacagataaccggaaagatgttaaggtttcttaggcagcttcgcttttaagggaaagcaacctaagtttttgtaagttaccctgtagcaactgaagaggtcggaagtccagaattaactccataatgttattcagtttacaaggtgggatggagtactagactgttgcatttcagttaaatgacataaggagatctcagctagctgtgatgaagcagcaaagttgcagaaatgattacatgctgacgtgcaatattacatggccacctccagattccaattcctcattgggtaacaaattttatttttgttttaagcatgtttagaacactggaacaagaggaggctgtgcagattttatttcaagattaagtttgtaatagtagtattagtagtcatggaattgttacaaaacaagcagttcttgtacattactcttgaaattgctcactgttatagagatatttgcacttggc

SEQ ID NO: 39159 - protein, 560 aa, Zea mays subsp. mays
  peptide (1)..(560): Ceres Seq. ID no. 12417417
  misc_feature (470)..(504): Pfam Name: Pfam Description:  PPR repeat
  misc_feature (23)..(558): NCBI GI NO: 22831126 NR Description: putative crp1
  misc_feature (39)..(551): NCBI GI NO: 15225722 NR Description: putative salt-inducible protein
  misc_feature (86)..(546): NCBI GI NO: 11994279 NR Description: gb|AAD43616
  misc_feature (86)..(546): NCBI GI NO: 15228763 NR Description: hypothetical protein; protein id: At3g22470.1
  misc_feature (86)..(560): NCBI GI NO: 15242446 NR Description: putative protein; protein id: At5g39710.1
  misc_feature (80)..(546): NCBI GI NO: 15242446 NR Description: putative protein; protein id: At5g39710.1
  misc_feature (2)..(556): NCBI GI NO: 34394343 NR Description: putative fertility restorer homologue
  misc_feature (141)..(548): NCBI GI NO: 15242446 NR Description: putative protein; protein id: At5g39710.1
  misc_feature (130)..(549): NCBI GI NO: 15218325 NR Description: hypothetical protein; protein id: At1g09900.1
  misc_feature (42)..(556): NCBI GI NO: 34902570 NR Description: Putative indole-3-acetate beta-glucosyltransferase
IQRPTLRRPLPAPSSLLCRRDDAMAGSAALPPLAAFASLLTARRFAAARSKLRSLLTPRLLAVPFADLAASSLPRGAPPHAVAAFHDMLFRAYADAGAACRAAEALDAAVSRLGSLDPRSLTFSLLSLRRAGRLADAAGLLERALGSCPGSVSPFAASVVVDGLCKSGRVDDARRLLDDMPRHGVSLNALCYNSLLDCYVRQKDDGRVQEILEIMENEGIEATVGTYTILVDSLSTARDISKVEALFNEMKANNVVGDVYLYTAVINAYCRAGNMRRAAKVLDECVGNGVEPNERTYGVLIKGFCKIGQMEAAEMLLADMQGQGVGLNQIIFNTMIDGYCRKGMVDDALKIKAAMEKIGVELNIYTYNTLACGLCRVNRLDEAKTLLHIMIEMGVVPNYVTYTTLISIHCKDGDMVEARRLFREMAEKGATPSVVTYSVMIHGYAKKGRIREAERFRKQMEKKGFVPDVYTYASLVHGHCVNGKVDVALKLFEEMKQRGTEPNVVAYTALISGLAKEGRSEAAFQLYDDMLKAGLIPDDSLYSALVGSLHTDNRKDVKVS

SEQ ID NO: 39160 - protein, 537 aa, Zea mays subsp. mays
  peptide (1)..(537): Ceres Seq. ID no. 12417418
  misc_feature (447)..(481): Pfam Name: Pfam Description:  PPR repeat
  misc_feature (1)..(535): NCBI GI NO: 22831126 NR Description: putative crp1
  misc_feature (16)..(528): NCBI GI NO: 15225722 NR Description: putative salt-inducible protein
  misc_feature (63)..(523): NCBI GI NO: 11994279 NR Description: gb|AAD43616
  misc_feature (63)..(523): NCBI GI NO: 15228763 NR Description: hypothetical protein; protein id: At3g22470.1
  misc_feature (63)..(537): NCBI GI NO: 15242446 NR Description: putative protein; protein id: At5g39710.1
  misc_feature (57)..(523): NCBI GI NO: 15242446 NR Description: putative protein; protein id: At5g39710.1
  misc_feature (1)..(533): NCBI GI NO: 34394343 NR Description: putative fertility restorer homologue
  misc_feature (118)..(525): NCBI GI NO: 15242446 NR Description: putative protein; protein id: At5g39710.1
  misc_feature (107)..(526): NCBI GI NO: 15218325 NR Description: hypothetical protein; protein id: At1g09900.1
  misc_feature (19)..(533): NCBI GI NO: 34902570 NR Description: Putative indole-3-acetate beta-glucosyltransferase
MAGSAALPPLAAFASLLTARRFAAARSKLRSLLTPRLLAVPFADLAASSLPRGAPPHAVAAFHDMLFRAYADAGAACRAAEALDAAVSRLGSLDPRSLTFSLLSLRRAGRLADAAGLLERALGSCPGSVSPFAASVVVDGLCKSGRVDDARRLLDDMPRHGVSLNALCYNSLLDCYVRQKDDGRVQEILEIMENEGIEATVGTYTILVDSLSTARDISKVEALFNEMKANNVVGDVYLYTAVINAYCRAGNMRRAAKVLDECVGNGVEPNERTYGVLIKGFCKIGQMEAAEMLLADMQGQGVGLNQIIFNTMIDGYCRKGMVDDALKIKAAMEKIGVELNIYTYNTLACGLCRVNRLDEAKTLLHIMIEMGVVPNYVTYTTLISIHCKDGDMVEARRLFREMAEKGATPSVVTYSVMIHGYAKKGRIREAERFRKQMEKKGFVPDVYTYASLVHGHCVNGKVDVALKLFEEMKQRGTEPNVVAYTALISGLAKEGRSEAAFQLYDDMLKAGLIPDDSLYSALVGSLHTDNRKDVKVS

SEQ ID NO: 39161 - protein, 473 aa, Zea mays subsp. mays
  peptide (1)..(473): Ceres Seq. ID no. 12417419
  misc_feature (383)..(417): Pfam Name: Pfam Description:  PPR repeat
  misc_feature (1)..(471): NCBI GI NO: 22831126 NR Description: putative crp1
  misc_feature (1)..(464): NCBI GI NO: 15225722 NR Description: putative salt-inducible protein
  misc_feature (1)..(459): NCBI GI NO: 11994279 NR Description: gb|AAD43616
  misc_feature (1)..(459): NCBI GI NO: 15228763 NR Description: hypothetical protein; protein id: At3g22470.1
  misc_feature (1)..(473): NCBI GI NO: 15242446 NR Description: putative protein; protein id: At5g39710.1
  misc_feature (1)..(459): NCBI GI NO: 15242446 NR Description: putative protein; protein id: At5g39710.1
  misc_feature (1)..(469): NCBI GI NO: 34394343 NR Description: putative fertility restorer homologue
  misc_feature (54)..(461): NCBI GI NO: 15242446 NR Description: putative protein; protein id: At5g39710.1
  misc_feature (43)..(462): NCBI GI NO: 15218325 NR Description: hypothetical protein; protein id: At1g09900.1
  misc_feature (1)..(469): NCBI GI NO: 34902570 NR Description: Putative indole-3-acetate beta-glucosyltransferase
MLFRAYADAGAACRAAEALDAAVSRLGSLDPRSLTFSLLSLRRAGRLADAAGLLERALGSCPGSVSPFAASVVVDGLCKSGRVDDARRLLDDMPRHGVSLNALCYNSLLDCYVRQKDDGRVQEILEIMENEGIEATVGTYTILVDSLSTARDISKVEALFNEMKANNVVGDVYLYTAVINAYCRAGNMRRAAKVLDECVGNGVEPNERTYGVLIKGFCKIGQMEAAEMLLADMQGQGVGLNQIIFNTMIDGYCRKGMVDDALKIKAAMEKIGVELNIYTYNTLACGLCRVNRLDEAKTLLHIMIEMGVVPNYVTYTTLISIHCKDGDMVEARRLFREMAEKGATPSVVTYSVMIHGYAKKGRIREAERFRKQMEKKGFVPDVYTYASLVHGHCVNGKVDVALKLFEEMKQRGTEPNVVAYTALISGLAKEGRSEAAFQLYDDMLKAGLIPDDSLYSALVGSLHTDNRKDVKVS

SEQ ID NO: 39162 - DNA, 2085 bp, Zea mays subsp. mays
  misc_feature (1)..(2085): Ceres Seq. ID no. 12382290
  misc_feature (1171)..(1171): n is a, c, t, g, unknown, or other
  misc_feature (1215)..(1215): n is a, c, t, g, unknown, or other
gcacgagaccattacctagaacatcctaatcgaaatatcctccctccatcagttctcgtcctgttctttgctacgtacggctctgtgcctagctagcaatagcatagcaatgagggcgcttggaacggttgcttgggcatggctgctgctcctgcagcagctcgccggggcctctcatgtcgtctacgagaaccttgaggtggaggcgacgacagccgccgtgcggccctccattgtcgaccccctgctgaggaccgggtaccatttccagcctcgcaagaactggatcaatgatcccaacgctccactgtactacaaggggtggtaccatctcttctaccaatacaacccgaagggcgcggtgtggggcaacatcgtgtggggccactcggtgtcgcgagacctgatcaactgggtggccctgcaaccggcgatcgagccgagcatcccgtccgacaggtacgggtgctggtctgggtcggcgacgacgctggccgacggcacgccggcgatcatgtacacgggcgtgaaccggccggacgtgaactaccaggtgcagaacgtggcgtacccgcggaacaggtcggacccgctgctgcgggagtgggtgaagccgtcgcacaaccccatcatcgtgcccgggggcggcatcaacgcgacgcagttccgggacccgaccacggcctggcgcggcgcgggagacggccgctggcgcctgctcatcggcagcgtcaccgaggcgcgccacggcgtggcgtacgtgtaccggagccgcgacttcaggcgctggacgcgggcgcggcggccgctccactcggcggccacggggatgtgggagtgccccgacttctacccggtcggcgcgcccggccggcgcgcgggcgtcgagacggagacgtcggcggcgtccgacggcgacggcggctctcctcgtcgtcgtgagcagtccaagtacgtgctgaagaacagcctcgacctgcggcggtacgactactacaccgtcggcacgtacgaccgggcggccgagcggtacgtgccggacgaccccgcgggagacgagcgccacctgcggtacgactacggcaacttctacgcgtccaagacgttcttcgaccccgtgaagcggcggcgggtgctctggggctgggccaacgagtccgacaccgccgcngacgacgtggccaaagggtgggctgggatccaggcgattcctangacggtgtggctagaccccagcgggaagcagctgctgcagtggccaatcgaggaggtggaggctctgagaggcaggtcggtcgctctcaagaacagggtgatcaagccaggacagcacgtcgaggtcaccgggatacaaacggcacaggccgacgtggaggtgagcttcgaggtgtcgagcctggcgggcgccgaggcgctgctggacccggcgctggccagcgacgcgcagcggctgtgcggcgccaggggcgcggccgtggagggcggcgtgggcccgttcgggctgtgggtgctcgcctccggcgaccgcgaggagaggaccgccgtgttcttcagggtgtttcgcggcggcggcggccacgacgacaagcccgtggtgctcatgtgcaccgaccccaccaagtcatctctggacgcgaacctgtaccagccgacgttcgcaggttttgtcgacacagacatttcgaacgggaagatatctctcagaactctgatcgaccggtcggtggtggagagctttggaggcgggggcaggacctgcatcctgtcgagggtgtacccgtcgctcgccatcggcagcaaggctcgcctctacgtgttcaacaacgggagggcggacgtcagggtgtcccgtctcaccgcgtgggagatgaagaagccactcatgaacggcgcttgaaatgtttttattgcgtgatatggaatggtgctcgcctttgtacaatatggtatggctagatacatatatatgagagcttccacgctcggtcgtcgtgtggaaaaaacctatgatgagtgtgtacgatcttagggatgttcgattcagatgccactaggggcaataactatattctaattcatgatttc

SEQ ID NO: 39163 - protein, 595 aa, Zea mays subsp. mays
  peptide (1)..(595): Ceres Seq. ID no. 12382291
  misc_feature (52)..(547): Pfam Name: Pfam Description:  Glycosyl hydrolases family 32
  misc_feature (1)..(595): NCBI GI NO: 4105719 NR Description: cell wall invertase Incw2; beta-fructosidase
  misc_feature (1)..(595): NCBI GI NO: 7435479 NR Description: beta-fructofuranosidase (EC 3
  misc_feature (1)..(595): NCBI GI NO: 6318659 NR Description: cell wall invertase 2 [Zea mays]
  misc_feature (1)..(595): NCBI GI NO: 6318661 NR Description: cell wall invertase 2 [Zea mays]
  misc_feature (10)..(595): NCBI GI NO: 6318663 NR Description: cell wall invertase [Zea mays]
  misc_feature (45)..(595): NCBI GI NO: 26986190 NR Description: apoplastic invertase 1
  misc_feature (12)..(595): NCBI GI NO: 4105721 NR Description: cell wall invertase Incw1; beta-fructosidase
  misc_feature (2)..(595): NCBI GI NO: 1352469 NR Description: BETA-FRUCTOFURANOSIDASE
  misc_feature (11)..(595): NCBI GI NO: 27802647 NR Description: cell wall invertase [Musa acuminata]
  misc_feature (1)..(593): NCBI GI NO: 4105123 NR Description: cell wall invertase
  misc_feature (354)..(354): Xaa is any aa, unknown or other
  misc_feature (369)..(369): Xaa is any aa, unknown or other
MRALGTVAWAWLLLLQQLAGASHVVYENLEVEATTAAVRPSIVDPLLRTGYHFQPRKNWINDPNAPLYYKGWYHLFYQYNPKGAVWGNIVWGHSVSRDLINWVALQPAIEPSIPSDRYGCWSGSATTLADGTPAIMYTGVNRPDVNYQVQNVAYPRNRSDPLLREWVKPSHNPIIVPGGGINATQFRDPTTAWRGAGDGRWRLLIGSVTEARHGVAYVYRSRDFRRWTRARRPLHSAATGMWECPDFYPVGAPGRRAGVETETSAASDGDGGSPRRREQSKYVLKNSLDLRRYDYYTVGTYDRAAERYVPDDPAGDERHLRYDYGNFYASKTFFDPVKRRRVLWGWANESDTAXDDVAKGWAGIQAIPXTVWLDPSGKQLLQWPIEEVEALRGRSVALKNRVIKPGQHVEVTGIQTAQADVEVSFEVSSLAGAEALLDPALASDAQRLCGARGAAVEGGVGPFGLWVLASGDREERTAVFFRVFRGGGGHDDKPVVLMCTDPTKSSLDANLYQPTFAGFVDTDISNGKISLRTLIDRSVVESFGGGGRTCILSRVYPSLAIGSKARLYVFNNGRADVRVSRLTAWEMKKPLMNGA

SEQ ID NO: 39164 - protein, 460 aa, Zea mays subsp. mays
  peptide (1)..(460): Ceres Seq. ID no. 12382292
  misc_feature (1)..(412): Pfam Name: Pfam Description:  Glycosyl hydrolases family 32
  misc_feature (1)..(460): NCBI GI NO: 4105719 NR Description: cell wall invertase Incw2; beta-fructosidase
  misc_feature (1)..(460): NCBI GI NO: 7435479 NR Description: beta-fructofuranosidase (EC 3
  misc_feature (1)..(460): NCBI GI NO: 6318659 NR Description: cell wall invertase 2 [Zea mays]
  misc_feature (1)..(460): NCBI GI NO: 6318661 NR Description: cell wall invertase 2 [Zea mays]
  misc_feature (1)..(460): NCBI GI NO: 6318663 NR Description: cell wall invertase [Zea mays]
  misc_feature (1)..(460): NCBI GI NO: 26986190 NR Description: apoplastic invertase 1
  misc_feature (1)..(460): NCBI GI NO: 4105721 NR Description: cell wall invertase Incw1; beta-fructosidase
  misc_feature (1)..(460): NCBI GI NO: 1352469 NR Description: BETA-FRUCTOFURANOSIDASE
  misc_feature (1)..(460): NCBI GI NO: 27802647 NR Description: cell wall invertase [Musa acuminata]
  misc_feature (1)..(458): NCBI GI NO: 4105123 NR Description: cell wall invertase
  misc_feature (219)..(219): Xaa is any aa, unknown or other
  misc_feature (234)..(234): Xaa is any aa, unknown or other
MYTGVNRPDVNYQVQNVAYPRNRSDPLLREWVKPSHNPIIVPGGGINATQFRDPTTAWRGAGDGRWRLLIGSVTEARHGVAYVYRSRDFRRWTRARRPLHSAATGMWECPDFYPVGAPGRRAGVETETSAASDGDGGSPRRREQSKYVLKNSLDLRRYDYYTVGTYDRAAERYVPDDPAGDERHLRYDYGNFYASKTFFDPVKRRRVLWGWANESDTAXDDVAKGWAGIQAIPXTVWLDPSGKQLLQWPIEEVEALRGRSVALKNRVIKPGQHVEVTGIQTAQADVEVSFEVSSLAGAEALLDPALASDAQRLCGARGAAVEGGVGPFGLWVLASGDREERTAVFFRVFRGGGGHDDKPVVLMCTDPTKSSLDANLYQPTFAGFVDTDISNGKISLRTLIDRSVVESFGGGGRTCILSRVYPSLAIGSKARLYVFNNGRADVRVSRLTAWEMKKPLMNGA

SEQ ID NO: 39165 - protein, 355 aa, Zea mays subsp. mays
  peptide (1)..(355): Ceres Seq. ID no. 12382293
  misc_feature (1)..(307): Pfam Name: Pfam Description:  Glycosyl hydrolases family 32
  misc_feature (1)..(355): NCBI GI NO: 4105719 NR Description: cell wall invertase Incw2; beta-fructosidase
  misc_feature (1)..(355): NCBI GI NO: 7435479 NR Description: beta-fructofuranosidase (EC 3
  misc_feature (1)..(355): NCBI GI NO: 6318659 NR Description: cell wall invertase 2 [Zea mays]
  misc_feature (1)..(355): NCBI GI NO: 6318661 NR Description: cell wall invertase 2 [Zea mays]
  misc_feature (1)..(355): NCBI GI NO: 6318663 NR Description: cell wall invertase [Zea mays]
  misc_feature (1)..(355): NCBI GI NO: 26986190 NR Description: apoplastic invertase 1
  misc_feature (1)..(355): NCBI GI NO: 4105721 NR Description: cell wall invertase Incw1; beta-fructosidase
  misc_feature (1)..(355): NCBI GI NO: 1352469 NR Description: BETA-FRUCTOFURANOSIDASE
  misc_feature (1)..(355): NCBI GI NO: 27802647 NR Description: cell wall invertase [Musa acuminata]
  misc_feature (1)..(353): NCBI GI NO: 4105123 NR Description: cell wall invertase
  misc_feature (114)..(114): Xaa is any aa, unknown or other
  misc_feature (129)..(129): Xaa is any aa, unknown or other
MWECPDFYPVGAPGRRAGVETETSAASDGDGGSPRRREQSKYVLKNSLDLRRYDYYTVGTYDRAAERYVPDDPAGDERHLRYDYGNFYASKTFFDPVKRRRVLWGWANESDTAXDDVAKGWAGIQAIPXTVWLDPSGKQLLQWPIEEVEALRGRSVALKNRVIKPGQHVEVTGIQTAQADVEVSFEVSSLAGAEALLDPALASDAQRLCGARGAAVEGGVGPFGLWVLASGDREERTAVFFRVFRGGGGHDDKPVVLMCTDPTKSSLDANLYQPTFAGFVDTDISNGKISLRTLIDRSVVESFGGGGRTCILSRVYPSLAIGSKARLYVFNNGRADVRVSRLTAWEMKKPLMNGA

SEQ ID NO: 39166 - DNA, 2498 bp, Zea mays subsp. mays
  misc_feature (1)..(2498): Ceres Seq. ID no. 12360983
gcacgagaccattacctagaacatcctaatcgaaaaaaactgccttttcttccggcttccaacttccaagtggcgactgctgccgactgccgggtgcgagaagagggagagatcagagtatcagacaagctgttgtccgaatccactccggcgaggacgagtgctgaggtcgaaatggggagaggagcggatgaggtggtgaaggtcgtggattcggaggacggcgagggggaggaggaagaggcagaggccgcggcggcggaggggtcgagcaaggagacgccgatgctgccaaggatgccggtgcgcgtgctactcgccgagggcgacgactccacgcgccacgtcatctccgcgctgctacgcaagtgcggctaccgagttgctgcagcctctgatggtgtgaaggcgtgggacatattaaaagaaaaatctttcaacatagaccttgttttaactgaagttgaactgcctttgatgtctgggttcctcttgttatccacgatcatggagcatgatgcatccaagaacatccctgttataatgatgtcttcacacgactctgtaagcatggttttcaaatgcatgctaaagggtgcagcagatttccttgttaagccgctaagaaagaacgaattaaggaacttgtggcagcacgtttggagaaaacaactggcaaacggtgggcccgatgtgcagcacatacaagaagagaatcttgcagaaagaatggaacagaagactggcgtgacaaaagctgataatttgaacagcgatggtccccgtaaaaatagagaatgcagtgaacaagaaagtgatgctcaaagttcttgcacaaggtcagagttggaggctgaaagtaagcaaactaacaacattttggagtatatgcaatcaactgaaaggcatttgtctattcgtagccacaaggatttagagctaaatggagagaccaaaacacgaactaagggtaataacttgattccaacaagagaagacgatttatcgccaaagaaaagaacatgtttgaatgacaataattctgagagaacttccagagatatggagctagtccacattatggacaatcagcagaagcatgacacacagagggatgtggatactatgagaacaacatccaggggaaatgatgagaactccatcccagcacaccagttggaactttctcttagaagaactgactatggaaaattagagaaccacgagaaaaatgatagaagaacactgaaccattcaacttcatctgcattttacttgtataattgcaggactgcgtccagcttagtaaatgctggtgatggtcaattatgcagcacctcagaaacactagtggatgttgaaaatagaaatggagatttggcagctctgtctgaagacacgactgaaacaaatcgtcctcctatcagagttgtaccatttcctgtccctgttcaatgcttcacatttgatgggcagccgttctggaatggtacaccggtggcatctccattctacccacagtcagctccccccatttggaatatcaaaacaccaacgtggcaagaatcaactccacaagcaacttcactgccgcaaaaatcgcaacagaatgaaccaattgaaatggatgctaaaccagttgaaaatgcagaggaacaatttgtcgtaggtcctcccagtgccagtgggaagcagctgcatgttgaaattcccaaagatgatctacggcatatttctcctgtgaccggtgaaagtggaatcagtacggtgctagacagcaccagaaatactctgagcagcagtggctgtgatagcacttccaaccagatcaccgcctctactgaaccatcatccaatgtatacaggggcgttcctgaaaccgcaagagccgaaggtttacgacacctgagccagcgtgaggctgcactgaacaagttccggctaaagaggaaggacaggtgctttgagaagaaggttcggtaccagagccggaaattactcgcagagcagcgtccacgggtcaagggccagtttgtccgtcaagatcatagcatccaaggaagctagggtccagttactgagctggaactctttcccattatctaaaaaaaaagtcactgtaagtgactccactgctgggtatcctgatgtcaggttttttcgaagagttagaagcaatcagaccgaagttacggtttgctgtgtatgtttgttaaagcttgtaatatatgtatgtataggctgactctgttctttccttaggttaggcacaggacctggcacgttctagacggtttgtcggtagacgttagaaaatacaggcatacttgtgtcctttagtagcacgtgtgctttaagccttgtattatgtaactagccaagttgtttttgatgtttcggattagatgtacactgtggatgtatggcgtgaaggatgtccaccaaagtatgctcgtttctgtgcagcttgttgcaatgaacattgttggcctggtttt

SEQ ID NO: 39167 - protein, 688 aa, Zea mays subsp. mays
  peptide (1)..(688): Ceres Seq. ID no. 12360984
  misc_feature (102)..(224): Pfam Name: Pfam Description:  Response regulator receiver domain
  misc_feature (66)..(287): NCBI GI NO: 9758535 NR Description: contains similarity to two-component responseregulator protein~gene_id:T31K7
  misc_feature (66)..(287): NCBI GI NO: 18420797 NR Description: putative protein; protein id: At5g24470
  misc_feature (638)..(686): NCBI GI NO: 9758535 NR Description: contains similarity to two-component responseregulator protein~gene_id:T31K7
  misc_feature (638)..(686): NCBI GI NO: 18420797 NR Description: putative protein; protein id: At5g24470
  misc_feature (65)..(259): NCBI GI NO: 18407171 NR Description: expressed protein; protein id: At2g46790
  misc_feature (521)..(684): NCBI GI NO: 18407171 NR Description: expressed protein; protein id: At2g46790
  misc_feature (97)..(447): NCBI GI NO: 18424319 NR Description: pseudo-response regulator - like
  misc_feature (596)..(688): NCBI GI NO: 18424319 NR Description: pseudo-response regulator - like
  misc_feature (65)..(259): NCBI GI NO: 7485762 NR Description: hypothetical protein At2g46790
  misc_feature (521)..(660): NCBI GI NO: 7485762 NR Description: hypothetical protein At2g46790
ARDHYLEHPNRKKLPFLPASNFQVATAADCRVREEGEIRVSDKLLSESTPARTSAEVEMGRGADEVVKVVDSEDGEGEEEEAEAAAAEGSSKETPMLPRMPVRVLLAEGDDSTRHVISALLRKCGYRVAAASDGVKAWDILKEKSFNIDLVLTEVELPLMSGFLLLSTIMEHDASKNIPVIMMSSHDSVSMVFKCMLKGAADFLVKPLRKNELRNLWQHVWRKQLANGGPDVQHIQEENLAERMEQKTGVTKADNLNSDGPRKNRECSEQESDAQSSCTRSELEAESKQTNNILEYMQSTERHLSIRSHKDLELNGETKTRTKGNNLIPTREDDLSPKKRTCLNDNNSERTSRDMELVHIMDNQQKHDTQRDVDTMRTTSRGNDENSIPAHQLELSLRRTDYGKLENHEKNDRRTLNHSTSSAFYLYNCRTASSLVNAGDGQLCSTSETLVDVENRNGDLAALSEDTTETNRPPIRVVPFPVPVQCFTFDGQPFWNGTPVASPFYPQSAPPIWNIKTPTWQESTPQATSLPQKSQQNEPIEMDAKPVENAEEQFVVGPPSASGKQLHVEIPKDDLRHISPVTGESGISTVLDSTRNTLSSSGCDSTSNQITASTEPSSNVYRGVPETARAEGLRHLSQREAALNKFRLKRKDRCFEKKVRYQSRKLLAEQRPRVKGQFVRQDHSIQGS

SEQ ID NO: 39168 - protein, 630 aa, Zea mays subsp. mays
  peptide (1)..(630): Ceres Seq. ID no. 12360985
  misc_feature (44)..(166): Pfam Name: Pfam Description:  Response regulator receiver domain
  misc_feature (8)..(229): NCBI GI NO: 9758535 NR Description: contains similarity to two-component responseregulator protein~gene_id:T31K7
  misc_feature (8)..(229): NCBI GI NO: 18420797 NR Description: putative protein; protein id: At5g24470
  misc_feature (580)..(628): NCBI GI NO: 9758535 NR Description: contains similarity to two-component responseregulator protein~gene_id:T31K7
  misc_feature (580)..(628): NCBI GI NO: 18420797 NR Description: putative protein; protein id: At5g24470
  misc_feature (7)..(201): NCBI GI NO: 18407171 NR Description: expressed protein; protein id: At2g46790
  misc_feature (463)..(626): NCBI GI NO: 18407171 NR Description: expressed protein; protein id: At2g46790
  misc_feature (39)..(389): NCBI GI NO: 18424319 NR Description: pseudo-response regulator - like
  misc_feature (538)..(630): NCBI GI NO: 18424319 NR Description: pseudo-response regulator - like
  misc_feature (7)..(201): NCBI GI NO: 7485762 NR Description: hypothetical protein At2g46790
  misc_feature (463)..(602): NCBI GI NO: 7485762 NR Description: hypothetical protein At2g46790
MGRGADEVVKVVDSEDGEGEEEEAEAAAAEGSSKETPMLPRMPVRVLLAEGDDSTRHVISALLRKCGYRVAAASDGVKAWDILKEKSFNIDLVLTEVELPLMSGFLLLSTIMEHDASKNIPVIMMSSHDSVSMVFKCMLKGAADFLVKPLRKNELRNLWQHVWRKQLANGGPDVQHIQEENLAERMEQKTGVTKADNLNSDGPRKNRECSEQESDAQSSCTRSELEAESKQTNNILEYMQSTERHLSIRSHKDLELNGETKTRTKGNNLIPTREDDLSPKKRTCLNDNNSERTSRDMELVHIMDNQQKHDTQRDVDTMRTTSRGNDENSIPAHQLELSLRRTDYGKLENHEKNDRRTLNHSTSSAFYLYNCRTASSLVNAGDGQLCSTSETLVDVENRNGDLAALSEDTTETNRPPIRVVPFPVPVQCFTFDGQPFWNGTPVASPFYPQSAPPIWNIKTPTWQESTPQATSLPQKSQQNEPIEMDAKPVENAEEQFVVGPPSASGKQLHVEIPKDDLRHISPVTGESGISTVLDSTRNTLSSSGCDSTSNQITASTEPSSNVYRGVPETARAEGLRHLSQREAALNKFRLKRKDRCFEKKVRYQSRKLLAEQRPRVKGQFVRQDHSIQGS

SEQ ID NO: 39169 - protein, 593 aa, Zea mays subsp. mays
  peptide (1)..(593): Ceres Seq. ID no. 12360986
  misc_feature (7)..(129): Pfam Name: Pfam Description:  Response regulator receiver domain
  misc_feature (1)..(192): NCBI GI NO: 9758535 NR Description: contains similarity to two-component responseregulator protein~gene_id:T31K7
  misc_feature (1)..(192): NCBI GI NO: 18420797 NR Description: putative protein; protein id: At5g24470
  misc_feature (543)..(591): NCBI GI NO: 9758535 NR Description: contains similarity to two-component responseregulator protein~gene_id:T31K7
  misc_feature (543)..(591): NCBI GI NO: 18420797 NR Description: putative protein; protein id: At5g24470
  misc_feature (1)..(164): NCBI GI NO: 18407171 NR Description: expressed protein; protein id: At2g46790
  misc_feature (426)..(589): NCBI GI NO: 18407171 NR Description: expressed protein; protein id: At2g46790
  misc_feature (2)..(352): NCBI GI NO: 18424319 NR Description: pseudo-response regulator - like
  misc_feature (501)..(593): NCBI GI NO: 18424319 NR Description: pseudo-response regulator - like
  misc_feature (1)..(164): NCBI GI NO: 7485762 NR Description: hypothetical protein At2g46790
  misc_feature (426)..(565): NCBI GI NO: 7485762 NR Description: hypothetical protein At2g46790
MLPRMPVRVLLAEGDDSTRHVISALLRKCGYRVAAASDGVKAWDILKEKSFNIDLVLTEVELPLMSGFLLLSTIMEHDASKNIPVIMMSSHDSVSMVFKCMLKGAADFLVKPLRKNELRNLWQHVWRKQLANGGPDVQHIQEENLAERMEQKTGVTKADNLNSDGPRKNRECSEQESDAQSSCTRSELEAESKQTNNILEYMQSTERHLSIRSHKDLELNGETKTRTKGNNLIPTREDDLSPKKRTCLNDNNSERTSRDMELVHIMDNQQKHDTQRDVDTMRTTSRGNDENSIPAHQLELSLRRTDYGKLENHEKNDRRTLNHSTSSAFYLYNCRTASSLVNAGDGQLCSTSETLVDVENRNGDLAALSEDTTETNRPPIRVVPFPVPVQCFTFDGQPFWNGTPVASPFYPQSAPPIWNIKTPTWQESTPQATSLPQKSQQNEPIEMDAKPVENAEEQFVVGPPSASGKQLHVEIPKDDLRHISPVTGESGISTVLDSTRNTLSSSGCDSTSNQITASTEPSSNVYRGVPETARAEGLRHLSQREAALNKFRLKRKDRCFEKKVRYQSRKLLAEQRPRVKGQFVRQDHSIQGS

SEQ ID NO: 39170 - DNA, 2046 bp, Zea mays subsp. mays
  misc_feature (1)..(2046): Ceres Seq. ID no. 12362604
gcacgagaccattacctagaacatcctaatcgaaaaatctttttcaatcctcaggcaggcgcagcgcaggcagcatccacagcctgaatccaccacaccagcaccacccagcaccgatggccggcgacgacggacgtgctccctccggcctccgcgtcgtgatgttccccttcccgttctggagccacattaaccagatgctccagctcgggaagctcctccgtgcgcggggcctgggcgtcaccatgctccacaccgacttcaacgcgcccgaccccgcactccacccggacatcaccttcgtgtccatccgcgagtccctccccgccgaggtcgtcgccaaccccgacatggtagagcagatgatgcagctcaacgccgtctgcgaggcgccgttccaggcggccctcgccggggagctgctggcgcgcggtacaacaaccggtggcccgcgcgaggtcgcctgcgtggtggtcgacgggcagtggtacaagatgctgggcgcggccacgcgtgtcgctgtccccgcgctcgtgctgcgcgccgacggcgccgccaccttactcagcatgctcgccaccccgcgcctccgcgccgacggttacctccccatcaaaggcactcgatccaccaccctcttctcctccccttctccgcgtgacgatcttgtgccaccggcacggcaccgaccggttactcgttttttcttgtcttgcatgcagaagagcggctggacgaggtggtgccgggcctggagcccctgcgcgtgcgggacctgatccgcgtggacggcagcgacgacgagacggtgctccgtttcatcacccgcaacgccgaggccgtgcgggcctcgtcgtcgggcgtggtgctgaacacgttcgagggcatcgagggcgcggcgctggccaagatccggcgcgagctgtccggccgcccggtcttcgccgtggggccgctgcacctggcgtcgccggaccccgcggcggcggcggccgcggggtaccaggacgcgccggaccccacctgcttggcgtggctggacgcgcgcccgccgcgctccgttctgtacgtcagcatgggaagcgtggcgcgcgtcgaccgcgccgtgttcgaggagacggcgtgggcgctggccggcagcggcgtgccgttcctgtgggtcctccgccgcggctccgtccgcggcgcggatgaggaggtgccgccggtcccggaggagctccgcgagacggtgaggcacaggggcaagatcgtggcgtgggcaccgcagagggaggtcctggcgcacccggcggtgggtgggttctggacgcactgcgggtggaaatccatggtggaggccatatccgaaggggtgcccatgctcgtgcagccgtgcttcgccgagcagatagtgaacgcgaggtatgtgacgcaccagtggggcatcgggtacgaggtcgggaagccgcttgagaggacagccatggcgaaggcggctagaaagctgatggccggcgagctggggccacaggggccaagggagagggctcggcttcttaaggcgcaggcgaagcagtgcgttgcagaaagaggaggaattagtttggctctcgacggtctggtggactacatttgctcgctgtgatgtttgatcagctttcaggtttcagcatgacgatggcgctctgaataatgaactgcatgttatatgtccgatgcaataaggaatagaatgtggacagcattttggtttacttaattctctggcaaatatatcgttggagtttatgagctaaggtctatttattagtatcacattgataattgataatggaagagaaacaacttaaatagcttctttattgtcactcttcgctacttctttttgtgtgagttctactcgcctataaattagtggaacatcctcctcttaaacacaagaaaaaaatcaatctactatattttagtgagagagctatcttagggaggctccagcatgccatgtcagcgtctagtttcagcaaacccggtttttgatgattttgcacgagtcggatagttcgg

SEQ ID NO: 39171 - protein, 220 aa, Zea mays subsp. mays
  peptide (1)..(220): Ceres Seq. ID no. 12362605
  misc_feature (7)..(170): NCBI GI NO: 33146634 NR Description: putative UDP-glucosyltransferase
  misc_feature (7)..(134): NCBI GI NO: 34900684 NR Description: glucuronosyl transferase-like protein
  misc_feature (1)..(165): NCBI GI NO: 34897378 NR Description: putative UDP-glucosyltransferase
  misc_feature (3)..(191): NCBI GI NO: 33146633 NR Description: putative UDP-glucosyltransferase
  misc_feature (5)..(190): NCBI GI NO: 34900682 NR Description: glucuronosyl transferase-like protein
  misc_feature (3)..(191): NCBI GI NO: 34900678 NR Description: glucuronosyl transferase-like protein
  misc_feature (8)..(170): NCBI GI NO: 18033228 NR Description: UDP-glucosyltransferase BX8 [Zea mays]
  misc_feature (13)..(98): NCBI GI NO: 34900716 NR Description: glucuronosyl transferase-like protein
  misc_feature (1)..(191): NCBI GI NO: 34900662 NR Description: glucuronosyl transferase-like protein
  misc_feature (8)..(203): NCBI GI NO: 18033230 NR Description: UDP-glucosyltransferase BX9 [Zea mays]
MAGDDGRAPSGLRVVMFPFPFWSHINQMLQLGKLLRARGLGVTMLHTDFNAPDPALHPDITFVSIRESLPAEVVANPDMVEQMMQLNAVCEAPFQAALAGELLARGTTTGGPREVACVVVDGQWYKMLGAATRVAVPALVLRADGAATLLSMLATPRLRADGYLPIKGTRSTTLFSSPSPRDDLVPPARHRPVTRFFLSCMQKSGWTRWCRAWSPCACGT

SEQ ID NO: 39172 - protein, 205 aa, Zea mays subsp. mays
  peptide (1)..(205): Ceres Seq. ID no. 12362606
  misc_feature (1)..(155): NCBI GI NO: 33146634 NR Description: putative UDP-glucosyltransferase
  misc_feature (1)..(119): NCBI GI NO: 34900684 NR Description: glucuronosyl transferase-like protein
  misc_feature (1)..(150): NCBI GI NO: 34897378 NR Description: putative UDP-glucosyltransferase
  misc_feature (1)..(176): NCBI GI NO: 33146633 NR Description: putative UDP-glucosyltransferase
  misc_feature (1)..(175): NCBI GI NO: 34900682 NR Description: glucuronosyl transferase-like protein
  misc_feature (1)..(176): NCBI GI NO: 34900678 NR Description: glucuronosyl transferase-like protein
  misc_feature (1)..(155): NCBI GI NO: 18033228 NR Description: UDP-glucosyltransferase BX8 [Zea mays]
  misc_feature (1)..(83): NCBI GI NO: 34900716 NR Description: glucuronosyl transferase-like protein
  misc_feature (1)..(176): NCBI GI NO: 34900662 NR Description: glucuronosyl transferase-like protein
  misc_feature (1)..(188): NCBI GI NO: 18033230 NR Description: UDP-glucosyltransferase BX9 [Zea mays]
MFPFPFWSHINQMLQLGKLLRARGLGVTMLHTDFNAPDPALHPDITFVSIRESLPAEVVANPDMVEQMMQLNAVCEAPFQAALAGELLARGTTTGGPREVACVVVDGQWYKMLGAATRVAVPALVLRADGAATLLSMLATPRLRADGYLPIKGTRSTTLFSSPSPRDDLVPPARHRPVTRFFLSCMQKSGWTRWCRAWSPCACGT

SEQ ID NO: 39173 - protein, 193 aa, Zea mays subsp. mays
  peptide (1)..(193): Ceres Seq. ID no. 12362607
  misc_feature (1)..(143): NCBI GI NO: 33146634 NR Description: putative UDP-glucosyltransferase
  misc_feature (1)..(107): NCBI GI NO: 34900684 NR Description: glucuronosyl transferase-like protein
  misc_feature (1)..(138): NCBI GI NO: 34897378 NR Description: putative UDP-glucosyltransferase
  misc_feature (1)..(164): NCBI GI NO: 33146633 NR Description: putative UDP-glucosyltransferase
  misc_feature (1)..(163): NCBI GI NO: 34900682 NR Description: glucuronosyl transferase-like protein
  misc_feature (1)..(164): NCBI GI NO: 34900678 NR Description: glucuronosyl transferase-like protein
  misc_feature (1)..(143): NCBI GI NO: 18033228 NR Description: UDP-glucosyltransferase BX8 [Zea mays]
  misc_feature (1)..(71): NCBI GI NO: 34900716 NR Description: glucuronosyl transferase-like protein
  misc_feature (1)..(164): NCBI GI NO: 34900662 NR Description: glucuronosyl transferase-like protein
  misc_feature (1)..(176): NCBI GI NO: 18033230 NR Description: UDP-glucosyltransferase BX9 [Zea mays]
MLQLGKLLRARGLGVTMLHTDFNAPDPALHPDITFVSIRESLPAEVVANPDMVEQMMQLNAVCEAPFQAALAGELLARGTTTGGPREVACVVVDGQWYKMLGAATRVAVPALVLRADGAATLLSMLATPRLRADGYLPIKGTRSTTLFSSPSPRDDLVPPARHRPVTRFFLSCMQKSGWTRWCRAWSPCACGT

SEQ ID NO: 39174 - DNA, 1053 bp, Zea mays subsp. mays
  misc_feature (1)..(1053): Ceres Seq. ID no. 12417420
  misc_feature (605)..(605): n is a, c, t, g, unknown, or other
agcaccagcaggagagtcccggagctggaagaagaagatacagagcgcatgctcctgtgaacatacaccactgaactcatagaaagcagcacacagtctgcataggtgcattgttgttccggcctctcctagaggaaaggaaggtcaggactcaggaggatgcctcgagccccgaccatgaccgctttccttgtcgccgtgcttgccgccctcgttctcacgtccgagggccgcgtttctcggaaggacctgtgcatcgacctcggcggtggcagcggggcaggcatcgggatcggtgctgggattagcattggcataggcggtggtggtggtgccggtggctctggctctggctcggcgtctggctccggctccggctccggctcggcctcaggttccgggtccagtgcgggctctggtgcaggatcgtatgctggatctggcgccggcgccggctctggctctggctctggtgcgggttcaggagctgggtccggagcgggttcgggttcagggtacgggcaagggcaagggtctggatatggcgaagggcatgggtcgggccagggacagggttctgggtctggctcgggatccggtcaggnaagtggatccggtcgaggatctggctacggcgaaggctccggttccggctctggccaaggatcaggatccggctacggcgaaggctccggttccggctctggccaaggatcaggatccggctacggtgaaggttacggctccggtcatggccaaggatctggatacggtgagggttcaggaagaggatacggagaaggttcaggctcaggctacggcgagggacacggctacggctacggctctggttctgggcatgtggcaaataaacatgactgaacaatgttctctgagctctgatgttctcttctctttctgtgtatccatccatatacataaataagtacacgttaccaactgtggacaaagaactgtactctctctctctcctcaaagcatttcctatatagctgttcaagatactgtttttcattatagactacacttttt

SEQ ID NO: 39175 - protein, 240 aa, Zea mays subsp. mays
  peptide (1)..(240): Ceres Seq. ID no. 12417421
  misc_feature (37)..(233): Pfam Name: Pfam Description:  Dehydrin
  misc_feature (36)..(233): NCBI GI NO: 10954048 NR Description: ovarian fibroin-like substance-1 [Cyprinus carpio]
  misc_feature (36)..(234): NCBI GI NO: 10954048 NR Description: ovarian fibroin-like substance-1 [Cyprinus carpio]
  misc_feature (35)..(236): NCBI GI NO: 765323 NR Description: silk fibroin heavy chain [Bombyx mori]
  misc_feature (36)..(233): NCBI GI NO: 10954048 NR Description: ovarian fibroin-like substance-1 [Cyprinus carpio]
  misc_feature (27)..(233): NCBI GI NO: 10954048 NR Description: ovarian fibroin-like substance-1 [Cyprinus carpio]
  misc_feature (36)..(233): NCBI GI NO: 9087216 NR Description: Fibroin heavy chain precursor (Fib-H) (H-fibroin)
  misc_feature (35)..(233): NCBI GI NO: 765323 NR Description: silk fibroin heavy chain [Bombyx mori]
  misc_feature (36)..(233): NCBI GI NO: 10954048 NR Description: ovarian fibroin-like substance-1 [Cyprinus carpio]
  misc_feature (36)..(238): NCBI GI NO: 10954048 NR Description: ovarian fibroin-like substance-1 [Cyprinus carpio]
  misc_feature (36)..(233): NCBI GI NO: 10954048 NR Description: ovarian fibroin-like substance-1 [Cyprinus carpio]
  misc_feature (149)..(149): Xaa is any aa, unknown or other
MPRAPTMTAFLVAVLAALVLTSEGRVSRKDLCIDLGGGSGAGIGIGAGISIGIGGGGGAGGSGSGSASGSGSGSGSASGSGSSAGSGAGSYAGSGAGAGSGSGSGAGSGAGSGAGSGSGYGQGQGSGYGEGHGSGQGQGSGSGSGSGQXSGSGRGSGYGEGSGSGSGQGSGSGYGEGSGSGSGQGSGSGYGEGYGSGHGQGSGYGEGSGRGYGEGSGSGYGEGHGYGYGSGSGHVANKHD

SEQ ID NO: 39176 - protein, 234 aa, Zea mays subsp. mays
  peptide (1)..(234): Ceres Seq. ID no. 12417422
  misc_feature (31)..(227): Pfam Name: Pfam Description:  Dehydrin
  misc_feature (30)..(227): NCBI GI NO: 10954048 NR Description: ovarian fibroin-like substance-1 [Cyprinus carpio]
  misc_feature (30)..(228): NCBI GI NO: 10954048 NR Description: ovarian fibroin-like substance-1 [Cyprinus carpio]
  misc_feature (29)..(230): NCBI GI NO: 765323 NR Description: silk fibroin heavy chain [Bombyx mori]
  misc_feature (30)..(227): NCBI GI NO: 10954048 NR Description: ovarian fibroin-like substance-1 [Cyprinus carpio]
  misc_feature (21)..(227): NCBI GI NO: 10954048 NR Description: ovarian fibroin-like substance-1 [Cyprinus carpio]
  misc_feature (30)..(227): NCBI GI NO: 9087216 NR Description: Fibroin heavy chain precursor (Fib-H) (H-fibroin)
  misc_feature (29)..(227): NCBI GI NO: 765323 NR Description: silk fibroin heavy chain [Bombyx mori]
  misc_feature (30)..(227): NCBI GI NO: 10954048 NR Description: ovarian fibroin-like substance-1 [Cyprinus carpio]
  misc_feature (30)..(232): NCBI GI NO: 10954048 NR Description: ovarian fibroin-like substance-1 [Cyprinus carpio]
  misc_feature (30)..(227): NCBI GI NO: 10954048 NR Description: ovarian fibroin-like substance-1 [Cyprinus carpio]
  misc_feature (143)..(143): Xaa is any aa, unknown or other
MTAFLVAVLAALVLTSEGRVSRKDLCIDLGGGSGAGIGIGAGISIGIGGGGGAGGSGSGSASGSGSGSGSASGSGSSAGSGAGSYAGSGAGAGSGSGSGAGSGAGSGAGSGSGYGQGQGSGYGEGHGSGQGQGSGSGSGSGQXSGSGRGSGYGEGSGSGSGQGSGSGYGEGSGSGSGQGSGSGYGEGYGSGHGQGSGYGEGSGRGYGEGSGSGYGEGHGYGYGSGSGHVANKHD

SEQ ID NO: 39177 - protein, 171 aa, Zea mays subsp. mays
  peptide (1)..(171): Ceres Seq. ID no. 12417423
  misc_feature (59)..(59): Xaa is any aa, unknown or other
MLDLAPAPALALALVRVQELGPERVRVQGTGKGKGLDMAKGMGRARDRVLGLARDPVRXVDPVEDLATAKAPVPALAKDQDPATAKAPVPALAKDQDPATVKVTAPVMAKDLDTVRVQEEDTEKVQAQATARDTATATALVLGMWQINMTEQCSLSSDVLFSFCVSIHIHK

SEQ ID NO: 39178 - DNA, 2759 bp, Zea mays subsp. mays
  misc_feature (1)..(2759): Ceres Seq. ID no. 12376316
gcacgagaccattacctagaacatcctaatcgaaaaatcttattttctctcgcgttccactcctctctgttggctagctaccaccaccgtttccacgatgacggcgctgcagttcctgttgctcgcgctcgtcgccgtcactcaggtcgcgagcgccaccacggtcacctacaacgaccgtgcactcgtcatcgatggtcagcgccgtattattctatcagggtctattcattaccccaggagcacgccacagatgtggcctgatctcatcaacaaagctaaagaaggcggcctcaacaccatcgaaacatacgtcttctggaatggccacgagccacgccgccgtcagtataatttcgagggaagctacgacatcatcaggttcttcaaggagatccagaacgctggaatgcatgctattcttcgcattggtccctacatctgtggggaatggaattacgggggccttcctgcatggctgcgcgacattcctggaatgcagttcaggttgcacaatgccccctttgagcgcgagatggagaccttcaccaccctcatcgtcaataagatgaaggacgtcaacatgttcgcaggacagggaggcccaatcatccttgctcagatcgagaacgagtatggaaacatcatgggacaactcaagaacaaccagtctgcctcgcaatacatccactggtgcgcggacatggcgaataagcaagaggtcggtgtcccgtggatcatgtgccagcaggataacgatgtgccacacaacgtcatcaacacctgcaatggtttctattgccacgattggttcccgaataggaccggcattcccaagatatggacagaaaactggactggctggttcaaagcctgggataagccggatttccatagatccgctgaggacattgctttcgcggttgccatgttcttccagaagcgtggatcggtccataactactacatgtaccatggaggaaccaatttcggacgcacttctggtggcccgtacatcacaaccagctatgattacgatgcacctttggatgagtatggtaacattaggcagcccaaatacgggcacctgaaagatctccacgacctgatcaggtccatggagaaaatccttgtccatgggaagtacaatgacacaagttatggcaagaatgtcactgtaaccaagtacatgtatggtggttcttcagtttgcttcatcaacaaccagttcgtcgacagggatatgaaggtgaccctcggcggccgaaactcacctcgttccggcatggtccgtcagcatccttgcccaactgcaagactgttgcctacaacactgcaaagatcaagacgcaaacatcggtaatggtgaagaaggccaactcggtggagaaggaaccggagaccatgcgatggtcgtggatgcccgagaacctcaagcccttcatgacagaccaccgtggcagcttcagacagtcacaactcttggagcagatcgcaacatccactgatcagagcgactacttgtggtataggacaagccttgagcataagggagagggaagttacacgctgtacgtgaacacaagtggccatgagatgtacgcttttgtaaacggaaggcttgttgggcaaaaccactcggccgatggagcgttcgtcttccagctccagtctccggtgaagctccactccggaaagaactacgtttctctcctcagcggcacagtcggactcaagaactatggaccttcgtttgagcttgtgccagcgggcatcgccggtgggccggttaagcttgtcgggacaaacggcaccgccgttgatcttaccaaaagctcttggtcttacaagtctgggttggccggtgagctcaggcaaatccacctcgacaagcccggctacaagtggcagagccacaacggtaccatccccgtcaaccggcccttcacgtggtacaagaccacctttgaagctcccgccggcgaggaggccgtcgtggtggacctgctgggcctgaacaagggcgtggcgtgggtgaacggcaacagccttggacgctactggccgtcctacaccgcggcggagatgcccggttgccacgtctgcgactaccggggaaagttcatagcggagggcgatggcatccgctgcctcacgggttgcggcgagccagcgcagcgcttctaccacgtgccgcgctccttcctccgcgccggcgagcccaacacgctcatcctcttcgaggaggccggcggcgacccgacacgcgccgcgttccacaccgtcgccgtgggccccgtgtgcgtggcggccgtcgagctcggcgacgacgtcacgctgtcatgcggcggccacggccgcgtcgtcgccagcgtcgacgtggccagcttcggcgtcgccaggggcagctgcggcgcctacaagggaggctgcgagtccaaggccgcgctcaaggcgttcacggacgcgtgcgtcggcagggagtcgtgcacggtcaagtacacggccgcgtttgccggcgcagggtgccaatccggcgcgctcaccgttcaggccacctgctcatagcgacccaggctagatcaaggagagttttatcttagctagatcaaggagagttttatcttagctagatcaggatagttttatcttagctagatcagatgatgcatggtttggtttggacacttaatgtagtcctcacatttcgttcctcaagattagttgaataaaaaaacctaagtacccttatgttttcc

SEQ ID NO: 39179 - protein, 421 aa, Zea mays subsp. mays
  peptide (1)..(421): Ceres Seq. ID no. 12376317
  misc_feature (1)..(389): Pfam Name: Pfam Description:  Glycosyl hydrolases family 35
  misc_feature (1)..(389): NCBI GI NO: 12597826 NR Description: hypothetical protein [Arabidopsis thaliana]
  misc_feature (1)..(391): NCBI GI NO: 1352075 NR Description: Beta-galactosidase precursor (Lactase)
  misc_feature (1)..(389): NCBI GI NO: 22329897 NR Description: similar to glycosyl hydrolase family 35
  misc_feature (34)..(391): NCBI GI NO: 6686886 NR Description: putative beta-galactosidase [Arabidopsis thaliana]
  misc_feature (1)..(391): NCBI GI NO: 14970841 NR Description: beta-galactosidase [Fragaria x ananassa]
  misc_feature (4)..(391): NCBI GI NO: 7939623 NR Description: putative beta-galactosidase
  misc_feature (1)..(385): NCBI GI NO: 7939621 NR Description: beta-galactosidase [Lycopersicon esculentum]
  misc_feature (1)..(392): NCBI GI NO: 26451843 NR Description: unknown protein [Arabidopsis thaliana]
  misc_feature (1)..(395): NCBI GI NO: 18418558 NR Description: glycosyl hydrolase family 35
  misc_feature (23)..(376): NCBI GI NO: 6686900 NR Description: putative beta-galactosidase [Arabidopsis thaliana]
MTALQFLLLALVAVTQVASATTVTYNDRALVIDGQRRIILSGSIHYPRSTPQMWPDLINKAKEGGLNTIETYVFWNGHEPRRRQYNFEGSYDIIRFFKEIQNAGMHAILRIGPYICGEWNYGGLPAWLRDIPGMQFRLHNAPFEREMETFTTLIVNKMKDVNMFAGQGGPIILAQIENEYGNIMGQLKNNQSASQYIHWCADMANKQEVGVPWIMCQQDNDVPHNVINTCNGFYCHDWFPNRTGIPKIWTENWTGWFKAWDKPDFHRSAEDIAFAVAMFFQKRGSVHNYYMYHGGTNFGRTSGGPYITTSYDYDAPLDEYGNIRQPKYGHLKDLHDLIRSMEKILVHGKYNDTSYGKNVTVTKYMYGGSSVCFINNQFVDRDMKVTLGGRNSPRSGMVRQHPCPTARLLPTTLQRSRRKHR

SEQ ID NO: 39180 - protein, 401 aa, Zea mays subsp. mays
  peptide (1)..(401): Ceres Seq. ID no. 12376318
  misc_feature (1)..(259): Pfam Name: Pfam Description:  Glycosyl hydrolases family 35
  misc_feature (1)..(259): NCBI GI NO: 12597826 NR Description: hypothetical protein [Arabidopsis thaliana]
  misc_feature (275)..(400): NCBI GI NO: 12597826 NR Description: hypothetical protein [Arabidopsis thaliana]
  misc_feature (1)..(392): NCBI GI NO: 1352075 NR Description: Beta-galactosidase precursor (Lactase)
  misc_feature (1)..(237): NCBI GI NO: 22329897 NR Description: similar to glycosyl hydrolase family 35
  misc_feature (288)..(400): NCBI GI NO: 22329897 NR Description: similar to glycosyl hydrolase family 35
  misc_feature (1)..(400): NCBI GI NO: 6686886 NR Description: putative beta-galactosidase [Arabidopsis thaliana]
  misc_feature (1)..(400): NCBI GI NO: 14970841 NR Description: beta-galactosidase [Fragaria x ananassa]
  misc_feature (1)..(401): NCBI GI NO: 7939623 NR Description: putative beta-galactosidase
  misc_feature (1)..(383): NCBI GI NO: 7939621 NR Description: beta-galactosidase [Lycopersicon esculentum]
  misc_feature (1)..(237): NCBI GI NO: 26451843 NR Description: unknown protein [Arabidopsis thaliana]
MVKKANSVEKEPETMRWSWMPENLKPFMTDHRGSFRQSQLLEQIATSTDQSDYLWYRTSLEHKGEGSYTLYVNTSGHEMYAFVNGRLVGQNHSADGAFVFQLQSPVKLHSGKNYVSLLSGTVGLKNYGPSFELVPAGIAGGPVKLVGTNGTAVDLTKSSWSYKSGLAGELRQIHLDKPGYKWQSHNGTIPVNRPFTWYKTTFEAPAGEEAVVVDLLGLNKGVAWVNGNSLGRYWPSYTAAEMPGCHVCDYRGKFIAEGDGIRCLTGCGEPAQRFYHVPRSFLRAGEPNTLILFEEAGGDPTRAAFHTVAVGPVCVAAVELGDDVTLSCGGHGRVVASVDVASFGVARGSCGAYKGGCESKAALKAFTDACVGRESCTVKYTAAFAGAGCQSGALTVQATCS

SEQ ID NO: 39181 - protein, 387 aa, Zea mays subsp. mays
  peptide (1)..(387): Ceres Seq. ID no. 12376319
  misc_feature (1)..(245): Pfam Name: Pfam Description:  Glycosyl hydrolases family 35
  misc_feature (1)..(245): NCBI GI NO: 12597826 NR Description: hypothetical protein [Arabidopsis thaliana]
  misc_feature (261)..(386): NCBI GI NO: 12597826 NR Description: hypothetical protein [Arabidopsis thaliana]
  misc_feature (1)..(378): NCBI GI NO: 1352075 NR Description: Beta-galactosidase precursor (Lactase)
  misc_feature (1)..(223): NCBI GI NO: 22329897 NR Description: similar to glycosyl hydrolase family 35
  misc_feature (274)..(386): NCBI GI NO: 22329897 NR Description: similar to glycosyl hydrolase family 35
  misc_feature (1)..(386): NCBI GI NO: 6686886 NR Description: putative beta-galactosidase [Arabidopsis thaliana]
  misc_feature (1)..(386): NCBI GI NO: 14970841 NR Description: beta-galactosidase [Fragaria x ananassa]
  misc_feature (1)..(387): NCBI GI NO: 7939623 NR Description: putative beta-galactosidase
  misc_feature (1)..(369): NCBI GI NO: 7939621 NR Description: beta-galactosidase [Lycopersicon esculentum]
  misc_feature (1)..(223): NCBI GI NO: 26451843 NR Description: unknown protein [Arabidopsis thaliana]
MRWSWMPENLKPFMTDHRGSFRQSQLLEQIATSTDQSDYLWYRTSLEHKGEGSYTLYVNTSGHEMYAFVNGRLVGQNHSADGAFVFQLQSPVKLHSGKNYVSLLSGTVGLKNYGPSFELVPAGIAGGPVKLVGTNGTAVDLTKSSWSYKSGLAGELRQIHLDKPGYKWQSHNGTIPVNRPFTWYKTTFEAPAGEEAVVVDLLGLNKGVAWVNGNSLGRYWPSYTAAEMPGCHVCDYRGKFIAEGDGIRCLTGCGEPAQRFYHVPRSFLRAGEPNTLILFEEAGGDPTRAAFHTVAVGPVCVAAVELGDDVTLSCGGHGRVVASVDVASFGVARGSCGAYKGGCESKAALKAFTDACVGRESCTVKYTAAFAGAGCQSGALTVQATCS

SEQ ID NO: 39182 - DNA, 1742 bp, Zea mays subsp. mays
  misc_feature (1)..(1742): Ceres Seq. ID no. 12358954
ctcctccattccccactgcatgcgcgctctgtcactgtcagtctcactctcgctcgctaccttggcgacgactggttgaccgccgctgccgctctagagcaggtgcccactgcccaggtcttcttctggtccttcgccggcgacaagcacaaccagggtgattcaagtactctgctttcaccaatatgtctgacggtcaggaaactgacaagaacattgagatttggaagatcaagaagttgatcaaggcattggaatctgctagaggcaatggcaccagcatgatctctctgattatgccaccacgtgaccaaatttcccgtgtgaccaagatgttgggtgatgaatatggtactgcttcaaatattaagagtagagtcaaccggcaatctgttttagcagccatcacctcagctcagcagaggctgaagctgtataacaaggttcccccaaatggacttgttctctacactggaacaattgttactgaagatggcaaggaaaagaaagtcactattgattttgagcccttcaagcctatcaatgcatccctgtacctttgtgacaataagttccacactgaagctttgaatgaactcttggaatctgatgacaagtttggtttcattgttatggatggtaatggaactctttttggtacactgagtggcaatactcgtgaagtgcttcacaaattcactgttgatctcccaaagaagcatggaagaggaggtcaatctgcccttcgctttgctcggcttcgaatggaaaaacgtcataattatgtccgaaagacagctgagcttgctacacaattttttatcaatccagctaccagtcagcctaatgttgctggacttatattggctggttctgctgattttaagacagaactgagccaatctgacatgtttgatcaacgtctccaggccaaaatacttaatgttgttgatgtttcatatggcggggagaacggttttaaccaagctattgagttgtcagctgaaattctagcaaatgtgaagttcatacaagagaaaaagctgattggaaagtattttgaagaaattagtcaagatacgggtaagtatgtgtttggtgttgatgacacactgaaagcccttgaaatgggcgctgtggaaacactgatagtgtgggaaaaccttgatgtcaacagatatgtgcttaagaatactgcaactggagaaactgttatcaaacatctgaataaagagcaagaagctgaccagagtcatttccgtgatccatctaccaatgctgagctggaggttcaggagaaaacttcgctcttggaatggtttgccaatgagtacaaaaaatttgggtgcacacttgagtttgttaccaacaaatctcaagaagggtctcagttttgcagaggatttggtggcattggtggcatgttgcgctatcaactggacatccgttctttcgacgagctttctgatgacgaaggtgtctatgaagattctgattaagcaaacgtcattcatatggctgtgctggaccctggattgatgcaattgctcgttttgttcttctattttttgcttgattagtcggtttttgaggagattaccacttgagacacttgctttgtttccttgccgcagcttacaattgcaatgtcaaccacatcattagaatctggttgatacctcatgtactgctgttatgttgacatcggctctgtccaatatttatcaagatttggtgtagcg

SEQ ID NO: 39183 - protein, 437 aa, Zea mays subsp. mays
  peptide (1)..(437): Ceres Seq. ID no. 12358955
  misc_feature (144)..(278): Pfam Name: Pfam Description:  eRF1 domain 2
  misc_feature (1)..(437): NCBI GI NO: 549010 NR Description: Eukaryotic peptide chain release factor subunit 1-3
  misc_feature (5)..(437): NCBI GI NO: 15222115 NR Description: eukaryotic peptide chain release factor subunit 1
  misc_feature (1)..(437): NCBI GI NO: 15238829 NR Description: eukaryotic release factor 1 homolog(gb|AAA91169
  misc_feature (1)..(437): NCBI GI NO: 1155261 NR Description: eukaryotic release factor 1 homolog
  misc_feature (1)..(437): NCBI GI NO: 15215863 NR Description: AT5g47880/MCA23_22 [Arabidopsis thaliana]
  misc_feature (50)..(437): NCBI GI NO: 22331351 NR Description: Eukaryotic peptide chain release factor subunit 1
  misc_feature (1)..(437): NCBI GI NO: 18250310 NR Description: eukaryotic release factor 1
  misc_feature (1)..(435): NCBI GI NO: 15213995 NR Description: Eukaryotic peptide chain release factor subunit 1
  misc_feature (4)..(429): NCBI GI NO: 21356433 NR Description: CG5605-PA [Drosophila melanogaster]
  misc_feature (1)..(437): NCBI GI NO: 34878655 NR Description: similar to eukaryotic translation terminationfactor 1
MSDGQETDKNIEIWKIKKLIKALESARGNGTSMISLIMPPRDQISRVTKMLGDEYGTASNIKSRVNRQSVLAAITSAQQRLKLYNKVPPNGLVLYTGTIVTEDGKEKKVTIDFEPFKPINASLYLCDNKFHTEALNELLESDDKFGFIVMDGNGTLFGTLSGNTREVLHKFTVDLPKKHGRGGQSALRFARLRMEKRHNYVRKTAELATQFFINPATSQPNVAGLILAGSADFKTELSQSDMFDQRLQAKILNVVDVSYGGENGFNQAIELSAEILANVKFIQEKKLIGKYFEEISQDTGKYVFGVDDTLKALEMGAVETLIVWENLDVNRYVLKNTATGETVIKHLNKEQEADQSHFRDPSTNAELEVQEKTSLLEWFANEYKKFGCTLEFVTNKSQEGSQFCRGFGGIGGMLRYQLDIRSFDELSDDEGVYEDSD

SEQ ID NO: 39184 - protein, 405 aa, Zea mays subsp. mays
  peptide (1)..(405): Ceres Seq. ID no. 12358956
  misc_feature (112)..(246): Pfam Name: Pfam Description:  eRF1 domain 2
  misc_feature (1)..(405): NCBI GI NO: 549010 NR Description: Eukaryotic peptide chain release factor subunit 1-3
  misc_feature (1)..(405): NCBI GI NO: 15222115 NR Description: eukaryotic peptide chain release factor subunit 1
  misc_feature (1)..(405): NCBI GI NO: 15238829 NR Description: eukaryotic release factor 1 homolog(gb|AAA91169
  misc_feature (1)..(405): NCBI GI NO: 1155261 NR Description: eukaryotic release factor 1 homolog
  misc_feature (1)..(405): NCBI GI NO: 15215863 NR Description: AT5g47880/MCA23_22 [Arabidopsis thaliana]
  misc_feature (18)..(405): NCBI GI NO: 22331351 NR Description: Eukaryotic peptide chain release factor subunit 1
  misc_feature (1)..(405): NCBI GI NO: 18250310 NR Description: eukaryotic release factor 1
  misc_feature (1)..(403): NCBI GI NO: 15213995 NR Description: Eukaryotic peptide chain release factor subunit 1
  misc_feature (1)..(397): NCBI GI NO: 21356433 NR Description: CG5605-PA [Drosophila melanogaster]
  misc_feature (1)..(405): NCBI GI NO: 34878655 NR Description: similar to eukaryotic translation terminationfactor 1
MISLIMPPRDQISRVTKMLGDEYGTASNIKSRVNRQSVLAAITSAQQRLKLYNKVPPNGLVLYTGTIVTEDGKEKKVTIDFEPFKPINASLYLCDNKFHTEALNELLESDDKFGFIVMDGNGTLFGTLSGNTREVLHKFTVDLPKKHGRGGQSALRFARLRMEKRHNYVRKTAELATQFFINPATSQPNVAGLILAGSADFKTELSQSDMFDQRLQAKILNVVDVSYGGENGFNQAIELSAEILANVKFIQEKKLIGKYFEEISQDTGKYVFGVDDTLKALEMGAVETLIVWENLDVNRYVLKNTATGETVIKHLNKEQEADQSHFRDPSTNAELEVQEKTSLLEWFANEYKKFGCTLEFVTNKSQEGSQFCRGFGGIGGMLRYQLDIRSFDELSDDEGVYEDSD

SEQ ID NO: 39185 - protein, 400 aa, Zea mays subsp. mays
  peptide (1)..(400): Ceres Seq. ID no. 12358957
  misc_feature (107)..(241): Pfam Name: Pfam Description:  eRF1 domain 2
  misc_feature (1)..(400): NCBI GI NO: 549010 NR Description: Eukaryotic peptide chain release factor subunit 1-3
  misc_feature (1)..(400): NCBI GI NO: 15222115 NR Description: eukaryotic peptide chain release factor subunit 1
  misc_feature (1)..(400): NCBI GI NO: 15238829 NR Description: eukaryotic release factor 1 homolog(gb|AAA91169
  misc_feature (1)..(400): NCBI GI NO: 1155261 NR Description: eukaryotic release factor 1 homolog
  misc_feature (1)..(400): NCBI GI NO: 15215863 NR Description: AT5g47880/MCA23_22 [Arabidopsis thaliana]
  misc_feature (13)..(400): NCBI GI NO: 22331351 NR Description: Eukaryotic peptide chain release factor subunit 1
  misc_feature (1)..(400): NCBI GI NO: 18250310 NR Description: eukaryotic release factor 1
  misc_feature (1)..(398): NCBI GI NO: 15213995 NR Description: Eukaryotic peptide chain release factor subunit 1
  misc_feature (1)..(392): NCBI GI NO: 21356433 NR Description: CG5605-PA [Drosophila melanogaster]
  misc_feature (1)..(400): NCBI GI NO: 34878655 NR Description: similar to eukaryotic translation terminationfactor 1
MPPRDQISRVTKMLGDEYGTASNIKSRVNRQSVLAAITSAQQRLKLYNKVPPNGLVLYTGTIVTEDGKEKKVTIDFEPFKPINASLYLCDNKFHTEALNELLESDDKFGFIVMDGNGTLFGTLSGNTREVLHKFTVDLPKKHGRGGQSALRFARLRMEKRHNYVRKTAELATQFFINPATSQPNVAGLILAGSADFKTELSQSDMFDQRLQAKILNVVDVSYGGENGFNQAIELSAEILANVKFIQEKKLIGKYFEEISQDTGKYVFGVDDTLKALEMGAVETLIVWENLDVNRYVLKNTATGETVIKHLNKEQEADQSHFRDPSTNAELEVQEKTSLLEWFANEYKKFGCTLEFVTNKSQEGSQFCRGFGGIGGMLRYQLDIRSFDELSDDEGVYEDSD

SEQ ID NO: 39186 - DNA, 1392 bp, Zea mays subsp. mays; identical to SEQ ID NO: 37464
  misc_feature (1)..(1392): Ceres Seq. ID no. 12381052

SEQ ID NO: 39187 - protein, 401 aa, Zea mays subsp. mays; identical to SEQ ID NO: 37465
  peptide (1)..(401): Ceres Seq. ID no. 12381053
  misc_feature (141)..(382): Pfam Name: Pfam Description:  Protein phosphatase 2C
  misc_feature (141)..(391): NCBI GI NO: 4336434 NR Description: nodule-enhanced protein phosphatase type 2C
  misc_feature (39)..(372): NCBI GI NO: 34908256 NR Description: putative protein phosphatase 2C
  misc_feature (361)..(392): NCBI GI NO: 34908256 NR Description: putative protein phosphatase 2C
  misc_feature (44)..(349): NCBI GI NO: 34902050 NR Description: putative Serine/threonine phosphatases
  misc_feature (335)..(392): NCBI GI NO: 34902050 NR Description: putative Serine/threonine phosphatases
  misc_feature (105)..(392): NCBI GI NO: 10432446 NR Description: protein phosphatase 2C [Nicotiana tabacum]
  misc_feature (101)..(382): NCBI GI NO: 15222398 NR Description: protein phosphatase 2C
  misc_feature (356)..(392): NCBI GI NO: 15222398 NR Description: protein phosphatase 2C
  misc_feature (101)..(382): NCBI GI NO: 21537020 NR Description: protein phosphatase 2C, putative
  misc_feature (356)..(392): NCBI GI NO: 21537020 NR Description: protein phosphatase 2C, putative

SEQ ID NO: 39188 - protein, 375 aa, Zea mays subsp. mays; identical to SEQ ID NO: 37466
  peptide (1)..(375): Ceres Seq. ID no. 12381054
  misc_feature (115)..(356): Pfam Name: Pfam Description:  Protein phosphatase 2C
  misc_feature (115)..(365): NCBI GI NO: 4336434 NR Description: nodule-enhanced protein phosphatase type 2C
  misc_feature (13)..(346): NCBI GI NO: 34908256 NR Description: putative protein phosphatase 2C
  misc_feature (335)..(366): NCBI GI NO: 34908256 NR Description: putative protein phosphatase 2C
  misc_feature (18)..(323): NCBI GI NO: 34902050 NR Description: putative Serine/threonine phosphatases
  misc_feature (309)..(366): NCBI GI NO: 34902050 NR Description: putative Serine/threonine phosphatases
  misc_feature (79)..(366): NCBI GI NO: 10432446 NR Description: protein phosphatase 2C [Nicotiana tabacum]
  misc_feature (75)..(356): NCBI GI NO: 15222398 NR Description: protein phosphatase 2C
  misc_feature (330)..(366): NCBI GI NO: 15222398 NR Description: protein phosphatase 2C
  misc_feature (75)..(356): NCBI GI NO: 21537020 NR Description: protein phosphatase 2C, putative
  misc_feature (330)..(366): NCBI GI NO: 21537020 NR Description: protein phosphatase 2C, putative

SEQ ID NO: 39189 - protein, 286 aa, Zea mays subsp. mays; identical to SEQ ID NO: 37467
  peptide (1)..(286): Ceres Seq. ID no. 12381055
  misc_feature (26)..(267): Pfam Name: Pfam Description:  Protein phosphatase 2C
  misc_feature (26)..(276): NCBI GI NO: 4336434 NR Description: nodule-enhanced protein phosphatase type 2C
  misc_feature (1)..(257): NCBI GI NO: 34908256 NR Description: putative protein phosphatase 2C
  misc_feature (246)..(277): NCBI GI NO: 34908256 NR Description: putative protein phosphatase 2C
  misc_feature (1)..(234): NCBI GI NO: 34902050 NR Description: putative Serine/threonine phosphatases
  misc_feature (220)..(277): NCBI GI NO: 34902050 NR Description: putative Serine/threonine phosphatases
  misc_feature (1)..(277): NCBI GI NO: 10432446 NR Description: protein phosphatase 2C [Nicotiana tabacum]
  misc_feature (1)..(267): NCBI GI NO: 15222398 NR Description: protein phosphatase 2C
  misc_feature (241)..(277): NCBI GI NO: 15222398 NR Description: protein phosphatase 2C
  misc_feature (1)..(267): NCBI GI NO: 21537020 NR Description: protein phosphatase 2C, putative
  misc_feature (241)..(277): NCBI GI NO: 21537020 NR Description: protein phosphatase 2C, putative

SEQ ID NO: 39190 - DNA, 1486 bp, Zea mays subsp. mays
  misc_feature (1)..(1486): Ceres Seq. ID no. 12366543
aataataaaaagattctcgattcgatttactcgccaattttcagtgagcggcggcgatcggcttcggatcggcgcagcgcggcggagcggagatggttgccgtggcggtggatggcctgatccgcggtgcggacgccgtgccggcggcggagagggaagcggtgagggcggcagctgcggaggcggcggccaagggcggtgagggggaatcggggaaggaggaggtgagggagtatgagagcgacatgaggaagctggaggagctgctttctaagctgaacccctcggcggaggagttcgtgccgcagtcccgccgccgcgtggacggcggcgctccccgcctttcggccgacgcgcccgtgttcgtgtcgccggcgatcgactactacgcgcgccaccaccagctcccgccgccgccgcttctgcagcagcagcagccgatgcacgtgctgcagtttgtgggtggcgtcggcggggttggcatgggtggcggcggggggatggactccagcagcgacggatccgccaatggtcagccgaatcgacggagaaggaacggtttcatccaggggaggagaaggatgatgggtgcccggcctcgtcgagctgacagggaggatagtgtcggcggacagtctatgtctctgacgttgatcagcatgtaactgaacagaaacttgctgaagttttttcaacctgtggacaggtggtagattgccgtatctgtggtgatcctaactcagtgcttcgttttgcttttatcgagtttgctgatgacgttgctgcacaagcagcactagcacttggtggaaccgtgcttggcttttatcctgtcaaggttctgccatcaaagacagcaattttacctgtgaaccctaaatttcttcctcacactgatgatgagaaagaaatggtatccaggactgtgtattgtactaacattgacaagaagatcgcagaagatgaagtgaagcaattctttgagggaacatgtggtgaagtttctcgtctgaggctacttggtgattatgtgcactccacatgcatcgcttttgttgagtttgtccaagcagatagtgctattctcgctctgaactgcagtggcattgttcttggaacgcttcctgttagggtgagcccatcaaagacaccagtccgctcgcgatcgccccgtgtgacgtcatactgaattcggctcatctgaagccgtcgtccagggcagcaaatttctgggcaacaaagccctagtcgtgtggccttagagactgccgcatcgcggataagtaattgtcgttgagcagagttctcgttggttaaagtccagtctagtaggaggcgcagagacccgtctgtatggtcgctgggagatctatcttgacctcctttttctgttctttttggtcttagttatcgtggttggattctatagcagccttgacaggcattcgaacaacaatgtttatggttatcctatccgctttggact

SEQ ID NO: 39191 - protein, 190 aa, Zea mays subsp. mays
  peptide (1)..(190): Ceres Seq. ID no. 12366544
  misc_feature (37)..(79): NCBI GI NO: 15223304 NR Description: RNA-binding protein, putative
  misc_feature (150)..(178): NCBI GI NO: 15220902 NR Description: RNA-binding protein, putative
  misc_feature (1)..(73): NCBI GI NO: 15235177 NR Description: RNA-binding protein RBP37; protein id: At4g10610
  misc_feature (1)..(73): NCBI GI NO: 1174153 NR Description: RNA-binding protein
  misc_feature (38)..(83): NCBI GI NO: 15229132 NR Description: RNA-binding protein, putative
  misc_feature (150)..(178): NCBI GI NO: 8671859 NR Description: Contains similarity to RNA-binding protein fromArabidopsis thaliana gi|2129727 and
  misc_feature (12)..(91): NCBI GI NO: 34903832 NR Description: ATT4F9_7
MVAVAVDGLIRGADAVPAAEREAVRAAAAEAAAKGGEGESGKEEVREYESDMRKLEELLSKLNPSAEEFVPQSRRRVDGGAPRLSADAPVFVSPAIDYYARHHQLPPPPLLQQQQPMHVLQFVGGVGGVGMGGGGGMDSSSDGSANGQPNRRRRNGFIQGRRRMMGARPRRADREDSVGGQSMSLTLISM

SEQ ID NO: 39192 - protein, 139 aa, Zea mays subsp. mays
  peptide (1)..(139): Ceres Seq. ID no. 12366545
  misc_feature (1)..(28): NCBI GI NO: 15223304 NR Description: RNA-binding protein, putative
  misc_feature (99)..(127): NCBI GI NO: 15220902 NR Description: RNA-binding protein, putative
  misc_feature (1)..(22): NCBI GI NO: 15235177 NR Description: RNA-binding protein RBP37; protein id: At4g10610
  misc_feature (1)..(22): NCBI GI NO: 1174153 NR Description: RNA-binding protein
  misc_feature (1)..(32): NCBI GI NO: 15229132 NR Description: RNA-binding protein, putative
  misc_feature (99)..(127): NCBI GI NO: 8671859 NR Description: Contains similarity to RNA-binding protein fromArabidopsis thaliana gi|2129727 and
  misc_feature (1)..(40): NCBI GI NO: 34903832 NR Description: ATT4F9_7
MRKLEELLSKLNPSAEEFVPQSRRRVDGGAPRLSADAPVFVSPAIDYYARHHQLPPPPLLQQQQPMHVLQFVGGVGGVGMGGGGGMDSSSDGSANGQPNRRRRNGFIQGRRRMMGARPRRADREDSVGGQSMSLTLISM

SEQ ID NO: 39193 - DNA, 2138 bp, Zea mays subsp. mays
  misc_feature (1)..(2138): Ceres Seq. ID no. 12369733
gcacgagaccattacctagaacatcctaatcgaaaaaagacgcatcgcttccttgtccatcctacctccccttccccccgcccaaatcccgtgacggtcgccgcccccgccgtgctctcgcccgcgcgggagacgacgcagcacccccccgcgtaggatccgcggcggtcggcaggatggtggtggccacggaggaaatggtggtctactgctttgacaccctcgtcgcctatttcaccggcgagcggccgccgcctcccgccttcgaggatggaaaccagtaagcctccccgcagcgatcgaaaccgggccgcgttgcccccatatcgaggaggtggttttggatccatttcgatatagggttaggccaattcgtgttagatttgggcaaaaggcggcgccttggtagttttggtttcggctcggctcctgttgcgactgattcgcgatccgatctgattgactgtttgttggtcctggcgattgcggaatcgtgtggtcttagttttcgttgcaaggcagaggcgaagtgaagtattcacacttcaatggccacgtacctcgcctttcggcagttgccagcttcctacctctagcgattgtctgacggagaggacaaggaatctcactgctacacatctgagattatgatttaagtaggacagtcagtttaatcctaaggcattcagattctttgggaagttgggaggttaaacaggatgagctttcgtgttctgactgtgacgcactgatgtttcttattcatactccaggattcagacttttaattgagatcctttcaaccgtgtagtccacattaatttgtatggcttgtaaggcatcattgttctagcatacatgtttttaactcattgggtcaatttttttgtaactttggcccattgtttgtgacctggaagaaggctgccaatggttcagaaccacgcctacggggatgcataggaactctggagtcccgtcagattgtcagcggctttagggactacgccctaactaggtgactattgtttcagtattgaaattatgtctgatccaatgctgaaatatctggtcggtactcaaaacgttgatgggcttatgctgtaataagtagaaaagcaatcgtgcactttgtattggataatgtttagatatacggtaatcttgatatcctcttgcagtgcgctgagggaccgacgctttcccccaatacaatcaaaggaactcccaaccttggagtgcacggtatctatactcactgattatgaaattgcagaggactacctcgactgggaggttggaaagcatggtttaattattgaatttacagctccagactccaacacaaaacacagtgcgacctatttgcctgaagttgcgggccatgaaggtgaaaatttcctttttcatcgatgcgatgtacacttatcgtttctacagagttctttagtttctagaattattgcaggggataataagaagaaatgagttaagaaaatatgtaatttcatctttctaaatcatcatggaccaaatgcattataatgagcaataacggtaaaataaagagtcaactgatcagtacattccaaatctgtattgaatagtttgtaacttaggcttaatcttttggcaggttggacacatgtagaaactattgattcactcgtgaggaaggcaggttaccagagaatcatcactgagtccttgaggaagaaaatcaaagtcactcgctaccagagcaccctgtacacgatgcactatggtgaatatgttgcgtacctcaagaagaacagaggtgcagccccgtcaattagtggggctcctcctgtagttaatggcttcaagccaagccattgatttatcagtataaaaaaaagctcaaagaacatattactataatttatctgcgagcaatttggggggtgtagtgtaaccaccccccacagttcattgatctagcatcattcccttcgaaggaaaaggccaaataggggcgtcatgacaagcgcccagaataataatgccttcctggatggatcatggatgatgcttatgtatcttgaaaacacatgtgcttcaagaagttcaaattgtgtggtgaagttaattgattcgagttggccattcctagttcc

SEQ ID NO: 39194 - protein, 114 aa, Zea mays subsp. mays
  peptide (1)..(114): Ceres Seq. ID no. 12369734
  misc_feature (13)..(83): Pfam Name: Pfam Description:  AMMECR1
  misc_feature (13)..(83): NCBI GI NO: 18404840 NR Description: expressed protein; protein id: At2g38710
  misc_feature (13)..(114): NCBI GI NO: 37537060 NR Description: unknown protein
  misc_feature (13)..(83): NCBI GI NO: 34784081 NR Description: Similar to AMMECR1 protein [Danio rerio]
  misc_feature (13)..(83): NCBI GI NO: 7669554 NR Description: AMMECR1 protein [Homo sapiens]
  misc_feature (13)..(79): NCBI GI NO: 23943793 NR Description: hypothetical protein MGC32132 [Mus musculus]
  misc_feature (13)..(79): NCBI GI NO: 34878672 NR Description: similar to hypothetical protein MGC32132
  misc_feature (13)..(83): NCBI GI NO: 9506383 NR Description: AMMECR1 protein [Mus musculus]
  misc_feature (13)..(83): NCBI GI NO: 24649478 NR Description: CG5902-PA [Drosophila melanogaster]
  misc_feature (14)..(83): NCBI GI NO: 17644262 NR Description: bB360B22
  misc_feature (1)..(83): NCBI GI NO: 38511526 NR Description: Unknown (protein for MGC:71655) [Homo sapiens]
MFRYTVILISSCSALRDRRFPPIQSKELPTLECTVSILTDYEIAEDYLDWEVGKHGLIIEFTAPDSNTKHSATYLPEVAGHEGENFLFHRCDVHLSFLQSSLVSRIIAGDNKKK

SEQ ID NO: 39195 - DNA, 981 bp, Zea mays subsp. mays
  misc_feature (1)..(981): Ceres Seq. ID no. 12375363
aaaagaaaaaaaattaacggctcgtcggacctccacgaaaaccaagtccagcagacggacgcgaactgagaaaaatctcacgtgacgacgacggacgcggcggcgatggcgtgccgcgcacttgccctccgcttcctgctcctcccggacccgctacaccgcctcccggccacgccgccatctgttgggagggcatccggctcccgcggtggtcgccgtccgcacctccgctgcagctccggcggcgggggtggggagcccgggcagccgccgcaagaagctgtgctcgaggccatatccaagatagcaaggtctaaaggaagggttgcactcacaacaaatgtggtcatgggtggtactgtgatggacgatgcaagtgatgaatggcttgctctggatcagaaggtaaattcctaccccacagatagaggttttacagcaattggcattggaggtgatgattttgtccagtcgatggtagttgctgttgaatctgttcttcaagaatccattcccaagggccgagtatctcagaaactatcttcaggaggaaaatatgtttctgtaaaaattgggccaattcgtgttgtttcaagtgagcaggtccaagctgtatatcgtgccatgagaagagataacagaatgaaatacttcttatgaagtgcaattgcatgtcctgcacgttccctggtccattccatcatgtaaacaaaaggagtccaacagtacattttcgccacattttgctggactggactggactggacccccgatgaattgcaaaaggaaaatgggaagacttttatgtgccattcatgccctgatggaagcttctcaaataaccctacaggcaatttggtgggatcggttatgttatgtagtgcttgtgtagtacagtgggcgtatatagctactatatatgctaaagttgtattttagtgtctcatattagatgcattttaatattttataaaccatatg

SEQ ID NO: 39196 - protein, 184 aa, Zea mays subsp. mays
  peptide (1)..(184): Ceres Seq. ID no. 12375364
  misc_feature (93)..(184): Pfam Name: DUF493 Pfam Description: Protein of unknown function
  misc_feature (3)..(141): NCBI GI NO: 38347226 NR Description: OSJNBa0044M19.8
  misc_feature (16)..(184): NCBI GI NO: 18396311 NR Description: Expressed protein; protein id: At1g27385
MACRALALRFLLLPDPLHRLPATPPSVGRASGSRGGRRPHLRCSSGGGGGEPGQPPQEAVLEAISKIARSKGRVALTTNVVMGGTVMDDASDEWLALDQKVNSYPTDRGFTAIGIGGDDFVQSMVVAVESVLQESIPKGRVSQKLSSGGKYVSVKIGPIRVVSSEQVQAVYRAMRRDNRMKYFL

SEQ ID NO: 39197 - protein, 103 aa, Zea mays subsp. mays
  peptide (1)..(103): Ceres Seq. ID no. 12375365
  misc_feature (12)..(103): Pfam Name: DUF493 Pfam Description: Protein of unknown function
  misc_feature (1)..(60): NCBI GI NO: 38347226 NR Description: OSJNBa0044M19.8
  misc_feature (1)..(103): NCBI GI NO: 18396311 NR Description: Expressed protein; protein id: At1g27385
MGGTVMDDASDEWLALDQKVNSYPTDRGFTAIGIGGDDFVQSMVVAVESVLQESIPKGRVSQKLSSGGKYVSVKIGPIRVVSSEQVQAVYRAMRRDNRMKYFL

SEQ ID NO: 39198 - protein, 98 aa, Zea mays subsp. mays
  peptide (1)..(98): Ceres Seq. ID no. 12375366
  misc_feature (7)..(98): Pfam Name: DUF493 Pfam Description: Protein of unknown function
  misc_feature (1)..(55): NCBI GI NO: 38347226 NR Description: OSJNBa0044M19.8
  misc_feature (1)..(98): NCBI GI NO: 18396311 NR Description: Expressed protein; protein id: At1g27385
MDDASDEWLALDQKVNSYPTDRGFTAIGIGGDDFVQSMVVAVESVLQESIPKGRVSQKLSSGGKYVSVKIGPIRVVSSEQVQAVYRAMRRDNRMKYFL

SEQ ID NO: 39199 - DNA, 357 bp, Zea mays subsp. mays
  misc_feature (1)..(357): Ceres Seq. ID no. 1981229
aaacctaaacctttcacccgccgccgccgccaccaccagcattgccacttctcaccgcttgcaaccgatgatgccgttctggaagaaaatgacatggttaaaattgatatgggctgtcatattgatggctttattgctgtggtggcacatacacatgtaattacaaatgggcctgtcacaggaagggctggtgatgtgcttgctgctgccaacacagcagcagaagtcgcaatgcggcttgtgagacctgggaagaaaaataaggatgttactgaagcaattcagaaagttgctgctgcttatgattgcaaattgtggaaggtgttcttagccatcaactgaaacaatttgtgattg

SEQ ID NO: 39200 - protein, 113 aa, Zea mays subsp. mays
  peptide (1)..(113): Ceres Seq. ID no. 1981230
  misc_feature (15)..(105): NCBI GI NO: 9652218 NR Description: putative DNA binding protein [Atriplex hortensis]
  misc_feature (15)..(102): NCBI GI NO: 7447216 NR Description: probable DNA-binding protein GBP16 - rice
  misc_feature (16)..(105): NCBI GI NO: 13430628 NR Description: putative nuclear DNA-binding protein G2p
  misc_feature (16)..(105): NCBI GI NO: 15231039 NR Description: putative nuclear DNA-binding protein G2p
  misc_feature (16)..(105): NCBI GI NO: 30693537 NR Description: nuclear DNA-binding protein G2p -related
  misc_feature (15)..(103): NCBI GI NO: 1083448 NR Description: p38-2G4 protein - mouse
  misc_feature (15)..(103): NCBI GI NO: 6755100 NR Description: proliferation-associated 2G4
  misc_feature (15)..(103): NCBI GI NO: 4099506 NR Description: erbB3 binding protein EBP1 [Homo sapiens]
  misc_feature (15)..(103): NCBI GI NO: 33879698 NR Description: Unknown (protein for IMAGE:4661091) [Homo sapiens]
  misc_feature (15)..(103): NCBI GI NO: 34862215 NR Description: similar to proliferation-associated protein 1
KPKPFTRRRRHHQHCHFSPLATDDAVLEENDMVKIDMGCHIDGFIAVVAHTHVITNGPVTGRAGDVLAAANTAAEVAMRLVRPGKKNKDVTEAIQKVAAAYDCKLWKVFLAIN

SEQ ID NO: 39201 - protein, 82 aa, Zea mays subsp. mays
  peptide (1)..(82): Ceres Seq. ID no. 1981231
  misc_feature (1)..(74): NCBI GI NO: 9652218 NR Description: putative DNA binding protein [Atriplex hortensis]
  misc_feature (1)..(71): NCBI GI NO: 7447216 NR Description: probable DNA-binding protein GBP16 - rice
  misc_feature (1)..(74): NCBI GI NO: 13430628 NR Description: putative nuclear DNA-binding protein G2p
  misc_feature (1)..(74): NCBI GI NO: 15231039 NR Description: putative nuclear DNA-binding protein G2p
  misc_feature (1)..(74): NCBI GI NO: 30693537 NR Description: nuclear DNA-binding protein G2p -related
  misc_feature (1)..(72): NCBI GI NO: 1083448 NR Description: p38-2G4 protein - mouse
  misc_feature (1)..(72): NCBI GI NO: 6755100 NR Description: proliferation-associated 2G4
  misc_feature (1)..(72): NCBI GI NO: 4099506 NR Description: erbB3 binding protein EBP1 [Homo sapiens]
  misc_feature (1)..(72): NCBI GI NO: 33879698 NR Description: Unknown (protein for IMAGE:4661091) [Homo sapiens]
  misc_feature (1)..(72): NCBI GI NO: 34862215 NR Description: similar to proliferation-associated protein 1
MVKIDMGCHIDGFIAVVAHTHVITNGPVTGRAGDVLAAANTAAEVAMRLVRPGKKNKDVTEAIQKVAAAYDCKLWKVFLAIN

SEQ ID NO: 39202 - protein, 77 aa, Zea mays subsp. mays
  peptide (1)..(77): Ceres Seq. ID no. 1981232
  misc_feature (1)..(69): NCBI GI NO: 9652218 NR Description: putative DNA binding protein [Atriplex hortensis]
  misc_feature (1)..(66): NCBI GI NO: 7447216 NR Description: probable DNA-binding protein GBP16 - rice
  misc_feature (1)..(69): NCBI GI NO: 13430628 NR Description: putative nuclear DNA-binding protein G2p
  misc_feature (1)..(69): NCBI GI NO: 15231039 NR Description: putative nuclear DNA-binding protein G2p
  misc_feature (1)..(69): NCBI GI NO: 30693537 NR Description: nuclear DNA-binding protein G2p -related
  misc_feature (1)..(67): NCBI GI NO: 1083448 NR Description: p38-2G4 protein - mouse
  misc_feature (1)..(67): NCBI GI NO: 6755100 NR Description: proliferation-associated 2G4
  misc_feature (1)..(67): NCBI GI NO: 4099506 NR Description: erbB3 binding protein EBP1 [Homo sapiens]
  misc_feature (1)..(67): NCBI GI NO: 33879698 NR Description: Unknown (protein for IMAGE:4661091) [Homo sapiens]
  misc_feature (1)..(67): NCBI GI NO: 34862215 NR Description: similar to proliferation-associated protein 1
MGCHIDGFIAVVAHTHVITNGPVTGRAGDVLAAANTAAEVAMRLVRPGKKNKDVTEAIQKVAAAYDCKLWKVFLAIN

SEQ ID NO: 39203 - DNA, 1865 bp, Zea mays subsp. mays
  misc_feature (1)..(1865): Ceres Seq. ID no. 13493199
taatcgaaaaacacacgcgggcgcgctagctagtgagagtcggagatgtcgtcgccgcggccacacttcctcgtgctcaccttccctttccagggccacatcgccccggctctccgcctcgccaggcagctgctcgcggcggcgcccgacgcgctcgtgaccttctccaccaccgaggtcgcgcacaggcgcatgttcccggcaaagcccaacgacggcgccaaggactccgacgaagacggccgcctcgagttcctcccgttctccgacggcacggaggccgggtacgtccggagcgccgacctgggctcgttcaacgcctacatgacgtctttccacgccgcgggggcgcgcagcgccgcggagatcgtggacgcgctcgcggcgcggggccgccccgtgtcccgcgtcgtgtacacgctgctcctcccgtgggcggccgacgtcgcgcgggaccgcgggatcccgtccgcgctctactggatccagccggtctccgtgttcgccatctaccaccactacttccacggccacgccggcgtcgtcgccgaccaccttcacgacccgtcgttcgtcgtggagatgccgggcctggcgccacagccggtcggcgacctgccgtccttcctcaccgactccaccgacccttccaatatgttccacagcgtcttcaccacgatccgagacctgatcgaaacgcttgacaaggaaagccccaggtccactgtcctcgtcaacacgtgccgagagctcgaggtgggcgcgctcgccgccgtgggggcgcaccacgacgtgctccccgtcggcccggtgctcccatccggcggcgacgccggcatcttcaagcaggacgacgacgccaagtacatggagtggctcgacgccaaaccggcgaattccgtggtgtacgtctccttcggcagtctgaccacggtggcgagagaacatctcgaggagctgctccggggccttgaggagagcggcaggccgtacctctgcgtcatccggaaggacaacaaggctgcactcgcggatgccgagacgaaggtagacgaggagctcaagaacggcatcgtagtggagtggtgcgaccaggtgcgggtgctgtcgcacgcggcggtcgggtgcttcgtgacgcactgtggctggaactcggtgctggagagcctggcggcgggggtgcccatggtgtgcgtgccccggatgtcggaccagcgcaccaacgctcaacttgtcgtgcgcgagtggcgcgtcggcgtgcgcgcgcaggtggacgatggtggcgtgctgcgagcggcggaggtgcggcggtgcatcgacgaggcgatggggaatttggaggccgccgcggaggtgcgacgcatggcggcggagtggaagcaggtagtgacaaaggccatgggaaaaggagggtcgtcggatcgtaatctcatgacgttcgtggatggcgcgaggaacgccgtttgaagattggcatgtgtttctttctttcttcacgttcggttacaccaatccagaaaaagattagcttgttcggttacattaatccaaaagagaattgggggagaattggttacatcaatcaaccaatcctattatgaattggtgtaaccgaacaaaccataagtggtcaaaggcggatggcttccggccattgacgtacggggccagacaaccgctggctccacgcgttattgactggtccacaactacttttctagaagttacggtataggatccagttgtgttaactgtggacattatgttgtcagtagctgttaagcttttcaacgtctgcttgactggacgactgctcccgataaactaggttatcttatattcatacagaactaaatcttagacct

SEQ ID NO: 39204 - protein, 473 aa, Zea mays subsp. mays
  peptide (1)..(473): Ceres Seq. ID no. 13493200
  misc_feature (26)..(470): Pfam Name: Pfam Description:  UDP-glucoronosyl and UDP-glucosyl transferase
  misc_feature (1)..(470): NCBI GI NO: 34906162 NR Description: putative anthocyanin 5-O-glucosyltransferase
  misc_feature (5)..(466): NCBI GI NO: 14192682 NR Description: cold-induced glucosyl transferase
  misc_feature (5)..(467): NCBI GI NO: 6683052 NR Description: anthocyanin 5-O-glucosyltransferase
  misc_feature (5)..(466): NCBI GI NO: 20146093 NR Description: glucosyltransferase NTGT2 [Nicotiana tabacum]
  misc_feature (5)..(468): NCBI GI NO: 40714353 NR Description: anthocyanin 5-O-glucosyltransferase
  misc_feature (2)..(467): NCBI GI NO: 18414478 NR Description: UDP-glucose: indole-3-acetate beta-D-glucosyltransferase
  misc_feature (2)..(467): NCBI GI NO: 2149127 NR Description: UDP-glucose: indole-3-acetate beta-D-glucosyltransferase
  misc_feature (5)..(466): NCBI GI NO: 4115559 NR Description: UDP-glucose:anthocysnin 5-O-glucosyltransferase
  misc_feature (6)..(467): NCBI GI NO: 18390540 NR Description: UDP-glucose transferase(UGT1)
  misc_feature (144)..(467): NCBI GI NO: 7433892 NR Description: hypothetical protein - Arabidopsis thaliana
MSSPRPHFLVLTFPFQGHIAPALRLARQLLAAAPDALVTFSTTEVAHRRMFPAKPNDGAKDSDEDGRLEFLPFSDGTEAGYVRSADLGSFNAYMTSFHAAGARSAAEIVDALAARGRPVSRVVYTLLLPWAADVARDRGIPSALYWIQPVSVFAIYHHYFHGHAGVVADHLHDPSFVVEMPGLAPQPVGDLPSFLTDSTDPSNMFHSVFTTIRDLIETLDKESPRSTVLVNTCRELEVGALAAVGAHHDVLPVGPVLPSGGDAGIFKQDDDAKYMEWLDAKPANSVVYVSFGSLTTVAREHLEELLRGLEESGRPYLCVIRKDNKAALADAETKVDEELKNGIVVEWCDQVRVLSHAAVGCFVTHCGWNSVLESLAAGVPMVCVPRMSDQRTNAQLVVREWRVGVRAQVDDGGVLRAAEVRRCIDEAMGNLEAAAEVRRMAAEWKQVVTKAMGKGGSSDRNLMTFVDGARNAV

SEQ ID NO: 39205 - protein, 424 aa, Zea mays subsp. mays
  peptide (1)..(424): Ceres Seq. ID no. 13493201
  misc_feature (1)..(421): Pfam Name: Pfam Description:  UDP-glucoronosyl and UDP-glucosyl transferase
  misc_feature (1)..(421): NCBI GI NO: 34906162 NR Description: putative anthocyanin 5-O-glucosyltransferase
  misc_feature (1)..(417): NCBI GI NO: 14192682 NR Description: cold-induced glucosyl transferase
  misc_feature (1)..(418): NCBI GI NO: 6683052 NR Description: anthocyanin 5-O-glucosyltransferase
  misc_feature (1)..(417): NCBI GI NO: 20146093 NR Description: glucosyltransferase NTGT2 [Nicotiana tabacum]
  misc_feature (1)..(419): NCBI GI NO: 40714353 NR Description: anthocyanin 5-O-glucosyltransferase
  misc_feature (1)..(418): NCBI GI NO: 18414478 NR Description: UDP-glucose: indole-3-acetate beta-D-glucosyltransferase
  misc_feature (1)..(418): NCBI GI NO: 2149127 NR Description: UDP-glucose: indole-3-acetate beta-D-glucosyltransferase
  misc_feature (1)..(417): NCBI GI NO: 4115559 NR Description: UDP-glucose:anthocysnin 5-O-glucosyltransferase
  misc_feature (1)..(418): NCBI GI NO: 18390540 NR Description: UDP-glucose transferase(UGT1)
  misc_feature (95)..(418): NCBI GI NO: 7433892 NR Description: hypothetical protein - Arabidopsis thaliana
MFPAKPNDGAKDSDEDGRLEFLPFSDGTEAGYVRSADLGSFNAYMTSFHAAGARSAAEIVDALAARGRPVSRVVYTLLLPWAADVARDRGIPSALYWIQPVSVFAIYHHYFHGHAGVVADHLHDPSFVVEMPGLAPQPVGDLPSFLTDSTDPSNMFHSVFTTIRDLIETLDKESPRSTVLVNTCRELEVGALAAVGAHHDVLPVGPVLPSGGDAGIFKQDDDAKYMEWLDAKPANSVVYVSFGSLTTVAREHLEELLRGLEESGRPYLCVIRKDNKAALADAETKVDEELKNGIVVEWCDQVRVLSHAAVGCFVTHCGWNSVLESLAAGVPMVCVPRMSDQRTNAQLVVREWRVGVRAQVDDGGVLRAAEVRRCIDEAMGNLEAAAEVRRMAAEWKQVVTKAMGKGGSSDRNLMTFVDGARNAV

SEQ ID NO: 39206 - protein, 380 aa, Zea mays subsp. mays
  peptide (1)..(380): Ceres Seq. ID no. 13493202
  misc_feature (1)..(377): Pfam Name: Pfam Description:  UDP-glucoronosyl and UDP-glucosyl transferase
  misc_feature (1)..(377): NCBI GI NO: 34906162 NR Description: putative anthocyanin 5-O-glucosyltransferase
  misc_feature (1)..(373): NCBI GI NO: 14192682 NR Description: cold-induced glucosyl transferase
  misc_feature (1)..(374): NCBI GI NO: 6683052 NR Description: anthocyanin 5-O-glucosyltransferase
  misc_feature (1)..(373): NCBI GI NO: 20146093 NR Description: glucosyltransferase NTGT2 [Nicotiana tabacum]
  misc_feature (1)..(375): NCBI GI NO: 40714353 NR Description: anthocyanin 5-O-glucosyltransferase
  misc_feature (1)..(374): NCBI GI NO: 18414478 NR Description: UDP-glucose: indole-3-acetate beta-D-glucosyltransferase
  misc_feature (1)..(374): NCBI GI NO: 2149127 NR Description: UDP-glucose: indole-3-acetate beta-D-glucosyltransferase
  misc_feature (1)..(373): NCBI GI NO: 4115559 NR Description: UDP-glucose:anthocysnin 5-O-glucosyltransferase
  misc_feature (1)..(374): NCBI GI NO: 18390540 NR Description: UDP-glucose transferase(UGT1)
  misc_feature (51)..(374): NCBI GI NO: 7433892 NR Description: hypothetical protein - Arabidopsis thaliana
MTSFHAAGARSAAEIVDALAARGRPVSRVVYTLLLPWAADVARDRGIPSALYWIQPVSVFAIYHHYFHGHAGVVADHLHDPSFVVEMPGLAPQPVGDLPSFLTDSTDPSNMFHSVFTTIRDLIETLDKESPRSTVLVNTCRELEVGALAAVGAHHDVLPVGPVLPSGGDAGIFKQDDDAKYMEWLDAKPANSVVYVSFGSLTTVAREHLEELLRGLEESGRPYLCVIRKDNKAALADAETKVDEELKNGIVVEWCDQVRVLSHAAVGCFVTHCGWNSVLESLAAGVPMVCVPRMSDQRTNAQLVVREWRVGVRAQVDDGGVLRAAEVRRCIDEAMGNLEAAAEVRRMAAEWKQVVTKAMGKGGSSDRNLMTFVDGARNAV

SEQ ID NO: 39207 - DNA, 2759 bp, Zea mays subsp. mays
  misc_feature (1)..(2759): Ceres Seq. ID no. 12362557
gcacgaaccattacctagaacatcctaatcgaaaagtcctctcccccacaggatctagggtttgctcgctcggccttcgtccttcttgggccgagccctaattcttctgcaccgccacccagcaggcttcggtttggttcgcatccgctgcgcccgcttcgtccccgtacgtattcttggattccattggcttctatcttcagcatggatgagccaaacaacaattttaatgcaacggtgcatgccaatgagatgtttgatagcaatggtgtgatccatgaagatgagatggcccatgacgatgagatgatccatggccatgcgatgttccttggcgatgagatgattcgtgggaccgagatggttgaaggaagtgagatgatccatggtcatgatatggttcaggttaatgatctcatccacggcaatgagatggttccagttcacgacatggtcaacggtgacaagatagcccatggtaatgaattggttaatgctcagatgaccccacgaatatcaagacgtcggaagaagaagtcgctagtttgggagcacttcactatagaactcatgccagggggaagttcaagagcatgctgcaagttatgcaagcaaacctttgcgtatagttctggctcaaaaattgcaggcactagccatctcaagcggcacatcacactaggctcctgtcctgttatgaaagaccaagacaggaagctagcattgccacttgcagggggccatgtcactgataatgatggcgagggtactgcagaacgtcctactaagaggcgttacagatacactggttatgcaaatgctacttttgatccacagcggagcacctcttatctgacaaagatgataattttgcatgactacccacttcacattgctcaacagtcatcctttattaattttattgagagtctgcagcctcgtttcagagttgtagatgtggagacaatggaaggagaggtgtatgctgttttccagaaagcaaaagaaaacctgttgcaagcattcagcactatgccaggaaggatcagcctcactataggactctggacaaccagtcagactcttggctatgtttctcttgctgggcagtttattgactccgattggaaagtgcaccgaagaatgctcaacttcatgatggtgtcttctccccattcagagaatgcacttagtgaagctattagctcaagcctttctgagtggaatatgaaggacaagctgttcactatcacattggataatgattgctcttcccatgatatttacagtgcaaatcttagggatcacctctccaataagaacaacgtcatgcttaagggacagctctttgttgtgaggtgctatgcacatatcctgaatgtagttgctcaagatgtaattgcttcgattcatggtgtgatttacagcatccgtgagagtatcaagttcataaaagcttctccaagtcgtgaggagaagtttgctgagattgctctgcagctggagattcccagtaccaagactctttgtttagatgttacaacccagtggaacacaacttatctgatgctactggctgccttggactataagcaggcttttgctacactggagacatgtgatgataattacaatgaatctccttcagcagaggactggaagaaagttgaggctagctgtaattacctgaaactgctatatgactctgcacatagtgtgatggcttcagcgaaccctactgcaaacatctttttccatgaagcttggaaaattcagcttgaactagccaatggcacagaacatggaagtccctttttcagctgtattgccaaggatatgcatgagagatttgacaaatactggaaagattgcagcctggtgttagccattgctgttgttatggatccacgtttcaagatgaagcttgtcgagttcagttactctaaaatttatggtgctgaggctgcaaaatatgttaaggttgtcaatgactctctgcatgagctgtataaggagtatgtggcacagacactccccttggctcctgcctatgttgaagctaataacgtggctgccaacacgaatgttaaccagggaaatcctcctccaactagtgatggtcttcttgactttgatatgtacctttctgagattcaaagtagccagcctgcaaaatgtgaactggagcagtatctggaggaatctctcactccacgcatccaggagtttgatattcttaactggtggaagcttaatacactcaagtttccaaccctgtcgaagatggcccgtgatatcttggcaatcccaatgtcgatggttagcagtggcagctccatattctctgctggaactgggaaccgcatgcttgatgattacagaagctctctccggccggagactgtggaggcacttgtatgcgcaaaagactggctccagtattcaccggccgcaactgaggcgccaggttctgagatgatgaaggcagaagcattgtagattgccgatactgcttccctgttgaagcacaaataaggttgcagtatctttgagcatagttaacagtaggtatattttagacagcagttgcagacatatatttcttctggcatttatctcatagtggtctaatttgtcatgtcgaacaaagtttaactcattgtagtgtgtgctgagtttatctgtggtctgacccggcacacatggtgtgggtgcaaactgcaaactgcgggattttttagggattcaggttgttgagc

SEQ ID NO: 39208 - protein, 764 aa, Zea mays subsp. mays
  peptide (1)..(764): Ceres Seq. ID no. 12362558
  misc_feature (659)..(744): Pfam Name: Pfam Description:  hAT family dimerisation domain
  misc_feature (191)..(748): NCBI GI NO: 20521440 NR Description: B1003B09.3
  misc_feature (45)..(170): NCBI GI NO: 20521440 NR Description: B1003B09.3
  misc_feature (72)..(649): NCBI GI NO: 15228474 NR Description: putative transposase; protein id: At3g42170.1
  misc_feature (637)..(763): NCBI GI NO: 15228474 NR Description: putative transposase; protein id: At3g42170.1
  misc_feature (105)..(630): NCBI GI NO: 15220044 NR Description: hypothetical protein; protein id: At1g80020.1
  misc_feature (638)..(761): NCBI GI NO: 15220044 NR Description: hypothetical protein; protein id: At1g80020.1
  misc_feature (135)..(618): NCBI GI NO: 15218119 NR Description: hypothetical protein; protein id: At1g15300
  misc_feature (613)..(745): NCBI GI NO: 15218119 NR Description: hypothetical protein; protein id: At1g15300
  misc_feature (104)..(751): NCBI GI NO: 22331085 NR Description: hypothetical protein; protein id: At3g14800
  misc_feature (104)..(744): NCBI GI NO: 30683310 NR Description: expressed protein [Arabidopsis thaliana]
MDEPNNNFNATVHANEMFDSNGVIHEDEMAHDDEMIHGHAMFLGDEMIRGTEMVEGSEMIHGHDMVQVNDLIHGNEMVPVHDMVNGDKIAHGNELVNAQMTPRISRRRKKKSLVWEHFTIELMPGGSSRACCKLCKQTFAYSSGSKIAGTSHLKRHITLGSCPVMKDQDRKLALPLAGGHVTDNDGEGTAERPTKRRYRYTGYANATFDPQRSTSYLTKMIILHDYPLHIAQQSSFINFIESLQPRFRVVDVETMEGEVYAVFQKAKENLLQAFSTMPGRISLTIGLWTTSQTLGYVSLAGQFIDSDWKVHRRMLNFMMVSSPHSENALSEAISSSLSEWNMKDKLFTITLDNDCSSHDIYSANLRDHLSNKNNVMLKGQLFVVRCYAHILNVVAQDVIASIHGVIYSIRESIKFIKASPSREEKFAEIALQLEIPSTKTLCLDVTTQWNTTYLMLLAALDYKQAFATLETCDDNYNESPSAEDWKKVEASCNYLKLLYDSAHSVMASANPTANIFFHEAWKIQLELANGTEHGSPFFSCIAKDMHERFDKYWKDCSLVLAIAVVMDPRFKMKLVEFSYSKIYGAEAAKYVKVVNDSLHELYKEYVAQTLPLAPAYVEANNVAANTNVNQGNPPPTSDGLLDFDMYLSEIQSSQPAKCELEQYLEESLTPRIQEFDILNWWKLNTLKFPTLSKMARDILAIPMSMVSSGSSIFSAGTGNRMLDDYRSSLRPETVEALVCAKDWLQYSPAATEAPGSEMMKAEAL

SEQ ID NO: 39209 - protein, 748 aa, Zea mays subsp. mays
  peptide (1)..(748): Ceres Seq. ID no. 12362559
  misc_feature (643)..(728): Pfam Name: Pfam Description:  hAT family dimerisation domain
  misc_feature (175)..(732): NCBI GI NO: 20521440 NR Description: B1003B09.3
  misc_feature (29)..(154): NCBI GI NO: 20521440 NR Description: B1003B09.3
  misc_feature (56)..(633): NCBI GI NO: 15228474 NR Description: putative transposase; protein id: At3g42170.1
  misc_feature (621)..(747): NCBI GI NO: 15228474 NR Description: putative transposase; protein id: At3g42170.1
  misc_feature (89)..(614): NCBI GI NO: 15220044 NR Description: hypothetical protein; protein id: At1g80020.1
  misc_feature (622)..(745): NCBI GI NO: 15220044 NR Description: hypothetical protein; protein id: At1g80020.1
  misc_feature (119)..(602): NCBI GI NO: 15218119 NR Description: hypothetical protein; protein id: At1g15300
  misc_feature (597)..(729): NCBI GI NO: 15218119 NR Description: hypothetical protein; protein id: At1g15300
  misc_feature (88)..(735): NCBI GI NO: 22331085 NR Description: hypothetical protein; protein id: At3g14800
  misc_feature (88)..(728): NCBI GI NO: 30683310 NR Description: expressed protein [Arabidopsis thaliana]
MFDSNGVIHEDEMAHDDEMIHGHAMFLGDEMIRGTEMVEGSEMIHGHDMVQVNDLIHGNEMVPVHDMVNGDKIAHGNELVNAQMTPRISRRRKKKSLVWEHFTIELMPGGSSRACCKLCKQTFAYSSGSKIAGTSHLKRHITLGSCPVMKDQDRKLALPLAGGHVTDNDGEGTAERPTKRRYRYTGYANATFDPQRSTSYLTKMIILHDYPLHIAQQSSFINFIESLQPRFRVVDVETMEGEVYAVFQKAKENLLQAFSTMPGRISLTIGLWTTSQTLGYVSLAGQFIDSDWKVHRRMLNFMMVSSPHSENALSEAISSSLSEWNMKDKLFTITLDNDCSSHDIYSANLRDHLSNKNNVMLKGQLFVVRCYAHILNVVAQDVIASIHGVIYSIRESIKFIKASPSREEKFAEIALQLEIPSTKTLCLDVTTQWNTTYLMLLAALDYKQAFATLETCDDNYNESPSAEDWKKVEASCNYLKLLYDSAHSVMASANPTANIFFHEAWKIQLELANGTEHGSPFFSCIAKDMHERFDKYWKDCSLVLAIAVVMDPRFKMKLVEFSYSKIYGAEAAKYVKVVNDSLHELYKEYVAQTLPLAPAYVEANNVAANTNVNQGNPPPTSDGLLDFDMYLSEIQSSQPAKCELEQYLEESLTPRIQEFDILNWWKLNTLKFPTLSKMARDILAIPMSMVSSGSSIFSAGTGNRMLDDYRSSLRPETVEALVCAKDWLQYSPAATEAPGSEMMKAEAL

SEQ ID NO: 39210 - protein, 736 aa, Zea mays subsp. mays
  peptide (1)..(736): Ceres Seq. ID no. 12362560
  misc_feature (631)..(716): Pfam Name: Pfam Description:  hAT family dimerisation domain
  misc_feature (163)..(720): NCBI GI NO: 20521440 NR Description: B1003B09.3
  misc_feature (17)..(142): NCBI GI NO: 20521440 NR Description: B1003B09.3
  misc_feature (44)..(621): NCBI GI NO: 15228474 NR Description: putative transposase; protein id: At3g42170.1
  misc_feature (609)..(735): NCBI GI NO: 15228474 NR Description: putative transposase; protein id: At3g42170.1
  misc_feature (77)..(602): NCBI GI NO: 15220044 NR Description: hypothetical protein; protein id: At1g80020.1
  misc_feature (610)..(733): NCBI GI NO: 15220044 NR Description: hypothetical protein; protein id: At1g80020.1
  misc_feature (107)..(590): NCBI GI NO: 15218119 NR Description: hypothetical protein; protein id: At1g15300
  misc_feature (585)..(717): NCBI GI NO: 15218119 NR Description: hypothetical protein; protein id: At1g15300
  misc_feature (76)..(723): NCBI GI NO: 22331085 NR Description: hypothetical protein; protein id: At3g14800
  misc_feature (76)..(716): NCBI GI NO: 30683310 NR Description: expressed protein [Arabidopsis thaliana]
MAHDDEMIHGHAMFLGDEMIRGTEMVEGSEMIHGHDMVQVNDLIHGNEMVPVHDMVNGDKIAHGNELVNAQMTPRISRRRKKKSLVWEHFTIELMPGGSSRACCKLCKQTFAYSSGSKIAGTSHLKRHITLGSCPVMKDQDRKLALPLAGGHVTDNDGEGTAERPTKRRYRYTGYANATFDPQRSTSYLTKMIILHDYPLHIAQQSSFINFIESLQPRFRVVDVETMEGEVYAVFQKAKENLLQAFSTMPGRISLTIGLWTTSQTLGYVSLAGQFIDSDWKVHRRMLNFMMVSSPHSENALSEAISSSLSEWNMKDKLFTITLDNDCSSHDIYSANLRDHLSNKNNVMLKGQLFVVRCYAHILNVVAQDVIASIHGVIYSIRESIKFIKASPSREEKFAEIALQLEIPSTKTLCLDVTTQWNTTYLMLLAALDYKQAFATLETCDDNYNESPSAEDWKKVEASCNYLKLLYDSAHSVMASANPTANIFFHEAWKIQLELANGTEHGSPFFSCIAKDMHERFDKYWKDCSLVLAIAVVMDPRFKMKLVEFSYSKIYGAEAAKYVKVVNDSLHELYKEYVAQTLPLAPAYVEANNVAANTNVNQGNPPPTSDGLLDFDMYLSEIQSSQPAKCELEQYLEESLTPRIQEFDILNWWKLNTLKFPTLSKMARDILAIPMSMVSSGSSIFSAGTGNRMLDDYRSSLRPETVEALVCAKDWLQYSPAATEAPGSEMMKAEAL

SEQ ID NO: 39211 - DNA, 1748 bp, Zea mays subsp. mays
  misc_feature (1)..(1748): Ceres Seq. ID no. 12391465
gactagaagaaagctgaaattacctcatgatcagctctggtggaaatacgccaccttgattgcccactctccgcccgtcgtcgccacaactcgcccgcggtacaacggcccggctaaaacgaggcagggcgcgcacttaaaatagcccggcacggcgcgtacccaccaccacccgcccgccccgcgccgcgcaggcaccacccgctctcctgcggcctcctcctgtttgtgttttcaccgtggtgccgccgccgctgtcccctctctccagctgcggcgaccgcgaccgacaggcggtagagggcaaaggctagcgagatgacgaagctgccgtggtggcgcgccgacgcgtcggagctggtggccgtgacggcgatgggagtgtgggaggccgtgctcgccggcggcggcaggagattcatcaagcggaaggacagcgacgccggcgagaccggttcgcatccccaccaccctgtgttgatcctgaacatttttttcaaaaaaaaggatctttccgccggctctgttggggttgatggcgaaagaagagctcttcctttggctttgcgcggtcgggcactggaggagttgcgaagctccttgtacaatgaaatgcatagcgcagaaggtgctaagcgccagcagcagcgattctgtggaccaagtgttgcattgacattcaattttgctgttgctgttgggattatcatggcaaacaaaatggtgatggggagtgttggatttaaatttccaattgcactctcattaattcattatgcagttgcatttgttctaatggccacccttaagacattatccttgttaccagttgccccaccatcgaaatccactcctttctcatctatatttgctttgggtgctgtaatgtccctgtccactgggctagccaacgtgagtttgaaacataacagtgtaggtttctatcaaatggctaagattgctgtaaccccaacaattgtcgtagcagaattcatgcttttccagaagaaagtttcctctaaaaaggctgtcacactggcagttgtgtcatttggagtcgctgtagcgactgttaccgatctggagttcaacttttttggtgcttgtgttgcattagcatggattgttcctagtgccgtgaacaaaatcctttggtcaagtttgcaacagagtggaaactggaccgcccttgcgctgatgtggaagacaactccgattacgatatttttcttgttgacattgatgcctttgctggacccccctggcctcttgttgttcaattggaacttcagaaacagctgcgctgttatcatctctgcattgttcggtttccttcttcagtggtctggtgctttggcactcggcgcgacgtcagctttgtctcatgttgtgctgggccaattcaaaacgatcgtcatcatgctctccggctacctgatcttcggctccgaccctgggatcaccagcgtctgcggtgccgtgctcgcactcggcggcatgtccttctacacctacctgggtctgaagaaagaccccgcgaccagcggcaagaaagcaccatcgagacagaactccttcatggagagacctaaggtcgctgctgacgacagtgacgacgcggattcagagcaagatgatactgtataggttggggaaactgtcgtctaggccacttaatgcaaagatcaatccgagctcagttaattttcggttggttgtaatctgtcggtgaccgagtccatttttgt

SEQ ID NO: 39212 - protein, 442 aa, Zea mays subsp. mays
  peptide (1)..(442): Ceres Seq. ID no. 12391466
  misc_feature (129)..(252): Pfam Name: Pfam Description:  Integral membrane protein DUF6
  misc_feature (75)..(430): NCBI GI NO: 15241097 NR Description: putative protein; protein id: At5g55950
  misc_feature (20)..(46): NCBI GI NO: 15241097 NR Description: putative protein; protein id: At5g55950
  misc_feature (76)..(430): NCBI GI NO: 21593061 NR Description: unknown [Arabidopsis thaliana]
  misc_feature (84)..(433): NCBI GI NO: 15242035 NR Description: putative protein; protein id: At5g57100
  misc_feature (84)..(433): NCBI GI NO: 21553668 NR Description: unknown [Arabidopsis thaliana]
  misc_feature (84)..(433): NCBI GI NO: 27808610 NR Description: At5g57100 [Arabidopsis thaliana]
  misc_feature (118)..(422): NCBI GI NO: 15238957 NR Description: putative protein; protein id: At5g42420.1
  misc_feature (118)..(436): NCBI GI NO: 34896140 NR Description: P0701D05.25
  misc_feature (118)..(413): NCBI GI NO: 13699188 NR Description: putative glucose-6-phosphate/phosphate-tranlocat or
  misc_feature (110)..(442): NCBI GI NO: 22329373 NR Description: unknown protein; protein id: At1g06890
MTKLPWWRADASELVAVTAMGVWEAVLAGGGRRFIKRKDSDAGETGSHPHHPVLILNIFFKKKDLSAGSVGVDGERRALPLALRGRALEELRSSLYNEMHSAEGAKRQQQRFCGPSVALTFNFAVAVGIIMANKMVMGSVGFKFPIALSLIHYAVAFVLMATLKTLSLLPVAPPSKSTPFSSIFALGAVMSLSTGLANVSLKHNSVGFYQMAKIAVTPTIVVAEFMLFQKKVSSKKAVTLAVVSFGVAVATVTDLEFNFFGACVALAWIVPSAVNKILWSSLQQSGNWTALALMWKTTPITIFFLLTLMPLLDPPGLLLFNWNFRNSCAVIISALFGFLLQWSGALALGATSALSHVVLGQFKTIVIMLSGYLIFGSDPGITSVCGAVLALGGMSFYTYLGLKKDPATSGKKAPSRQNSFMERPKVAADDSDDADSEQDDTV

SEQ ID NO: 39213 - protein, 423 aa, Zea mays subsp. mays
  peptide (1)..(423): Ceres Seq. ID no. 12391467
  misc_feature (110)..(233): Pfam Name: Pfam Description:  Integral membrane protein DUF6
  misc_feature (56)..(411): NCBI GI NO: 15241097 NR Description: putative protein; protein id: At5g55950
  misc_feature (1)..(27): NCBI GI NO: 15241097 NR Description: putative protein; protein id: At5g55950
  misc_feature (57)..(411): NCBI GI NO: 21593061 NR Description: unknown [Arabidopsis thaliana]
  misc_feature (65)..(414): NCBI GI NO: 15242035 NR Description: putative protein; protein id: At5g57100
  misc_feature (65)..(414): NCBI GI NO: 21553668 NR Description: unknown [Arabidopsis thaliana]
  misc_feature (65)..(414): NCBI GI NO: 27808610 NR Description: At5g57100 [Arabidopsis thaliana]
  misc_feature (99)..(403): NCBI GI NO: 15238957 NR Description: putative protein; protein id: At5g42420.1
  misc_feature (99)..(417): NCBI GI NO: 34896140 NR Description: P0701D05.25
  misc_feature (99)..(394): NCBI GI NO: 13699188 NR Description: putative glucose-6-phosphate/phosphate-tranlocat or
  misc_feature (91)..(423): NCBI GI NO: 22329373 NR Description: unknown protein; protein id: At1g06890
MGVWEAVLAGGGRRFIKRKDSDAGETGSHPHHPVLILNIFFKKKDLSAGSVGVDGERRALPLALRGRALEELRSSLYNEMHSAEGAKRQQQRFCGPSVALTFNFAVAVGIIMANKMVMGSVGFKFPIALSLIHYAVAFVLMATLKTLSLLPVAPPSKSTPFSSIFALGAVMSLSTGLANVSLKHNSVGFYQMAKIAVTPTIVVAEFMLFQKKVSSKKAVTLAVVSFGVAVATVTDLEFNFFGACVALAWIVPSAVNKILWSSLQQSGNWTALALMWKTTPITIFFLLTLMPLLDPPGLLLFNWNFRNSCAVIISALFGFLLQWSGALALGATSALSHVVLGQFKTIVIMLSGYLIFGSDPGITSVCGAVLALGGMSFYTYLGLKKDPATSGKKAPSRQNSFMERPKVAADDSDDADSEQDDTV

SEQ ID NO: 39214 - protein, 344 aa, Zea mays subsp. mays
  peptide (1)..(344): Ceres Seq. ID no. 12391468
  misc_feature (31)..(154): Pfam Name: Pfam Description:  Integral membrane protein DUF6
  misc_feature (1)..(332): NCBI GI NO: 15241097 NR Description: putative protein; protein id: At5g55950
  misc_feature (1)..(332): NCBI GI NO: 21593061 NR Description: unknown [Arabidopsis thaliana]
  misc_feature (1)..(335): NCBI GI NO: 15242035 NR Description: putative protein; protein id: At5g57100
  misc_feature (1)..(335): NCBI GI NO: 21553668 NR Description: unknown [Arabidopsis thaliana]
  misc_feature (1)..(335): NCBI GI NO: 27808610 NR Description: At5g57100 [Arabidopsis thaliana]
  misc_feature (20)..(324): NCBI GI NO: 15238957 NR Description: putative protein; protein id: At5g42420.1
  misc_feature (20)..(338): NCBI GI NO: 34896140 NR Description: P0701D05.25
  misc_feature (20)..(315): NCBI GI NO: 13699188 NR Description: putative glucose-6-phosphate/phosphate-tranlocat or
  misc_feature (12)..(344): NCBI GI NO: 22329373 NR Description: unknown protein; protein id: At1g06890
  misc_feature (12)..(341): NCBI GI NO: 27311731 NR Description: putative integral membrane protein
MHSAEGAKRQQQRFCGPSVALTFNFAVAVGIIMANKMVMGSVGFKFPIALSLIHYAVAFVLMATLKTLSLLPVAPPSKSTPFSSIFALGAVMSLSTGLANVSLKHNSVGFYQMAKIAVTPTIVVAEFMLFQKKVSSKKAVTLAVVSFGVAVATVTDLEFNFFGACVALAWIVPSAVNKILWSSLQQSGNWTALALMWKTTPITIFFLLTLMPLLDPPGLLLFNWNFRNSCAVIISALFGFLLQWSGALALGATSALSHVVLGQFKTIVIMLSGYLIFGSDPGITSVCGAVLALGGMSFYTYLGLKKDPATSGKKAPSRQNSFMERPKVAADDSDDADSEQDDTV

SEQ ID NO: 39215 - DNA, 847 bp, Zea mays subsp. mays
  misc_feature (1)..(847): Ceres Seq. ID no. 12390186
gcacgagaccattacctagaacatcctaatcgaaaaagtggcgcttggggctgttcgttgtggtggtgcggcaggaagagacgatggcgcgaggtggcgcgtgggccgcggtggcggcggcggccgtgtggtggatggcggcgggggccggggcggtatggctggagattgcgccgtcagggactaagtgtgtgtcggaggagatccaatccaacgttgttgtcatcggcgactactccgtcctctatgatcaccaccacgcccagcctaccatctccgtcaaggttacgtccccttttggagacattgttcataagaaagagaaggtttcgatggggcaatttgcatttaccacagcagaagcagggaactaccttgcctgcttctcaattgatggtgaggacagagggttagtggtgaagctaaaccttgactggaaaattgggctggctagtagagactgggattctgttgccaaaaaggaaaagatcgagggagttgaactggagttgctcaagctcgaagttgctgtccaatcaatccatgacaacctgctgctactaaaatccaaagaagctaacatgagggacgtcagtgagcagacgaattctagggtcacgtggctgagcatgctgtctcttgttgtttgcattgcagtctctgttttacagctgtggcatctacaacagtacttccgaaagatgaagctcatctgacctgatgtctgaaatatagtgctctgcaataagcttatcttcatctttttttttttttgcatatgagatctggtagttccaccgtcgagcctagcaattgtaaataaaatggtataacaaactgaaatccc

SEQ ID NO: 39216 - protein, 210 aa, Zea mays subsp. mays
  peptide (1)..(210): Ceres Seq. ID no. 12390187
  misc_feature (12)..(210): Pfam Name: Pfam Description:  emp24/gp25L/p24 family
  misc_feature (24)..(210): NCBI GI NO: 15217563 NR Description: unknown protein; protein id: At1g09580.1
  misc_feature (12)..(210): NCBI GI NO: 15223626 NR Description: integral membrane protein, putative
  misc_feature (1)..(210): NCBI GI NO: 15219136 NR Description: transmembrane protein, putative
  misc_feature (60)..(186): NCBI GI NO: 40641597 NR Description: putative transmembrane protein-like protein
  misc_feature (3)..(210): NCBI GI NO: 33146897 NR Description: putative transmembrane protein
  misc_feature (21)..(210): NCBI GI NO: 15228372 NR Description: putative membrane protein; protein id: At3g10780.1
  misc_feature (28)..(210): NCBI GI NO: 15223027 NR Description: unknown protein; protein id: At1g14010.1
  misc_feature (28)..(210): NCBI GI NO: 21618241 NR Description: unknown [Arabidopsis thaliana]
  misc_feature (28)..(210): NCBI GI NO: 8778403 NR Description: F16A14.23 [Arabidopsis thaliana]
  misc_feature (28)..(210): NCBI GI NO: 18396016 NR Description: expressed protein; protein id: At1g26690
MARGGAWAAVAAAAVWWMAAGAGAVWLEIAPSGTKCVSEEIQSNVVVIGDYSVLYDHHHAQPTISVKVTSPFGDIVHKKEKVSMGQFAFTTAEAGNYLACFSIDGEDRGLVVKLNLDWKIGLASRDWDSVAKKEKIEGVELELLKLEVAVQSIHDNLLLLKSKEANMRDVSEQTNSRVTWLSMLSLVVCIAVSVLQLWHLQQYFRKMKLI

SEQ ID NO: 39217 - protein, 193 aa, Zea mays subsp. mays
  peptide (1)..(193): Ceres Seq. ID no. 12390188
  misc_feature (1)..(193): Pfam Name: Pfam Description:  emp24/gp25L/p24 family
  misc_feature (7)..(193): NCBI GI NO: 15217563 NR Description: unknown protein; protein id: At1g09580.1
  misc_feature (1)..(193): NCBI GI NO: 15223626 NR Description: integral membrane protein, putative
  misc_feature (1)..(193): NCBI GI NO: 15219136 NR Description: transmembrane protein, putative
  misc_feature (43)..(169): NCBI GI NO: 40641597 NR Description: putative transmembrane protein-like protein
  misc_feature (1)..(193): NCBI GI NO: 33146897 NR Description: putative transmembrane protein
  misc_feature (4)..(193): NCBI GI NO: 15228372 NR Description: putative membrane protein; protein id: At3g10780.1
  misc_feature (11)..(193): NCBI GI NO: 15223027 NR Description: unknown protein; protein id: At1g14010.1
  misc_feature (11)..(193): NCBI GI NO: 21618241 NR Description: unknown [Arabidopsis thaliana]
  misc_feature (11)..(193): NCBI GI NO: 8778403 NR Description: F16A14.23 [Arabidopsis thaliana]
  misc_feature (11)..(193): NCBI GI NO: 18396016 NR Description: expressed protein; protein id: At1g26690
MAAGAGAVWLEIAPSGTKCVSEEIQSNVVVIGDYSVLYDHHHAQPTISVKVTSPFGDIVHKKEKVSMGQFAFTTAEAGNYLACFSIDGEDRGLVVKLNLDWKIGLASRDWDSVAKKEKIEGVELELLKLEVAVQSIHDNLLLLKSKEANMRDVSEQTNSRVTWLSMLSLVVCIAVSVLQLWHLQQYFRKMKLI

SEQ ID NO: 39218 - protein, 137 aa, Zea mays subsp. mays
  peptide (1)..(137): Ceres Seq. ID no. 12390189
ARDHYLEHPNRKSGAWGCSLWWCGRKRRWREVARGPRWRRRPCGGWRRGPGRYGWRLRRQGLSVCRRRSNPTLLSSATTPSSMITTTPSLPSPSRLRPLLETLFIRKRRFRWGNLHLPQQKQGTTLPASQLMVRTEG

SEQ ID NO: 39219 - DNA, 2068 bp, Zea mays subsp. mays
  misc_feature (1)..(2068): Ceres Seq. ID no. 12362514
  misc_feature (1654)..(1654): n is a, c, t, g, unknown, or other
gcacgagaccattacctagaacatcctaatcgaaaaattcccttccttccttgctcctcccctgcctcgcctctctctctcccctctcctcgcctccagctcctgctcggcccgctcgcgtcgagctgcgcgcgcgcctgcggtggccgtgaaggacagcccgagggacgcgccgggtgcactgatctgggggccgcgtgtccccggtggtggggcgaggcggcgccggcttccaggaatgggcaacttgtagcgtcggtttcttttgcatatgcactttctattgttgttgtcatttcaaaggaggccatagtctcctggattttgtatgccttgttatctggaattggtgaccatagatgtcattccgtagcatagtccgtgatgttagggatggctttggcagcttgtcgaggagaagctttgaggtgaccctcgcaagcatttatggccttactgggcatcacaaagggaagacccagagctcatcacatgttctcgacgactcaccttccataattcgtgaaagtcgatgggcgaatctacctcctgaactcatccgtgatatcatacggagactggaggctgatgagagcacctggccagcgcggaagcacgtcgtttgcttcgcagctgtttgtaggacatggagagaaatgtgtaaagagattgtgttgagcccagagttctgtggcaagctcaccttccctgtgtctctaaaacagcctggtcctcgagatggaaatacaatggtccagtgttttataaagaggaataagtcaaaatccacttaccatctctacctgtgccttagcaatgttgttacttcagaaagtgggaaattcctcttatcagctaaacgacaccgcaaaaccacatgcaccgagtacactatatcaatggattctggcaacatctcaagatcaaaaagaacctacattggaaaaataaggtctaacttcctaggcacaagatttttaatttatgatacacaagccccctataatggggctgtagttcctcctgccggaaggaccagcaggaggttcaactccacaaaagtctctccaaagctgccttcagtcagttacaacatcgcacaggtatcgtatgagctaaatgtccttggcacaagaggtcctaggcggatgcgttgcatcatgcactccatacctgcatcatcagtggagccaggtggcacagtgcctggacagccagagcagattgtacctcgagccctggaggattcattccgcagcacggcttccttctcgcagtcgttccgtagcactgcctcattctccaagtccatcatggactcgtccatggatttcaatagcgctcgcttctctgacatagctggcagcagcgctcgcttcacgggcgttcctggtagcagtgctcgctttgcgggcgttcctggcagcagcgctcgcttctcgggcattgctggcgccagattggacaacgacgaggagagtgaaaccaaggagaggccactggtgcttcgtaataagccgcctaggtggcacgaacagctgcagtgttggtgcctcaacttccggggccgtgtgacaattgcctcggtgaagaacttccagctgatcgccgcggctaccccgccacccgcaggtgcgccaaccccctcgcagcntgctccgtcagatcctgacaaggtgattctccagtttggcaaagtggcaagggatatgttcacgatggactatcgctaccctctctcggctttccaggcctttgccatttgtctgagtagctttgatacaaaattagcctgtgaataaatggagaagaacaaaggtaaaggagaacagcaggttgcttgcattaggccatcagtgtacctctttccatctggctctcgtgttgccttggttgtatttgtgcttaatgtagccatgaagttggtggccatatatggacgcatgtgttgttgttggccctctcccttagaagtgattaaaagttgcatttggaccacatgttacccgatctgtaatatacttgcagtggcattgcatgccgcgtgataacaaagttcccgttcgtg

SEQ ID NO: 39220 - protein, 480 aa, Zea mays subsp. mays
  peptide (1)..(480): Ceres Seq. ID no. 12362515
  misc_feature (123)..(336): Pfam Name: Pfam Description:  Tub family
  misc_feature (1)..(336): NCBI GI NO: 34908598 NR Description: putative tubby protein
  misc_feature (356)..(480): NCBI GI NO: 34908598 NR Description: putative tubby protein
  misc_feature (1)..(333): NCBI GI NO: 15222543 NR Description: F-box containing tubby family protein
  misc_feature (356)..(480): NCBI GI NO: 15222543 NR Description: F-box containing tubby family protein
  misc_feature (1)..(335): NCBI GI NO: 15223772 NR Description: Tub family protein, putative; protein id:At1g76900
  misc_feature (356)..(480): NCBI GI NO: 15223772 NR Description: Tub family protein, putative; protein id:At1g76900
  misc_feature (1)..(337): NCBI GI NO: 5777631 NR Description: CAA303719.1 protein [Oryza sativa]
  misc_feature (356)..(431): NCBI GI NO: 5777631 NR Description: CAA303719.1 protein [Oryza sativa]
  misc_feature (1)..(337): NCBI GI NO: 32480039 NR Description: OSJNBa0039K24.2
  misc_feature (356)..(431): NCBI GI NO: 32480039 NR Description: OSJNBa0039K24.2
  misc_feature (432)..(432): Xaa is any aa, unknown or other
MSFRSIVRDVRDGFGSLSRRSFEVTLASIYGLTGHHKGKTQSSSHVLDDSPSIIRESRWANLPPELIRDIIRRLEADESTWPARKHVVCFAAVCRTWREMCKEIVLSPEFCGKLTFPVSLKQPGPRDGNTMVQCFIKRNKSKSTYHLYLCLSNVVTSESGKFLLSAKRHRKTTCTEYTISMDSGNISRSKRTYIGKIRSNFLGTRFLIYDTQAPYNGAVVPPAGRTSRRFNSTKVSPKLPSVSYNIAQVSYELNVLGTRGPRRMRCIMHSIPASSVEPGGTVPGQPEQIVPRALEDSFRSTASFSQSFRSTASFSKSIMDSSMDFNSARFSDIAGSSARFTGVPGSSARFAGVPGSSARFSGIAGARLDNDEESETKERPLVLRNKPPRWHEQLQCWCLNFRGRVTIASVKNFQLIAAATPPPAGAPTPSQXAPSDPDKVILQFGKVARDMFTMDYRYPLSAFQAFAICLSSFDTKLACE

SEQ ID NO: 39221 - protein, 381 aa, Zea mays subsp. mays
  peptide (1)..(381): Ceres Seq. ID no. 12362516
  misc_feature (24)..(237): Pfam Name: Pfam Description:  Tub family
  misc_feature (1)..(237): NCBI GI NO: 34908598 NR Description: putative tubby protein
  misc_feature (257)..(381): NCBI GI NO: 34908598 NR Description: putative tubby protein
  misc_feature (1)..(234): NCBI GI NO: 15222543 NR Description: F-box containing tubby family protein
  misc_feature (257)..(381): NCBI GI NO: 15222543 NR Description: F-box containing tubby family protein
  misc_feature (1)..(236): NCBI GI NO: 15223772 NR Description: Tub family protein, putative; protein id:At1g76900
  misc_feature (257)..(381): NCBI GI NO: 15223772 NR Description: Tub family protein, putative; protein id:At1g76900
  misc_feature (1)..(238): NCBI GI NO: 5777631 NR Description: CAA303719.1 protein [Oryza sativa]
  misc_feature (257)..(332): NCBI GI NO: 5777631 NR Description: CAA303719.1 protein [Oryza sativa]
  misc_feature (1)..(238): NCBI GI NO: 32480039 NR Description: OSJNBa0039K24.2
  misc_feature (257)..(332): NCBI GI NO: 32480039 NR Description: OSJNBa0039K24.2
  misc_feature (333)..(333): Xaa is any aa, unknown or other
MCKEIVLSPEFCGKLTFPVSLKQPGPRDGNTMVQCFIKRNKSKSTYHLYLCLSNVVTSESGKFLLSAKRHRKTTCTEYTISMDSGNISRSKRTYIGKIRSNFLGTRFLIYDTQAPYNGAVVPPAGRTSRRFNSTKVSPKLPSVSYNIAQVSYELNVLGTRGPRRMRCIMHSIPASSVEPGGTVPGQPEQIVPRALEDSFRSTASFSQSFRSTASFSKSIMDSSMDFNSARFSDIAGSSARFTGVPGSSARFAGVPGSSARFSGIAGARLDNDEESETKERPLVLRNKPPRWHEQLQCWCLNFRGRVTIASVKNFQLIAAATPPPAGAPTPSQXAPSDPDKVILQFGKVARDMFTMDYRYPLSAFQAFAICLSSFDTKLACE

SEQ ID NO: 39222 - protein, 350 aa, Zea mays subsp. mays
  peptide (1)..(350): Ceres Seq. ID no. 12362517
  misc_feature (1)..(206): Pfam Name: Pfam Description:  Tub family
  misc_feature (1)..(206): NCBI GI NO: 34908598 NR Description: putative tubby protein
  misc_feature (226)..(350): NCBI GI NO: 34908598 NR Description: putative tubby protein
  misc_feature (1)..(203): NCBI GI NO: 15222543 NR Description: F-box containing tubby family protein
  misc_feature (226)..(350): NCBI GI NO: 15222543 NR Description: F-box containing tubby family protein
  misc_feature (1)..(205): NCBI GI NO: 15223772 NR Description: Tub family protein, putative; protein id:At1g76900
  misc_feature (226)..(350): NCBI GI NO: 15223772 NR Description: Tub family protein, putative; protein id:At1g76900
  misc_feature (1)..(207): NCBI GI NO: 5777631 NR Description: CAA303719.1 protein [Oryza sativa]
  misc_feature (226)..(301): NCBI GI NO: 5777631 NR Description: CAA303719.1 protein [Oryza sativa]
  misc_feature (1)..(207): NCBI GI NO: 32480039 NR Description: OSJNBa0039K24.2
  misc_feature (226)..(301): NCBI GI NO: 32480039 NR Description: OSJNBa0039K24.2
  misc_feature (302)..(302): Xaa is any aa, unknown or other
MVQCFIKRNKSKSTYHLYLCLSNVVTSESGKFLLSAKRHRKTTCTEYTISMDSGNISRSKRTYIGKIRSNFLGTRFLIYDTQAPYNGAVVPPAGRTSRRFNSTKVSPKLPSVSYNIAQVSYELNVLGTRGPRRMRCIMHSIPASSVEPGGTVPGQPEQIVPRALEDSFRSTASFSQSFRSTASFSKSIMDSSMDFNSARFSDIAGSSARFTGVPGSSARFAGVPGSSARFSGIAGARLDNDEESETKERPLVLRNKPPRWHEQLQCWCLNFRGRVTIASVKNFQLIAAATPPPAGAPTPSQXAPSDPDKVILQFGKVARDMFTMDYRYPLSAFQAFAICLSSFDTKLACE

SEQ ID NO: 39223 - DNA, 1478 bp, Zea mays subsp. mays
  misc_feature (1)..(1478): Ceres Seq. ID no. 12366212
cgcgcctccccccaactcgtccagagttagttgtagctatagacctggttgttgtagcgcacgcagtagccataggaaatgcggctgcttgctgccaagatgagtggcggcgccaaggcctacgccgccgtcgtcctgatcaggatcatgtactccggcatgcacgtcatgagcaaggtggccctggatcagggcatgaacccgctggtgttcctgttctaccggcataccactgccgcgctcgttctcatccctgtcacctttgttgtcgagaggcggaaagctaagccggttacgttcaagattggatggaagatgttcatacatgccctctatggggtgacagcatgcggtgacttgtttaaccttggactcaactacacttctgctacgtcatcttcagcgttgtacaacgttcaaccggtggtcacattcatcctagccgtcatatttgggatggagactctgaaactgactcggttccatggcaaagtgaaattcgcgggcatcctgttctgcgtcgccggcgtcaccatcctggccttctacgaggggccgatgttcaggtccttcaaccaccaccatctgtttcagaacggcggcggcggcggcggtagctctgcagcaggagcaggagacacgcactccaagaagcagtgggtgctggggatcttcctcatgacactatccaacgttctagcaggcctgtggacagtgctccaggggcccctgatagaggacacgtcgaagctgatgaacacgacgctgcagatctcgtgggcgtcgctccaggccttcctggtggccgttgcggtggagagggacttctccaagtggaggctgggctggaacgtcggcctcgccgccataatctacagcggcgtgatcgtgacggcgctttcctactacatgcaaatgtggacgatcgccaagaggggcccggtgttcctggccatgtccatgccgctcaccttcgtcttcaccatcgtcatatcctccttcgtcataggggacgcagtcagcctaggaagcatctttgccggggcgttgctggttggaggcctgtacaatgtgttctgggggcaagagcatcgaggagcgagacgacgacgacctgatgaacaagatcagcggcccgggaaaagccgggcagcaggacaaggcggcggacaataatccggcgtcgtcccaagtgccggatgacggtgcggaggcaaaggtgtaatacagcctctctcatcagtcagccagacacgggaacgatcgatctgcgtcaaaagctaggcggccagcaggccaaagccaagccactggttaatttatttcaggggtgctgggaaacaaaacaacgaagaacgaagcaggaattagcacacgtattgtgatttgtgaatgtgacgtgatcgatatgcaggtctactcaccggccggccggactcgtgtggcacacgcacgctgtaaatttggtctcggatttt

SEQ ID NO: 39224 - protein, 365 aa, Zea mays subsp. mays
  peptide (1)..(365): Ceres Seq. ID no. 12366213
  misc_feature (210)..(334): Pfam Name: Pfam Description:  Integral membrane protein DUF6
  misc_feature (210)..(338): NCBI GI NO: 34393900 NR Description: nodulin-like protein
  misc_feature (9)..(117): NCBI GI NO: 34393900 NR Description: nodulin-like protein
  misc_feature (10)..(341): NCBI GI NO: 34913776 NR Description: nodulin-like protein
  misc_feature (30)..(336): NCBI GI NO: 34913778 NR Description: nodulin-like protein
  misc_feature (40)..(337): NCBI GI NO: 34913772 NR Description: nodulin-like protein
  misc_feature (11)..(336): NCBI GI NO: 34903802 NR Description: OSJNBa0016I09.14
  misc_feature (13)..(350): NCBI GI NO: 15238227 NR Description: nodulin-like protein; protein id: At5g64700.1
  misc_feature (93)..(338): NCBI GI NO: 34903796 NR Description: OSJNBa0016I09.11
  misc_feature (13)..(79): NCBI GI NO: 34903796 NR Description: OSJNBa0016I09.11
  misc_feature (13)..(338): NCBI GI NO: 34903800 NR Description: OSJNBa0016I09.13
MRLLAAKMSGGAKAYAAVVLIRIMYSGMHVMSKVALDQGMNPLVFLFYRHTTAALVLIPVTFVVERRKAKPVTFKIGWKMFIHALYGVTACGDLFNLGLNYTSATSSSALYNVQPVVTFILAVIFGMETLKLTRFHGKVKFAGILFCVAGVTILAFYEGPMFRSFNHHHLFQNGGGGGGSSAAGAGDTHSKKQWVLGIFLMTLSNVLAGLWTVLQGPLIEDTSKLMNTTLQISWASLQAFLVAVAVERDFSKWRLGWNVGLAAIIYSGVIVTALSYYMQMWTIAKRGPVFLAMSMPLTFVFTIVISSFVIGDAVSLGSIFAGALLVGGLYNVFWGQEHRGARRRRPDEQDQRPGKSRAAGQGGGQ

SEQ ID NO: 39225 - protein, 358 aa, Zea mays subsp. mays
  peptide (1)..(358): Ceres Seq. ID no. 12366214
  misc_feature (203)..(327): Pfam Name: Pfam Description:  Integral membrane protein DUF6
  misc_feature (203)..(331): NCBI GI NO: 34393900 NR Description: nodulin-like protein
  misc_feature (2)..(110): NCBI GI NO: 34393900 NR Description: nodulin-like protein
  misc_feature (3)..(334): NCBI GI NO: 34913776 NR Description: nodulin-like protein
  misc_feature (23)..(329): NCBI GI NO: 34913778 NR Description: nodulin-like protein
  misc_feature (33)..(330): NCBI GI NO: 34913772 NR Description: nodulin-like protein
  misc_feature (4)..(329): NCBI GI NO: 34903802 NR Description: OSJNBa0016I09.14
  misc_feature (6)..(343): NCBI GI NO: 15238227 NR Description: nodulin-like protein; protein id: At5g64700.1
  misc_feature (86)..(331): NCBI GI NO: 34903796 NR Description: OSJNBa0016I09.11
  misc_feature (6)..(72): NCBI GI NO: 34903796 NR Description: OSJNBa0016I09.11
  misc_feature (6)..(331): NCBI GI NO: 34903800 NR Description: OSJNBa0016I09.13
MSGGAKAYAAVVLIRIMYSGMHVMSKVALDQGMNPLVFLFYRHTTAALVLIPVTFVVERRKAKPVTFKIGWKMFIHALYGVTACGDLFNLGLNYTSATSSSALYNVQPVVTFILAVIFGMETLKLTRFHGKVKFAGILFCVAGVTILAFYEGPMFRSFNHHHLFQNGGGGGGSSAAGAGDTHSKKQWVLGIFLMTLSNVLAGLWTVLQGPLIEDTSKLMNTTLQISWASLQAFLVAVAVERDFSKWRLGWNVGLAAIIYSGVIVTALSYYMQMWTIAKRGPVFLAMSMPLTFVFTIVISSFVIGDAVSLGSIFAGALLVGGLYNVFWGQEHRGARRRRPDEQDQRPGKSRAAGQGGGQ

SEQ ID NO: 39226 - protein, 342 aa, Zea mays subsp. mays
  peptide (1)..(342): Ceres Seq. ID no. 12366215
  misc_feature (187)..(311): Pfam Name: Pfam Description:  Integral membrane protein DUF6
  misc_feature (187)..(315): NCBI GI NO: 34393900 NR Description: nodulin-like protein
  misc_feature (1)..(94): NCBI GI NO: 34393900 NR Description: nodulin-like protein
  misc_feature (1)..(318): NCBI GI NO: 34913776 NR Description: nodulin-like protein
  misc_feature (7)..(313): NCBI GI NO: 34913778 NR Description: nodulin-like protein
  misc_feature (17)..(314): NCBI GI NO: 34913772 NR Description: nodulin-like protein
  misc_feature (1)..(313): NCBI GI NO: 34903802 NR Description: OSJNBa0016I09.14
  misc_feature (1)..(327): NCBI GI NO: 15238227 NR Description: nodulin-like protein; protein id: At5g64700.1
  misc_feature (70)..(315): NCBI GI NO: 34903796 NR Description: OSJNBa0016I09.11
  misc_feature (1)..(56): NCBI GI NO: 34903796 NR Description: OSJNBa0016I09.11
  misc_feature (1)..(315): NCBI GI NO: 34903800 NR Description: OSJNBa0016I09.13
MYSGMHVMSKVALDQGMNPLVFLFYRHTTAALVLIPVTFVVERRKAKPVTFKIGWKMFIHALYGVTACGDLFNLGLNYTSATSSSALYNVQPVVTFILAVIFGMETLKLTRFHGKVKFAGILFCVAGVTILAFYEGPMFRSFNHHHLFQNGGGGGGSSAAGAGDTHSKKQWVLGIFLMTLSNVLAGLWTVLQGPLIEDTSKLMNTTLQISWASLQAFLVAVAVERDFSKWRLGWNVGLAAIIYSGVIVTALSYYMQMWTIAKRGPVFLAMSMPLTFVFTIVISSFVIGDAVSLGSIFAGALLVGGLYNVFWGQEHRGARRRRPDEQDQRPGKSRAAGQGGGQ

SEQ ID NO: 39227 - DNA, 761 bp, Zea mays subsp. mays
  misc_feature (1)..(761): Ceres Seq. ID no. 12633730
gacattcaagggccacgatgtttctcatatgtaataatgcagcacaaggcattctatcttcattcttcttcaagtatgcagacacaattttgaagaagtattcgtcaactgttgccacgatatttactggcctagcttctgctgcatttttggggcataccttgaccattaattttctcctgggcatatcagtggtgtttatttcaatgcaccagttcttctctccacttgctaaagtcaaagatgacaaaccagctgacttaatagagttggaagacacacaaaatcaccggtcatccgaatcttcttttgtaaatatgactgctggtgctgctgttgatgcgagccatcggattggaactgatgagaggcaacccctgttgcctacatgaactagtttcttgaggtagggatagatgactctttttttgcggtgtgagcagcaggtttggtgtagcattgtaagttgaataaactattgtacactgtaaaggcaaaggaaagaaagaactaccaacatcttctccattttctttcatttttgggacgaggccggccggtggcctgccatctgtggccgtgggagtgacagagcagcaaacattttgataggcgtataattcaatagggattttccagatacggcacttgtaacagaattttcttggaggtgtatatgaacaacggcgatgtgacaatcttttctgtacggaacatttatactattgagtgattgatttactattactatgttgttactc

SEQ ID NO: 39228 - protein, 129 aa, Zea mays subsp. mays
  peptide (1)..(129): Ceres Seq. ID no. 12633731
  misc_feature (1)..(65): Pfam Name: Pfam Description:  Nucleotide-sugar transporter
  misc_feature (1)..(128): NCBI GI NO: 38345234 NR Description: OSJNBa0084K20.12
  misc_feature (1)..(128): NCBI GI NO: 26450627 NR Description: unknown protein [Arabidopsis thaliana]
  misc_feature (1)..(128): NCBI GI NO: 11358902 NR Description: transporter-like protein - Arabidopsis thaliana
  misc_feature (1)..(128): NCBI GI NO: 18411150 NR Description: transporter-like protein; protein id: At3g59360
  misc_feature (1)..(115): NCBI GI NO: 30689311 NR Description: expressed protein [Arabidopsis thaliana]
  misc_feature (1)..(115): NCBI GI NO: 25408848 NR Description: hypothetical protein At2g43240
  misc_feature (1)..(113): NCBI GI NO: 34907666 NR Description: putative transporter-like protein
  misc_feature (1)..(70): NCBI GI NO: 7488414 NR Description: UDP-galactose transport protein homolog F23E12
HSRATMFLICNNAAQGILSSFFFKYADTILKKYSSTVATIFTGLASAAFLGHTLTINFLLGISVVFISMHQFFSPLAKVKDDKPADLIELEDTQNHRSSESSFVNMTAGAAVDASHRIGTDERQPLLPT

SEQ ID NO: 39229 - protein, 124 aa, Zea mays subsp. mays
  peptide (1)..(124): Ceres Seq. ID no. 12633732
  misc_feature (1)..(60): Pfam Name: Pfam Description:  Nucleotide-sugar transporter
  misc_feature (1)..(123): NCBI GI NO: 38345234 NR Description: OSJNBa0084K20.12
  misc_feature (1)..(123): NCBI GI NO: 26450627 NR Description: unknown protein [Arabidopsis thaliana]
  misc_feature (1)..(123): NCBI GI NO: 11358902 NR Description: transporter-like protein - Arabidopsis thaliana
  misc_feature (1)..(123): NCBI GI NO: 18411150 NR Description: transporter-like protein; protein id: At3g59360
  misc_feature (1)..(110): NCBI GI NO: 30689311 NR Description: expressed protein [Arabidopsis thaliana]
  misc_feature (1)..(110): NCBI GI NO: 25408848 NR Description: hypothetical protein At2g43240
  misc_feature (1)..(108): NCBI GI NO: 34907666 NR Description: putative transporter-like protein
  misc_feature (1)..(65): NCBI GI NO: 7488414 NR Description: UDP-galactose transport protein homolog F23E12
MFLICNNAAQGILSSFFFKYADTILKKYSSTVATIFTGLASAAFLGHTLTINFLLGISVVFISMHQFFSPLAKVKDDKPADLIELEDTQNHRSSESSFVNMTAGAAVDASHRIGTDERQPLLPT

SEQ ID NO: 39230 - DNA, 1944 bp, Zea mays subsp. mays
  misc_feature (1)..(1944): Ceres Seq. ID no. 12375162
atatccattcccgctcgtccccctcaacaaccctcctcacggcgcactcgtgttcgtgtcatcccgcccgcaggccgcagtccatggccaccgccagcctcgcgctctcgctgcgcctcgcgccgtcctcgcgcccgctgagcctccgccgccggggggccaccggcgtcacctgccgcgccaccaccgccacgttccaccagctcgacgccgtcgcggtgagggaggaggagtccaggttccggacggcggcggcggagggccgcaacctgctgccgctcacgaggtgcatcttctccgatcacctcacgccagtgctcgcgtaccgctgcctcgtcaaggaggacgaacgcgaggcgcccagctttctattcgagtctgtcgagcaggggtccgagggcaccaatgtggggaggtacagcgtggtcggggcgcagccttctatggaggtcgtggccaaggctaaccatgtgacggtcatggaccatgagatgaagtcgaggagggagcacttcgtgcctgatcccatgaggatccccaggacaatcatggagcagtggaacccgcagattgctgacagcctccctgatgcattttgtggaggatgggttggattcttctcatatgatacagtgcgttatgttgaaacaaagaagcttcctttcagtaaggcaccacatgacgataggaaccttcctgacattcatttaggcctctatagtgacgtcattgtgtttgatcatgttgaaaagaaaacacatgttattcattgggtgaggacagactgctatcgttctgttgatgaagcatatgaagatggaagaaatcggcttgaagctttgttatcaagattacattgcctcaatgtcccaacactttcttctggttctataaaactcaatgttgaaaactttggcccagtatgcaaaaatcaacgatgtcaagcgaagaatataaaaatatcgttgtccaagctaaagaacacatcttggccggtgacattttccaagttgttttaagccagcgttttgagagacggacattcgccgacccctttgaaatctatcgtgcattgcgcatcgtaaatcctagtccatatatggcctatctacaggcacgaggttgtattctcgtggcatcgagtcctgaaattcttacccgggtacaaaagaggacaataatcaatcgtccgcttgctggaaccataagaagaggcaaaacaaaagcagaagacaaaactttagaacaattgcttttgagtgatgaaaagcagtgtgctgaacatattatgctagtagatcttggccgaaatgatgttgggaaggtgtccaaaccaggttcagtaaaggtagagaaattgatgaatatcgaacgatattctcatgtcatgcacatcagctcaacagtaactggagagctacgcgatgatcttacgtgttgggatgcgctacgagccgcattgccagttggaaccgttagtggcgctccaaaggtgagagcaatggagttgattgatcagctagaagtgagtatgcgtgggccgtatagtggtggttttggagggatttccttccgcggcgacatggacattgcactcgctcttcgcactattgtcttccccaccgcatctaggtttgataccatgtactcgtacacagacagtaagtcccggcaggagtgggtggctcacctccaggccggagctggcatagttgctgatagcaaaccggatgacgagcaccaagagtgtataaacaaggctgcaggtgttgctcgtgccattgaccttgctgaatcgacatttcttgaagagtagtctagtctaatgaaggaaatgtatgtttaagttctctgtataattatggattgtcctagaaaacaggctttcttaggccgaataaaaactcaactgtaataaagttaataaatggacaactttagctc

SEQ ID NO: 39231 - protein, 338 aa, Zea mays subsp. mays
  peptide (1)..(338): Ceres Seq. ID no. 12375163
  misc_feature (93)..(254): Pfam Name: Pfam Description:  Anthranilate synthase component I
  misc_feature (31)..(326): NCBI GI NO: 34897346 NR Description: anthranilate synthase alpha 1 subunit
  misc_feature (31)..(326): NCBI GI NO: 5360657 NR Description: anthranilate synthase alpha 1 subunit
  misc_feature (36)..(326): NCBI GI NO: 960289 NR Description: anthranilate synthase alpha subunit
  misc_feature (11)..(326): NCBI GI NO: 15227604 NR Description: anthranilate synthase, alpha subunit
  misc_feature (11)..(326): NCBI GI NO: 320553 NR Description: anthranilate synthase (EC 4
  misc_feature (27)..(326): NCBI GI NO: 15239225 NR Description: anthranilate synthase component I-1 precursor
  misc_feature (75)..(326): NCBI GI NO: 12830362 NR Description: anthranilate synthase alpha subunit
  misc_feature (27)..(326): NCBI GI NO: 320552 NR Description: anthranilate synthase (EC 4
  misc_feature (32)..(306): NCBI GI NO: 7436743 NR Description: anthranilate synthase (EC 4
  misc_feature (22)..(310): NCBI GI NO: 5360659 NR Description: anthranilate synthase alpha 2 subunit
IHSRSSPSTTLLTAHSCSCHPARRPQSMATASLALSLRLAPSSRPLSLRRRGATGVTCRATTATFHQLDAVAVREEESRFRTAAAEGRNLLPLTRCIFSDHLTPVLAYRCLVKEDEREAPSFLFESVEQGSEGTNVGRYSVVGAQPSMEVVAKANHVTVMDHEMKSRREHFVPDPMRIPRTIMEQWNPQIADSLPDAFCGGWVGFFSYDTVRYVETKKLPFSKAPHDDRNLPDIHLGLYSDVIVFDHVEKKTHVIHWVRTDCYRSVDEAYEDGRNRLEALLSRLHCLNVPTLSSGSIKLNVENFGPVCKNQRCQAKNIKISLSKLKNTSWPVTFSKLF

SEQ ID NO: 39232 - protein, 311 aa, Zea mays subsp. mays
  peptide (1)..(311): Ceres Seq. ID no. 12375164
  misc_feature (66)..(227): Pfam Name: Pfam Description:  Anthranilate synthase component I
  misc_feature (4)..(299): NCBI GI NO: 34897346 NR Description: anthranilate synthase alpha 1 subunit
  misc_feature (4)..(299): NCBI GI NO: 5360657 NR Description: anthranilate synthase alpha 1 subunit
  misc_feature (9)..(299): NCBI GI NO: 960289 NR Description: anthranilate synthase alpha subunit
  misc_feature (1)..(299): NCBI GI NO: 15227604 NR Description: anthranilate synthase, alpha subunit
  misc_feature (1)..(299): NCBI GI NO: 320553 NR Description: anthranilate synthase (EC 4
  misc_feature (1)..(299): NCBI GI NO: 15239225 NR Description: anthranilate synthase component I-1 precursor
  misc_feature (48)..(299): NCBI GI NO: 12830362 NR Description: anthranilate synthase alpha subunit
  misc_feature (1)..(299): NCBI GI NO: 320552 NR Description: anthranilate synthase (EC 4
  misc_feature (5)..(279): NCBI GI NO: 7436743 NR Description: anthranilate synthase (EC 4
  misc_feature (1)..(283): NCBI GI NO: 5360659 NR Description: anthranilate synthase alpha 2 subunit
MATASLALSLRLAPSSRPLSLRRRGATGVTCRATTATFHQLDAVAVREEESRFRTAAAEGRNLLPLTRCIFSDHLTPVLAYRCLVKEDEREAPSFLFESVEQGSEGTNVGRYSVVGAQPSMEVVAKANHVTVMDHEMKSRREHFVPDPMRIPRTIMEQWNPQIADSLPDAFCGGWVGFFSYDTVRYVETKKLPFSKAPHDDRNLPDIHLGLYSDVIVFDHVEKKTHVIHWVRTDCYRSVDEAYEDGRNRLEALLSRLHCLNVPTLSSGSIKLNVENFGPVCKNQRCQAKNIKISLSKLKNTSWPVTFSKLF

SEQ ID NO: 39233 - protein, 297 aa, Zea mays subsp. mays
  peptide (1)..(297): Ceres Seq. ID no. 12375165
  misc_feature (7)..(287): Pfam Name: Pfam Description:  chorismate binding enzyme
  misc_feature (1)..(297): NCBI GI NO: 34897346 NR Description: anthranilate synthase alpha 1 subunit
  misc_feature (1)..(297): NCBI GI NO: 5360657 NR Description: anthranilate synthase alpha 1 subunit
  misc_feature (1)..(297): NCBI GI NO: 960289 NR Description: anthranilate synthase alpha subunit
  misc_feature (1)..(296): NCBI GI NO: 15227604 NR Description: anthranilate synthase, alpha subunit
  misc_feature (1)..(296): NCBI GI NO: 320553 NR Description: anthranilate synthase (EC 4
  misc_feature (1)..(297): NCBI GI NO: 12830362 NR Description: anthranilate synthase alpha subunit
  misc_feature (1)..(297): NCBI GI NO: 15239225 NR Description: anthranilate synthase component I-1 precursor
  misc_feature (1)..(297): NCBI GI NO: 320552 NR Description: anthranilate synthase (EC 4
  misc_feature (1)..(296): NCBI GI NO: 7436743 NR Description: anthranilate synthase (EC 4
  misc_feature (1)..(297): NCBI GI NO: 5360659 NR Description: anthranilate synthase alpha 2 subunit
MQKSTMSSEEYKNIVVQAKEHILAGDIFQVVLSQRFERRTFADPFEIYRALRIVNPSPYMAYLQARGCILVASSPEILTRVQKRTIINRPLAGTIRRGKTKAEDKTLEQLLLSDEKQCAEHIMLVDLGRNDVGKVSKPGSVKVEKLMNIERYSHVMHISSTVTGELRDDLTCWDALRAALPVGTVSGAPKVRAMELIDQLEVSMRGPYSGGFGGISFRGDMDIALALRTIVFPTASRFDTMYSYTDSKSRQEWVAHLQAGAGIVADSKPDDEHQECINKAAGVARAIDLAESTFLEE

SEQ ID NO: 39234 - DNA, 1209 bp, Zea mays subsp. mays
  misc_feature (1)..(1209): Ceres Seq. ID no. 12417301
  misc_feature (906)..(906): n is a, c, t, g, unknown, or other
agatcatcgtgcttccactctcgcctttccatctgcgagtccccttcccggctccaatctcacatcaactcgggtctttccctgagagatcgtcgttttccctgtttctttcctcccccagcccggttccgattccgacaaagatccgttcttcctagtaagacaaggaaagaaagaaaccaagaaccaacctttggcacatggcggagccggccaagaacgaggcccacgtcgtggagatcccggtcgctgtcgacggcggcgaagcctccggaggcgaggaggcctttcttgacaaggcggcggcggcgggcgagggtcacccgctcggggagatcgcggctagcgagggacacctgctgctgctgaagctgtggcagcgggaggaggaccgcctgggccgccgcgcgtgcgcgctggaggcgcgcatggacgcggcgcgccgggacgccttctacctctgcgcggccttcctcgcctttcacggcctttccctcgcgctcctcttcgccgcgtccgtggtcgccgcggccgccacctccccctccgccgcgtgcaggaggtggtgggcgccgtcgtctctgtccctggcggcgtccctcgcgctcgccgcggccgtgcagctccgggtgggcgcctactggcgcgccgcggcgcggctgcgccgggaccgcggcgacgcgcgcgcactcgcgcgggccgtgcaggagctgcgcttgaagggcgccgcgttcgacctgtccaaggagccgcagtacggggtgacgagggccaagtgcgccagcgtggagggcgcgggcctgtgggcgccgctccggtggttccggcagaacgtcgtcacagcctgcctgctcgccgtcgccgccgcggccttgccctccggcaagttcatcctctgcgcatagnatgcatggatgcggggtcgccagcttctttaaggctcgttcggttcctccggaatgagcgcctggaataattcacggttggatctttataagctggaatgactctggtgctcaatcctgatgaaccgaacagaccgctgatcttcagaaccaaaaatggggactgctcgccgcacagggaacagagacaccacttgtgctccctaggcaagatccccatgaaatggcagaaatgcgcattctttcttgtaattttttctagctggaccttcagttgacattctataatggaaatgctttaggc

SEQ ID NO: 39235 - protein, 234 aa, Zea mays subsp. mays
  peptide (1)..(234): Ceres Seq. ID no. 12417302
  misc_feature (3)..(234): NCBI GI NO: 5257261 NR Description: hypothetical protein
  misc_feature (3)..(187): NCBI GI NO: 5257257 NR Description: hypothetical protein
  misc_feature (8)..(233): NCBI GI NO: 30696692 NR Description: expressed protein [Arabidopsis thaliana]
  misc_feature (8)..(207): NCBI GI NO: 9758632 NR Description: dbj|BAA81760
  misc_feature (32)..(225): NCBI GI NO: 34897044 NR Description: hypothetical protein
  misc_feature (41)..(233): NCBI GI NO: 15230623 NR Description: hypothetical protein; protein id: At3g12870.1
MAEPAKNEAHVVEIPVAVDGGEASGGEEAFLDKAAAAGEGHPLGEIAASEGHLLLLKLWQREEDRLGRRACALEARMDAARRDAFYLCAAFLAFHGLSLALLFAASVVAAAATSPSAACRRWWAPSSLSLAASLALAAAVQLRVGAYWRAAARLRRDRGDARALARAVQELRLKGAAFDLSKEPQYGVTRAKCASVEGAGLWAPLRWFRQNVVTACLLAVAAAALPSGKFILCA

SEQ ID NO: 39236 - protein, 158 aa, Zea mays subsp. mays
  peptide (1)..(158): Ceres Seq. ID no. 12417303
  misc_feature (1)..(158): NCBI GI NO: 5257261 NR Description: hypothetical protein
  misc_feature (1)..(111): NCBI GI NO: 5257257 NR Description: hypothetical protein
  misc_feature (1)..(157): NCBI GI NO: 30696692 NR Description: expressed protein [Arabidopsis thaliana]
  misc_feature (1)..(131): NCBI GI NO: 9758632 NR Description: dbj|BAA81760
  misc_feature (1)..(149): NCBI GI NO: 34897044 NR Description: hypothetical protein
  misc_feature (1)..(157): NCBI GI NO: 15230623 NR Description: hypothetical protein; protein id: At3g12870.1
MDAARRDAFYLCAAFLAFHGLSLALLFAASVVAAAATSPSAACRRWWAPSSLSLAASLALAAAVQLRVGAYWRAAARLRRDRGDARALARAVQELRLKGAAFDLSKEPQYGVTRAKCASVEGAGLWAPLRWFRQNVVTACLLAVAAAALPSGKFILCA

SEQ ID NO: 39237 - protein, 122 aa, Zea mays subsp. mays
  peptide (1)..(122): Ceres Seq. ID no. 12417304
  misc_feature (40)..(122): NCBI GI NO: 5821151 NR Description: RNA binding protein [Homo sapiens]
  misc_feature (7)..(122): NCBI GI NO: 7949115 NR Description: Ser/Arg-related nuclear matrix protein
  misc_feature (40)..(122): NCBI GI NO: 6634015 NR Description: KIAA0324 protein [Homo sapiens]
  misc_feature (40)..(122): NCBI GI NO: 7512967 NR Description: hypothetical protein KIAA0324 - human (fragment)
  misc_feature (47)..(122): NCBI GI NO: 39592411 NR Description: Hypothetical protein CBG07956
  misc_feature (40)..(122): NCBI GI NO: 19923466 NR Description: splicing coactivator subunit SRm300
RSSCFHSRLSICESPSRLQSHINSGLSLRDRRFPCFFPPPARFRFRQRSVLPSKTRKERNQEPTFGTWRSRPRTRPTSWRSRSLSTAAKPPEARRPFLTRRRRRARVTRSGRSRLARDTCCC

SEQ ID NO: 39238 - DNA, 835 bp, Zea mays subsp. mays
  misc_feature (1)..(835): Ceres Seq. ID no. 12455206
gcacgagaccattacctagaacatcctaatcgaaaactttcggaggaggcggaccaggtaagcagcagcaggaaccctagcaccgccgcatccgcagccatgggtatcgacctcgttgccggtgggaggaacaagaagaccaagcgcacagcgccgaagtccgacgatgtttatctcaagctccttgtcaagctctaccgtttcttggtcaggaggaccaagagcaacttcaatgctgtcattctcaagaggctcttcatgagcaaaaccaatcgcccaccaatctccatgcgccgccttgtcaagttcatggaaggaaaggaccttaccctagctgccgagctcgtgagcgagctgtggaatgctgggataaaggcagagttcaagctcactaccagggtggcgaaccacatcaagtatgccttgcaatcaagcattccgtggatggtgctagtcggcgagtctgagctgcagaaaggaactgtaaagttgaaggacgttgaagccaaccaggaagaagaggttgataggaaggattttgttcgagagttgaagaagagattgagtaaatcctaagaggaaaattttaggcgttgatatcatcttttgacacccatttgacgcaaactcaattagggggagaatgacattacatcattataatttaaactgacgtgaatgtttcagtccggttggcatagggccacttgttatgttcataaggtcattcgaatcccctgagtcccaatgcattatgctgatgaatcaggctgcagacatattgtgaattatattctttttgtactaccttgaggaatgaaaagtttttgtcctc

SEQ ID NO: 39239 - protein, 191 aa, Zea mays subsp. mays
  peptide (1)..(191): Ceres Seq. ID no. 12455207
  misc_feature (34)..(116): NCBI GI NO: 34897628 NR Description: cytoplasmic ribosomal protein L18 [Oryza sativa]
  misc_feature (34)..(107): NCBI GI NO: 34393858 NR Description: putative cytoplasmic ribosomal protein L18
  misc_feature (100)..(189): NCBI GI NO: 4103152 NR Description: histidyl-tRNA synthetase [Triticum aestivum]
  misc_feature (100)..(189): NCBI GI NO: 4103154 NR Description: histidyl-tRNA synthetase [Triticum aestivum]
  misc_feature (34)..(172): NCBI GI NO: 15241061 NR Description: 60S ribosomal protein - like; protein id:At5g27850
  misc_feature (81)..(188): NCBI GI NO: 3915070 NR Description: HISTIDYL-TRNA SYNTHETASE
  misc_feature (34)..(172): NCBI GI NO: 606970 NR Description: cytoplasmic ribosomal protein L18
  misc_feature (37)..(108): NCBI GI NO: 6094021 NR Description: 60S RIBOSOMAL PROTEIN L18
  misc_feature (34)..(172): NCBI GI NO: 15230011 NR Description: putative 60S ribosomal protein L18
  misc_feature (34)..(112): NCBI GI NO: 28798549 NR Description: 60S ribosomal protein [Medicago sativa]
ARDHYLEHPNRKLSEEADQVSSSRNPSTAASAAMGIDLVAGGRNKKTKRTAPKSDDVYLKLLVKLYRFLVRRTKSNFNAVILKRLFMSKTNRPPISMRRLVKFMEGKDLTLAAELVSELWNAGIKAEFKLTTRVANHIKYALQSSIPWMVLVGESELQKGTVKLKDVEANQEEEVDRKDFVRELKKRLSKS

SEQ ID NO: 39240 - protein, 158 aa, Zea mays subsp. mays
  peptide (1)..(158): Ceres Seq. ID no. 12455208
  misc_feature (1)..(83): NCBI GI NO: 34897628 NR Description: cytoplasmic ribosomal protein L18 [Oryza sativa]
  misc_feature (1)..(74): NCBI GI NO: 34393858 NR Description: putative cytoplasmic ribosomal protein L18
  misc_feature (67)..(156): NCBI GI NO: 4103152 NR Description: histidyl-tRNA synthetase [Triticum aestivum]
  misc_feature (67)..(156): NCBI GI NO: 4103154 NR Description: histidyl-tRNA synthetase [Triticum aestivum]
  misc_feature (1)..(139): NCBI GI NO: 15241061 NR Description: 60S ribosomal protein - like; protein id:At5g27850
  misc_feature (48)..(155): NCBI GI NO: 3915070 NR Description: HISTIDYL-TRNA SYNTHETASE
  misc_feature (1)..(139): NCBI GI NO: 606970 NR Description: cytoplasmic ribosomal protein L18
  misc_feature (4)..(75): NCBI GI NO: 6094021 NR Description: 60S RIBOSOMAL PROTEIN L18
  misc_feature (1)..(139): NCBI GI NO: 15230011 NR Description: putative 60S ribosomal protein L18
  misc_feature (1)..(79): NCBI GI NO: 28798549 NR Description: 60S ribosomal protein [Medicago sativa]
MGIDLVAGGRNKKTKRTAPKSDDVYLKLLVKLYRFLVRRTKSNFNAVILKRLFMSKTNRPPISMRRLVKFMEGKDLTLAAELVSELWNAGIKAEFKLTTRVANHIKYALQSSIPWMVLVGESELQKGTVKLKDVEANQEEEVDRKDFVRELKKRLSKS

SEQ ID NO: 39241 - protein, 105 aa, Zea mays subsp. mays
  peptide (1)..(105): Ceres Seq. ID no. 12455209
  misc_feature (1)..(30): NCBI GI NO: 34897628 NR Description: cytoplasmic ribosomal protein L18 [Oryza sativa]
  misc_feature (1)..(21): NCBI GI NO: 34393858 NR Description: putative cytoplasmic ribosomal protein L18
  misc_feature (14)..(103): NCBI GI NO: 4103152 NR Description: histidyl-tRNA synthetase [Triticum aestivum]
  misc_feature (14)..(103): NCBI GI NO: 4103154 NR Description: histidyl-tRNA synthetase [Triticum aestivum]
  misc_feature (1)..(86): NCBI GI NO: 15241061 NR Description: 60S ribosomal protein - like; protein id:At5g27850
  misc_feature (1)..(102): NCBI GI NO: 3915070 NR Description: HISTIDYL-TRNA SYNTHETASE
  misc_feature (1)..(86): NCBI GI NO: 606970 NR Description: cytoplasmic ribosomal protein L18
  misc_feature (1)..(22): NCBI GI NO: 6094021 NR Description: 60S RIBOSOMAL PROTEIN L18
  misc_feature (1)..(86): NCBI GI NO: 15230011 NR Description: putative 60S ribosomal protein L18
  misc_feature (1)..(26): NCBI GI NO: 28798549 NR Description: 60S ribosomal protein [Medicago sativa]
MSKTNRPPISMRRLVKFMEGKDLTLAAELVSELWNAGIKAEFKLTTRVANHIKYALQSSIPWMVLVGESELQKGTVKLKDVEANQEEEVDRKDFVRELKKRLSKS

SEQ ID NO: 39242 - DNA, 2740 bp, Zea mays subsp. mays
  misc_feature (1)..(2740): Ceres Seq. ID no. 12417747
  misc_feature (593)..(593): n is a, c, t, g, unknown, or other
  misc_feature (2140)..(2140): n is a, c, t, g, unknown, or other
  misc_feature (1894)..(1894): n is a, c, t, g, unknown, or other
  misc_feature (1892)..(1892): n is a, c, t, g, unknown, or other
  misc_feature (1463)..(1463): n is a, c, t, g, unknown, or other
  misc_feature (352)..(352): n is a, c, t, g, unknown, or other
  misc_feature (1891)..(1891): n is a, c, t, g, unknown, or other
  misc_feature (2141)..(2141): n is a, c, t, g, unknown, or other
  misc_feature (551)..(551): n is a, c, t, g, unknown, or other
gcacgagaccattacctagaacatcctaatcgaaaaagccccatcatactcattcatattataaggcgcgaatctatccatctatctaatctacttacgcacgaacatgcgtaacatcggcatgctgcgggcgctggtcctggcgctcgcggtggccgccgccgccgccgccgagaagaggaggacgtacatcgtccacatggccaagtcggcgatgccggccgagtacgcggaccacgccgagtggtacggcgcatcgctgcgctccgtgtccgcctcagcctccgccgccaagatgctctacgcgtacgacaccgtcctgcacggtttctccgcgcgcctcacgccgcangaggccagcgacctggcgtccgccgagggggtgctcgccgtcaacccggaggcgcggtacgagctgcacaccacgcggacgcccgagttcctgggcatcgccggccagggcctgtccccgcagtccggcacggcgggcgacgtcgtcgtcggcgtgctcgacacgggcgtctggcccgagagcaagagctacgacgacnccggcctcgccgaggtgcccgcgtggtggaagggccagtgcnaggcgggacccggcttcgacgcctccaccgcctgcaaccgcaagctcgtcggcgccaggttcttcaacaagggctacgaggccgccatgggccccatggacaccgaccgggagtcccggtccccgctcgacgacgacggccacggcacgcacaccagctccacggccgccggcgccgccgtgccgggtgccagcctcttcggcttcgccgcgggcacggcgcgcggcatggcgccccgggcgcgcgtcgccgcctacaaggtgtgctggctcggcggctgcttcagctccgacatcctcgcgggcatggacgccgccgtcgccgacggctgcggcgtgctctcgctctcgctgggcggcggcgccgccgactactcgcgcgacagcgtcgccatcggcgccttcgccgccacggagcagaacgtcctcgtctcctgctcggccgggaacgccggccccgggagctccacgctgtccaacgtggcgccgtggatcaccaccgtgggcgccggcacgctcgaccgcgacttcccggcctacgtcgtgctcggcgacgggaagaactacacgggcgtctcgctctacgccgggaagccgctgcccagcgccccgatccccatcgtgtacgcggccaacgcctccaactccaccgcggggaacctgtgcatgcccggaaccctcgtgccggagaaggtggccggcaagatcgtcgtgtgcgaccgcggcgtcagcgcgcgcgtccagaagggcctcgtcgtgcgcgacgcgggcggcgccggcatggtgctgtccaacacggccgccaacggccaggagctcgtcgccgacgcgcacctcctgcccgccgccggcgtcggcgagagggaaggcncggcgatcaagtcgtacgtggcctccgccacgaaccccacgacgacggtcgtggtcgccgggacggaggtgggcgtgcgcccctcgccggtggtggcggcgttctcgtcgcgcgggcccaacatggtgacgccggagatcctgaagccggacatgatcgcgccgggggtgaacatcctggcgtcgtggacgggcaaggccgggccgacgggcctcgccgccgacacccgccgcgtgggcttcaacatcatctccggcacgtccatgtcgtgcccgcacgtgagcgggctggcggcgctgctccggagcgcgcacccggagtggagccccgccgccgtgcgctcggcgctcatgaccacagcctacgccagctactccggcgggtcgtcgctgctggacgcggcgacgggcgggatggccacgccgttnnantacggcgcggggcacgtggaccccgcgcgggcgctggacccggggctcgtctacgacctgggcacccgcgactacgtggacttcttgtgcgcgctcaagtacagctccaccatgatcgccgccgtggcgcggagccgggagtacgcgtgcgccgagaacaagacctactccgtgggcgccctcaactacccgtccttctcggtggcctactcgacggccaacggcgacggcggcggggactcggcnnccgtgacacacacgcggacgctgaccaacgtgggcggggcgggcacgtacaaggcgtccacgtcgctcgccgctgccaagggcgtggccgtggacgtggagccggcggagctggagttcacgtcggtgggggagaagaagagctacacggtgaggttcacgtccaagtcgcagccgtcgggcaccgccggtttcgggcggctcgtgtggtcggacgggaagcacagcgtggccagcccgatagcgttcacgtggacctgaacctgatggacggatggattataccatacgacagtggtttttggcgcctcagcctcaaagaaaggcccataatccatcatccatgtgacggcctcgttccctacactacgcagtcaaaagggccgaagtgtagggtgggaaggtttggagggggtacggtgcaaattggaggtttcttctgtgttgctattattactactaataaggtcattaatcctatcagcgtccgtaggttgtgatttttggatggaaatgggatcggggtggacggttggatggagattgatggtgcttggttgattggaatggaattattagagaggagaaggtttttagctt

SEQ ID NO: 39243 - protein, 764 aa, Zea mays subsp. mays
  peptide (1)..(764): Ceres Seq. ID no. 12417748
  misc_feature (360)..(458): Pfam Name: Pfam Description:  PA domain
  misc_feature (9)..(764): NCBI GI NO: 14488360 NR Description: putative serine protease
  misc_feature (10)..(764): NCBI GI NO: 18425181 NR Description: subtilisin-like serine protease ARA12
  misc_feature (1)..(764): NCBI GI NO: 7435657 NR Description: subtilisin-like proteinase (EC 3
  misc_feature (10)..(764): NCBI GI NO: 20147211 NR Description: AT5g67360/K8K14_8 [Arabidopsis thaliana]
  misc_feature (10)..(764): NCBI GI NO: 1076414 NR Description: subtilisin-like proteinase (EC 3
  misc_feature (25)..(763): NCBI GI NO: 18396193 NR Description: subtilisin-like serine protease, putative
  misc_feature (25)..(763): NCBI GI NO: 18423316 NR Description: subtilisin-like serine protease
  misc_feature (12)..(763): NCBI GI NO: 7435656 NR Description: subtilisin-like proteinase (EC 3
  misc_feature (17)..(762): NCBI GI NO: 21536632 NR Description: subtilisin-like serine protease
  misc_feature (1)..(763): NCBI GI NO: 22331076 NR Description: subtilisin-like serine protease, putative
  misc_feature (82)..(82): Xaa is any aa, unknown or other
  misc_feature (149)..(149): Xaa is any aa, unknown or other
  misc_feature (163)..(163): Xaa is any aa, unknown or other
  misc_feature (453)..(453): Xaa is any aa, unknown or other
  misc_feature (595)..(595): Xaa is any aa, unknown or other
  misc_feature (596)..(596): Xaa is any aa, unknown or other
  misc_feature (678)..(678): Xaa is any aa, unknown or other
  misc_feature (679)..(679): Xaa is any aa, unknown or other
MRNIGMLRALVLALAVAAAAAAEKRRTYIVHMAKSAMPAEYADHAEWYGASLRSVSASASAAKMLYAYDTVLHGFSARLTPXEASDLASAEGVLAVNPEARYELHTTRTPEFLGIAGQGLSPQSGTAGDVVVGVLDTGVWPESKSYDDXGLAEVPAWWKGQCXAGPGFDASTACNRKLVGARFFNKGYEAAMGPMDTDRESRSPLDDDGHGTHTSSTAAGAAVPGASLFGFAAGTARGMAPRARVAAYKVCWLGGCFSSDILAGMDAAVADGCGVLSLSLGGGAADYSRDSVAIGAFAATEQNVLVSCSAGNAGPGSSTLSNVAPWITTVGAGTLDRDFPAYVVLGDGKNYTGVSLYAGKPLPSAPIPIVYAANASNSTAGNLCMPGTLVPEKVAGKIVVCDRGVSARVQKGLVVRDAGGAGMVLSNTAANGQELVADAHLLPAAGVGEREGXAIKSYVASATNPTTTVVVAGTEVGVRPSPVVAAFSSRGPNMVTPEILKPDMIAPGVNILASWTGKAGPTGLAADTRRVGFNIISGTSMSCPHVSGLAALLRSAHPEWSPAAVRSALMTTAYASYSGGSSLLDAATGGMATPXXYGAGHVDPARALDPGLVYDLGTRDYVDFLCALKYSSTMIAAVARSREYACAENKTYSVGALNYPSFSVAYSTANGDGGGDSXXVTHTRTLTNVGGAGTYKASTSLAAAKGVAVDVEPAELEFTSVGEKKSYTVRFTSKSQPSGTAGFGRLVWSDGKHSVASPIAFTWT

SEQ ID NO: 39244 - protein, 759 aa, Zea mays subsp. mays
  peptide (1)..(759): Ceres Seq. ID no. 12417749
  misc_feature (355)..(453): Pfam Name: Pfam Description:  PA domain
  misc_feature (4)..(759): NCBI GI NO: 14488360 NR Description: putative serine protease
  misc_feature (5)..(759): NCBI GI NO: 18425181 NR Description: subtilisin-like serine protease ARA12
  misc_feature (1)..(759): NCBI GI NO: 7435657 NR Description: subtilisin-like proteinase (EC 3
  misc_feature (5)..(759): NCBI GI NO: 20147211 NR Description: AT5g67360/K8K14_8 [Arabidopsis thaliana]
  misc_feature (5)..(759): NCBI GI NO: 1076414 NR Description: subtilisin-like proteinase (EC 3
  misc_feature (20)..(758): NCBI GI NO: 18396193 NR Description: subtilisin-like serine protease, putative
  misc_feature (20)..(758): NCBI GI NO: 18423316 NR Description: subtilisin-like serine protease
  misc_feature (7)..(758): NCBI GI NO: 7435656 NR Description: subtilisin-like proteinase (EC 3
  misc_feature (12)..(757): NCBI GI NO: 21536632 NR Description: subtilisin-like serine protease
  misc_feature (1)..(758): NCBI GI NO: 22331076 NR Description: subtilisin-like serine protease, putative
  misc_feature (77)..(77): Xaa is any aa, unknown or other
  misc_feature (144)..(144): Xaa is any aa, unknown or other
  misc_feature (158)..(158): Xaa is any aa, unknown or other
  misc_feature (448)..(448): Xaa is any aa, unknown or other
  misc_feature (590)..(590): Xaa is any aa, unknown or other
  misc_feature (591)..(591): Xaa is any aa, unknown or other
  misc_feature (673)..(673): Xaa is any aa, unknown or other
  misc_feature (674)..(674): Xaa is any aa, unknown or other
MLRALVLALAVAAAAAAEKRRTYIVHMAKSAMPAEYADHAEWYGASLRSVSASASAAKMLYAYDTVLHGFSARLTPXEASDLASAEGVLAVNPEARYELHTTRTPEFLGIAGQGLSPQSGTAGDVVVGVLDTGVWPESKSYDDXGLAEVPAWWKGQCXAGPGFDASTACNRKLVGARFFNKGYEAAMGPMDTDRESRSPLDDDGHGTHTSSTAAGAAVPGASLFGFAAGTARGMAPRARVAAYKVCWLGGCFSSDILAGMDAAVADGCGVLSLSLGGGAADYSRDSVAIGAFAATEQNVLVSCSAGNAGPGSSTLSNVAPWITTVGAGTLDRDFPAYVVLGDGKNYTGVSLYAGKPLPSAPIPIVYAANASNSTAGNLCMPGTLVPEKVAGKIVVCDRGVSARVQKGLVVRDAGGAGMVLSNTAANGQELVADAHLLPAAGVGEREGXAIKSYVASATNPTTTVVVAGTEVGVRPSPVVAAFSSRGPNMVTPEILKPDMIAPGVNILASWTGKAGPTGLAADTRRVGFNIISGTSMSCPHVSGLAALLRSAHPEWSPAAVRSALMTTAYASYSGGSSLLDAATGGMATPXXYGAGHVDPARALDPGLVYDLGTRDYVDFLCALKYSSTMIAAVARSREYACAENKTYSVGALNYPSFSVAYSTANGDGGGDSXXVTHTRTLTNVGGAGTYKASTSLAAAKGVAVDVEPAELEFTSVGEKKSYTVRFTSKSQPSGTAGFGRLVWSDGKHSVASPIAFTWT

SEQ ID NO: 39245 - protein, 733 aa, Zea mays subsp. mays
  peptide (1)..(733): Ceres Seq. ID no. 12417750
  misc_feature (329)..(427): Pfam Name: Pfam Description:  PA domain
  misc_feature (1)..(733): NCBI GI NO: 14488360 NR Description: putative serine protease
  misc_feature (1)..(733): NCBI GI NO: 18425181 NR Description: subtilisin-like serine protease ARA12
  misc_feature (1)..(733): NCBI GI NO: 7435657 NR Description: subtilisin-like proteinase (EC 3
  misc_feature (1)..(733): NCBI GI NO: 20147211 NR Description: AT5g67360/K8K14_8 [Arabidopsis thaliana]
  misc_feature (1)..(733): NCBI GI NO: 1076414 NR Description: subtilisin-like proteinase (EC 3
  misc_feature (1)..(732): NCBI GI NO: 18396193 NR Description: subtilisin-like serine protease, putative
  misc_feature (1)..(732): NCBI GI NO: 18423316 NR Description: subtilisin-like serine protease
  misc_feature (1)..(732): NCBI GI NO: 7435656 NR Description: subtilisin-like proteinase (EC 3
  misc_feature (1)..(731): NCBI GI NO: 21536632 NR Description: subtilisin-like serine protease
  misc_feature (1)..(732): NCBI GI NO: 22331076 NR Description: subtilisin-like serine protease, putative
  misc_feature (51)..(51): Xaa is any aa, unknown or other
  misc_feature (118)..(118): Xaa is any aa, unknown or other
  misc_feature (132)..(132): Xaa is any aa, unknown or other
  misc_feature (422)..(422): Xaa is any aa, unknown or other
  misc_feature (564)..(564): Xaa is any aa, unknown or other
  misc_feature (565)..(565): Xaa is any aa, unknown or other
  misc_feature (647)..(647): Xaa is any aa, unknown or other
  misc_feature (648)..(648): Xaa is any aa, unknown or other
MAKSAMPAEYADHAEWYGASLRSVSASASAAKMLYAYDTVLHGFSARLTPXEASDLASAEGVLAVNPEARYELHTTRTPEFLGIAGQGLSPQSGTAGDVVVGVLDTGVWPESKSYDDXGLAEVPAWWKGQCXAGPGFDASTACNRKLVGARFFNKGYEAAMGPMDTDRESRSPLDDDGHGTHTSSTAAGAAVPGASLFGFAAGTARGMAPRARVAAYKVCWLGGCFSSDILAGMDAAVADGCGVLSLSLGGGAADYSRDSVAIGAFAATEQNVLVSCSAGNAGPGSSTLSNVAPWITTVGAGTLDRDFPAYVVLGDGKNYTGVSLYAGKPLPSAPIPIVYAANASNSTAGNLCMPGTLVPEKVAGKIVVCDRGVSARVQKGLVVRDAGGAGMVLSNTAANGQELVADAHLLPAAGVGEREGXAIKSYVASATNPTTTVVVAGTEVGVRPSPVVAAFSSRGPNMVTPEILKPDMIAPGVNILASWTGKAGPTGLAADTRRVGFNIISGTSMSCPHVSGLAALLRSAHPEWSPAAVRSALMTTAYASYSGGSSLLDAATGGMATPXXYGAGHVDPARALDPGLVYDLGTRDYVDFLCALKYSSTMIAAVARSREYACAENKTYSVGALNYPSFSVAYSTANGDGGGDSXXVTHTRTLTNVGGAGTYKASTSLAAAKGVAVDVEPAELEFTSVGEKKSYTVRFTSKSQPSGTAGFGRLVWSDGKHSVASPIAFTWT

SEQ ID NO: 39246 - DNA, 1378 bp, Zea mays subsp. mays
  misc_feature (1)..(1378): Ceres Seq. ID no. 13493680
  misc_feature (500)..(500): n is a, c, t, g, unknown, or other
gcacgagaccattacctagaaacatcctaatcgaaaaatgacaacttttcctttattcttggtgctcagattgcatcctttaatcatcaccattcaccatagacaagttaacaagtcaagctgatcgagacgctcgcaccagaggcttcttccaaagcaggggagaagaggagagaagagcgagcgagctatggggttcggcatggctgtccctcctcgacggtttcttccggcgcgcgctcacgtccgccggcctccgcgcaggctccgccgccgtggacgccgacaccaccatccacttctgggcgcacccctccctcctccaggcccaggcccagccctcctccgcggctccgcggccggtggtggtgctgatccacgggttcgggccggacccgacgtggcagtgggcggcgcaggcgggcccgctgtcgcgccacttcgacctgctggtgccggcagctgctcttcttcggcgcgtccgccacgcgcgcccccgngcggtccgacgcgttccaggccgccgcgctcgccgcgctgctcgcgggcggcggccacgtcccgggcctcggcggccggaccgtgcacctcgtgggcgccaactacggcggcctggtggcgtaccacctcgcccgggagctggagcagcgaggcgtccgcgtcgggaaggtggcgctgtgcgacgcggacgcgtgctggggcggcgaggacggccgcgcgctggcggcccggagcggcgcggcggacgtggtggacctgctggcgcctggcgacaccgccgcggtgcggcggaggtggatgatgagcgcctaccgccccttcaaacacatccccaagtgcttcctccgcgacctctttcagaaacacttcgcggacaacagggaggagaaggtggcgctagtcaaagggatcactgccaaagaaggcttcgagctgactcctctacctcaggaggtgctcatcatctggggtgagttcgaccagatctacccggtcgagaaagcacacaagatgggagagaagctcggggagaaggcgacggtgaaggtgatcccgggcacgggacacctgccgcagcaacaggacatcaagctcttcaaccgcgtcctcctcgacttcctgctgcagcctgctgctgcttccacctccaatggcagcgctgccgccaagtagctcgggttcttttcttggttctccacttgtattgtctcccgcgtggcacgagcttgctgttgtgttattgtgtatataaaattctctgcagctgggttttattccgcctcttcgttttctatccagctggtttggaaatagaggcaatgcacattgttgtgtttagcaagatgtgaaataaatgacgaggcattgttttttcttc

SEQ ID NO: 39247 - protein, 203 aa, Zea mays subsp. mays
  peptide (1)..(203): Ceres Seq. ID no. 13493681
  misc_feature (26)..(203): NCBI GI NO: 9845307 NR Description: pr5 [Rat cytomegalovirus]
  misc_feature (104)..(104): Xaa is any aa, unknown or other
MGFGMAVPPRRFLPARAHVRRPPRRLRRRGRRHHHPLLGAPLPPPGPGPALLRGSAAGGGADPRVRAGPDVAVGGAGGPAVAPLRPAGAGSCSSSARPPRAPPXGPTRSRPPRSPRCSRAAATSRASAAGPCTSWAPTTAAWWRTTSPGSWSSEASASGRWRCATRTRAGAARTAARWRPGAARRTWWTCWRLATPPRCGGGG

SEQ ID NO: 39248 - protein, 199 aa, Zea mays subsp. mays
  peptide (1)..(199): Ceres Seq. ID no. 13493682
  misc_feature (22)..(199): NCBI GI NO: 9845307 NR Description: pr5 [Rat cytomegalovirus]
  misc_feature (100)..(100): Xaa is any aa, unknown or other
MAVPPRRFLPARAHVRRPPRRLRRRGRRHHHPLLGAPLPPPGPGPALLRGSAAGGGADPRVRAGPDVAVGGAGGPAVAPLRPAGAGSCSSSARPPRAPPXGPTRSRPPRSPRCSRAAATSRASAAGPCTSWAPTTAAWWRTTSPGSWSSEASASGRWRCATRTRAGAARTAARWRPGAARRTWWTCWRLATPPRCGGGG

SEQ ID NO: 39249 - protein, 124 aa, Zea mays subsp. mays
  peptide (1)..(124): Ceres Seq. ID no. 13493683
  misc_feature (1)..(105): Pfam Name: Pfam Description:  alpha/beta hydrolase fold
  misc_feature (1)..(115): NCBI GI NO: 34896168 NR Description: contains ESTs C73890
  misc_feature (1)..(121): NCBI GI NO: 27436746 NR Description: Unknown protein
  misc_feature (1)..(108): NCBI GI NO: 30689631 NR Description: hydrolase, alpha/beta fold family
  misc_feature (1)..(112): NCBI GI NO: 22326938 NR Description: hydrolase, alpha/beta fold family
  misc_feature (14)..(116): NCBI GI NO: 24059850 NR Description: hydrolase-like protein
  misc_feature (1)..(118): NCBI GI NO: 27436745 NR Description: Hypothetical protein
  misc_feature (1)..(107): NCBI GI NO: 33146617 NR Description: hydrolase-like protein
  misc_feature (1)..(110): NCBI GI NO: 18411865 NR Description: hydrolase, alpha/beta fold family
  misc_feature (1)..(124): NCBI GI NO: 37533664 NR Description: putative hydrolase
  misc_feature (1)..(108): NCBI GI NO: 21592805 NR Description: unknown [Arabidopsis thaliana]
MMSAYRPFKHIPKCFLRDLFQKHFADNREEKVALVKGITAKEGFELTPLPQEVLIIWGEFDQIYPVEKAHKMGEKLGEKATVKVIPGTGHLPQQQDIKLFNRVLLDFLLQPAAASTSNGSAAAK

SEQ ID NO: 39250 - DNA, 1913 bp, Zea mays subsp. mays
  misc_feature (1)..(1913): Ceres Seq. ID no. 12417052
  misc_feature (934)..(934): n is a, c, t, g, unknown, or other
  misc_feature (939)..(939): n is a, c, t, g, unknown, or other
  misc_feature (1794)..(1794): n is a, c, t, g, unknown, or other
  misc_feature (1412)..(1412): n is a, c, t, g, unknown, or other
  misc_feature (1834)..(1834): n is a, c, t, g, unknown, or other
  misc_feature (1411)..(1411): n is a, c, t, g, unknown, or other
  misc_feature (1401)..(1401): n is a, c, t, g, unknown, or other
gtgagtccgtcttcaactccatcgtcgtcgtcgtcgcgcgcgccgagtgtttggttgctcgggagaggagactatggagacgaccaagagcttggaggttgctgggggcgccatggacgacaacgacgacgaccacgaggcgtgggtgcacgactcctccgtcgatcaccgcgggaggtctccctcccgcgccaccaccgggtcctggaaggccgccatgttcatcatcttgatcgagttcagcgagaggctgagctacttcggcatagccacgagcctcatgatctacctcaccaaggtgctgcaagaggagatgaaggcggccgccaagaatgccaactactggatgagcgtcaccacgctcatgcccctgctcggtggcttcctcgccgacggctacctcggcaggttctccaccgtcgtcgtctccaccgccgtctacctgctgggcctgacggtgctggcgacggcgcagctggcgccggggctgaggcccgaccgctcgccgcgcctgcacgaggcgctcttcttcgccggcatctacctggtgtccgccggcaccggcggccacaagccggccctggagagcttcggcgcggaccagttcgacgaggcccacgcggcggagcgggtgcgcaagatgtccttcttcaactggtggaactgcgcgctctgctcgggcgtcctgctcggcgtcaccgccgtcgtctacgcgcaggaccgcgccggctggggcgccgccaccgtcgcgctcgccgccgtcatggccgcctcgctcgccgtcttcctcgccggccgccggtactaccgctacagggtgcccgagggcagcccgctcacgccgctgctccaggtcctcgtcgccgccttccggaataggcggctcccgttgccggacgacgacgccgagctgtacgaggtcaggcggccgcanagtancaagaggaggctgctttgccacacctaccagctgaggttcctcgacaaggcagccatagtggagcccggcgccggcgaggacgcctgcgggccgtggcggctggcgacggtgacgcaggtggaggagacgaagctggtgctggcgatggtgcccatctgggtgtgcacgctgcccttcggcatggcggtggcgcaggtgtccaccttcttcatcaagcagggcagcgtgatggaccgtcgcctgggcccgcacttggaggccccggcggcgtcggtgttcgcgctgtcggcggtggccatgatcgccacggtggcggcctacgacaaggcgctggtgccgtacctgcggcgcgccacgggaggggagcgcgggatcagcatccttgggcgcgtgggcatcggcatggcgttcgccatcgcggggctgggcgtggcggcggcggttggagcggcggctcctgntgtcggcggnngccgcgcggccgtcgacgtcggtgctgtggctggtgccgcagttcgcgctgatgggcgtggccgacgggttcgcgctggtgggcctgcaggagtacttctacgagcaggtccccgacggcatgcgcagcctgggcatcggcctctacctcagcgtcattggcgccgggagcttcctgagcagcctggtgatcacggcggcggaccgcgccagctcccgcggagggcgcgccggctggttcgccaaggacctcaaccgcagcaggctggacctcttctactggctgctggcgtgcatcagcgccgtcaacctggcattctacgcgctggtcgccaccaagtgctcgtacaagcagaccgtcagggccggcagggtcggcgacnaggtcgagtgcgccgccgcgtagctgctgctgtacgtggnggtcatgaaaccaaccatgcatcagccgcacgaccatgtgtattattattattattataggggctaatagtaactagct

SEQ ID NO: 39251 - protein, 606 aa, Zea mays subsp. mays
  peptide (1)..(606): Ceres Seq. ID no. 12417053
  misc_feature (113)..(437): Pfam Name: Pfam Description:  POT family
  misc_feature (11)..(437): NCBI GI NO: 34897398 NR Description: putative peptide transport protein
  misc_feature (9)..(437): NCBI GI NO: 15224397 NR Description: putative peptide/amino acid transporter
  misc_feature (16)..(437): NCBI GI NO: 15232380 NR Description: transporter-like protein; protein id: At3g53960.1
  misc_feature (18)..(451): NCBI GI NO: 37530502 NR Description: putative LeOPT1 - oligopeptide transporter
  misc_feature (11)..(437): NCBI GI NO: 4102839 NR Description: LeOPT1 [Lycopersicon esculentum]
  misc_feature (38)..(452): NCBI GI NO: 11358594 NR Description: oligopeptide transporter-like protein
  misc_feature (27)..(437): NCBI GI NO: 30696666 NR Description: oligopeptide transporter -related
  misc_feature (18)..(437): NCBI GI NO: 15240905 NR Description: oligopeptide transporter - like protein
  misc_feature (7)..(435): NCBI GI NO: 37535270 NR Description: putative peptide transport protein
  misc_feature (6)..(437): NCBI GI NO: 6635838 NR Description: amino acid/peptide transporter [Prunus dulcis]
  misc_feature (287)..(287): Xaa is any aa, unknown or other
  misc_feature (289)..(289): Xaa is any aa, unknown or other
  misc_feature (443)..(443): Xaa is any aa, unknown or other
  misc_feature (446)..(446): Xaa is any aa, unknown or other
  misc_feature (447)..(447): Xaa is any aa, unknown or other
  misc_feature (574)..(574): Xaa is any aa, unknown or other
  misc_feature (587)..(587): Xaa is any aa, unknown or other
METTKSLEVAGGAMDDNDDDHEAWVHDSSVDHRGRSPSRATTGSWKAAMFIILIEFSERLSYFGIATSLMIYLTKVLQEEMKAAAKNANYWMSVTTLMPLLGGFLADGYLGRFSTVVVSTAVYLLGLTVLATAQLAPGLRPDRSPRLHEALFFAGIYLVSAGTGGHKPALESFGADQFDEAHAAERVRKMSFFNWWNCALCSGVLLGVTAVVYAQDRAGWGAATVALAAVMAASLAVFLAGRRYYRYRVPEGSPLTPLLQVLVAAFRNRRLPLPDDDAELYEVRRPXSXKRRLLCHTYQLRFLDKAAIVEPGAGEDACGPWRLATVTQVEETKLVLAMVPIWVCTLPFGMAVAQVSTFFIKQGSVMDRRLGPHLEAPAASVFALSAVAMIATVAAYDKALVPYLRRATGGERGISILGRVGIGMAFAIAGLGVAAAVGAAAPXVGXXRAAVDVGAVAGAAVRADGRGRRVRAGGPAGVLLRAGPRRHAQPGHRPLPQRHWRRELPEQPGDHGGGPRQLPRRARRLVRQGPQPQQAGPLLLAAGVHQRRQPGILRAGRHQVLVQADRQGRQGRRXGRVRRRVAAAVRXGHETNHASAARPCVLLLLL

SEQ ID NO: 39252 - protein, 593 aa, Zea mays subsp. mays
  peptide (1)..(593): Ceres Seq. ID no. 12417054
  misc_feature (100)..(424): Pfam Name: Pfam Description:  POT family
  misc_feature (1)..(424): NCBI GI NO: 34897398 NR Description: putative peptide transport protein
  misc_feature (1)..(424): NCBI GI NO: 15224397 NR Description: putative peptide/amino acid transporter
  misc_feature (3)..(424): NCBI GI NO: 15232380 NR Description: transporter-like protein; protein id: At3g53960.1
  misc_feature (5)..(438): NCBI GI NO: 37530502 NR Description: putative LeOPT1 - oligopeptide transporter
  misc_feature (1)..(424): NCBI GI NO: 4102839 NR Description: LeOPT1 [Lycopersicon esculentum]
  misc_feature (25)..(439): NCBI GI NO: 11358594 NR Description: oligopeptide transporter-like protein
  misc_feature (14)..(424): NCBI GI NO: 30696666 NR Description: oligopeptide transporter -related
  misc_feature (5)..(424): NCBI GI NO: 15240905 NR Description: oligopeptide transporter - like protein
  misc_feature (1)..(422): NCBI GI NO: 37535270 NR Description: putative peptide transport protein
  misc_feature (1)..(424): NCBI GI NO: 6635838 NR Description: amino acid/peptide transporter [Prunus dulcis]
  misc_feature (274)..(274): Xaa is any aa, unknown or other
  misc_feature (276)..(276): Xaa is any aa, unknown or other
  misc_feature (430)..(430): Xaa is any aa, unknown or other
  misc_feature (433)..(433): Xaa is any aa, unknown or other
  misc_feature (434)..(434): Xaa is any aa, unknown or other
  misc_feature (561)..(561): Xaa is any aa, unknown or other
  misc_feature (574)..(574): Xaa is any aa, unknown or other
MDDNDDDHEAWVHDSSVDHRGRSPSRATTGSWKAAMFIILIEFSERLSYFGIATSLMIYLTKVLQEEMKAAAKNANYWMSVTTLMPLLGGFLADGYLGRFSTVVVSTAVYLLGLTVLATAQLAPGLRPDRSPRLHEALFFAGIYLVSAGTGGHKPALESFGADQFDEAHAAERVRKMSFFNWWNCALCSGVLLGVTAVVYAQDRAGWGAATVALAAVMAASLAVFLAGRRYYRYRVPEGSPLTPLLQVLVAAFRNRRLPLPDDDAELYEVRRPXSXKRRLLCHTYQLRFLDKAAIVEPGAGEDACGPWRLATVTQVEETKLVLAMVPIWVCTLPFGMAVAQVSTFFIKQGSVMDRRLGPHLEAPAASVFALSAVAMIATVAAYDKALVPYLRRATGGERGISILGRVGIGMAFAIAGLGVAAAVGAAAPXVGXXRAAVDVGAVAGAAVRADGRGRRVRAGGPAGVLLRAGPRRHAQPGHRPLPQRHWRRELPEQPGDHGGGPRQLPRRARRLVRQGPQPQQAGPLLLAAGVHQRRQPGILRAGRHQVLVQADRQGRQGRRXGRVRRRVAAAVRXGHETNHASAARPCVLLLLL

SEQ ID NO: 39253 - protein, 558 aa, Zea mays subsp. mays
  peptide (1)..(558): Ceres Seq. ID no. 12417055
  misc_feature (65)..(389): Pfam Name: Pfam Description:  POT family
  misc_feature (1)..(389): NCBI GI NO: 34897398 NR Description: putative peptide transport protein
  misc_feature (1)..(389): NCBI GI NO: 15224397 NR Description: putative peptide/amino acid transporter
  misc_feature (1)..(389): NCBI GI NO: 15232380 NR Description: transporter-like protein; protein id: At3g53960.1
  misc_feature (1)..(403): NCBI GI NO: 37530502 NR Description: putative LeOPT1 - oligopeptide transporter
  misc_feature (1)..(389): NCBI GI NO: 4102839 NR Description: LeOPT1 [Lycopersicon esculentum]
  misc_feature (1)..(404): NCBI GI NO: 11358594 NR Description: oligopeptide transporter-like protein
  misc_feature (1)..(389): NCBI GI NO: 30696666 NR Description: oligopeptide transporter -related
  misc_feature (1)..(389): NCBI GI NO: 15240905 NR Description: oligopeptide transporter - like protein
  misc_feature (1)..(387): NCBI GI NO: 37535270 NR Description: putative peptide transport protein
  misc_feature (1)..(389): NCBI GI NO: 6635838 NR Description: amino acid/peptide transporter [Prunus dulcis]
  misc_feature (239)..(239): Xaa is any aa, unknown or other
  misc_feature (241)..(241): Xaa is any aa, unknown or other
  misc_feature (395)..(395): Xaa is any aa, unknown or other
  misc_feature (398)..(398): Xaa is any aa, unknown or other
  misc_feature (399)..(399): Xaa is any aa, unknown or other
  misc_feature (526)..(526): Xaa is any aa, unknown or other
  misc_feature (539)..(539): Xaa is any aa, unknown or other
MFIILIEFSERLSYFGIATSLMIYLTKVLQEEMKAAAKNANYWMSVTTLMPLLGGFLADGYLGRFSTVVVSTAVYLLGLTVLATAQLAPGLRPDRSPRLHEALFFAGIYLVSAGTGGHKPALESFGADQFDEAHAAERVRKMSFFNWWNCALCSGVLLGVTAVVYAQDRAGWGAATVALAAVMAASLAVFLAGRRYYRYRVPEGSPLTPLLQVLVAAFRNRRLPLPDDDAELYEVRRPXSXKRRLLCHTYQLRFLDKAAIVEPGAGEDACGPWRLATVTQVEETKLVLAMVPIWVCTLPFGMAVAQVSTFFIKQGSVMDRRLGPHLEAPAASVFALSAVAMIATVAAYDKALVPYLRRATGGERGISILGRVGIGMAFAIAGLGVAAAVGAAAPXVGXXRAAVDVGAVAGAAVRADGRGRRVRAGGPAGVLLRAGPRRHAQPGHRPLPQRHWRRELPEQPGDHGGGPRQLPRRARRLVRQGPQPQQAGPLLLAAGVHQRRQPGILRAGRHQVLVQADRQGRQGRRXGRVRRRVAAAVRXGHETNHASAARPCVLLLLL

SEQ ID NO: 39254 - DNA, 1271 bp, Zea mays subsp. mays
  misc_feature (1)..(1271): Ceres Seq. ID no. 12358974
  misc_feature (859)..(859): n is a, c, t, g, unknown, or other
  misc_feature (1005)..(1005): n is a, c, t, g, unknown, or other
aaagagaggtgccctagcttccctcccaatcccaccaggccgccgccaccacatcgcgccctcgcccgcttgccgccgaccctaaccggctgagcccctgaccagctcgtccaggcggacagcggcctgcggcaagccagcgcccagccaacagcgactgcctgactggtgagaggtgcgcatggtatggccggcctgatcagcttgcgcgccggtccgaggagttcaccgtcacttgcccggtcgtcgtccgcctgggcatcaccatcaccggcttcacaggtggcggttcgtttgccaagcccactgtttcgctgtgccaaacttcgtaggagccgtagtctactggcagcagcactggagatctctaaggacggttccgccgcggttctggccaacagcctgccttcccaaggggctatcgagacgctgcggaatgccgatgcagtatgtttcgacgttgacagcaccgtcatcctggacgagggcattgacgagcttgctgatttctgcggggcggggaaagctgttgctgaatggactgcaaaggccatgacagggactgttccgtttgaggaggcgctggcagccaggctgtctttaatcaagccatctctctcccaggtggaggagtgcctggagaagaggccaccaaggatttctcctggaatggctgatttggttaataagctaaaatccaataatattgacgtgttccttgtgtcaggaggcttccgacaaatgatcaagccagtagcatttgagcttggtattcctcctgaaaacatcactgcaaaccaattgttatttggcacattgggggagtacgccggatttgatcccacagagcccacttctngcagtgggggtaaagcaaaagcagtgcagcaaataaaacaggaccatggctacaagacagttgttatgattggtgatggtgcaactgatctggaggcccggcaacctggcggagcagacttgttcatatgttacgccggggttcanatgagagagccagtcgcagcacaagctgactgggtggtttttgattttcaagagctgatcactaagttgccatgaattcattacctaccgcaatttatgaacctttgcattgtcggctaaataattgcggccacattttaaagctgtagatttcactagcaattcttggagacaactgaattattacccggttgtaaagtattttttatttgttttcccgcattgtttgtatgatcctgaaccatgaatgcggaggttgtgttccg

SEQ ID NO: 39255 - protein, 297 aa, Zea mays subsp. mays
  peptide (1)..(297): Ceres Seq. ID no. 12358975
  misc_feature (85)..(271): Pfam Name: Pfam Description:  haloacid dehalogenase-like hydrolase
  misc_feature (77)..(297): NCBI GI NO: 4680206 NR Description: hypothetical protein [Sorghum bicolor]
  misc_feature (71)..(296): NCBI GI NO: 15221827 NR Description: 3-phosphoserine phosphatase; protein id:At1g18640
  misc_feature (71)..(296): NCBI GI NO: 11358621 NR Description: phosphoserine phosphatase (EC 3
  misc_feature (84)..(296): NCBI GI NO: 34872053 NR Description: similar to expressed sequence AI480570
  misc_feature (84)..(296): NCBI GI NO: 4758972 NR Description: phosphoserine phosphatase
  misc_feature (84)..(296): NCBI GI NO: 19527116 NR Description: expressed sequence AI480570 [Mus musculus]
  misc_feature (84)..(296): NCBI GI NO: 31873380 NR Description: hypothetical protein [Homo sapiens]
  misc_feature (84)..(296): NCBI GI NO: 29726390 NR Description: Chain A
  misc_feature (78)..(293): NCBI GI NO: 31239763 NR Description: ENSANGP00000016587 [Anopheles gambiae]
  misc_feature (41)..(293): NCBI GI NO: 6513610 NR Description: O-phosphoserine phosphohydrolase Astray
  misc_feature (225)..(225): Xaa is any aa, unknown or other
  misc_feature (273)..(273): Xaa is any aa, unknown or other
MAGLISLRAGPRSSPSLARSSSAWASPSPASQVAVRLPSPLFRCAKLRRSRSLLAAALEISKDGSAAVLANSLPSQGAIETLRNADAVCFDVDSTVILDEGIDELADFCGAGKAVAEWTAKAMTGTVPFEEALAARLSLIKPSLSQVEECLEKRPPRISPGMADLVNKLKSNNIDVFLVSGGFRQMIKPVAFELGIPPENITANQLLFGTLGEYAGFDPTEPTSXSGGKAKAVQQIKQDHGYKTVVMIGDGATDLEARQPGGADLFICYAGVXMREPVAAQADWVVFDFQELITKLP

SEQ ID NO: 39256 - protein, 175 aa, Zea mays subsp. mays
  peptide (1)..(175): Ceres Seq. ID no. 12358976
  misc_feature (1)..(149): Pfam Name: Pfam Description:  haloacid dehalogenase-like hydrolase
  misc_feature (1)..(175): NCBI GI NO: 4680206 NR Description: hypothetical protein [Sorghum bicolor]
  misc_feature (1)..(174): NCBI GI NO: 15221827 NR Description: 3-phosphoserine phosphatase; protein id:At1g18640
  misc_feature (1)..(174): NCBI GI NO: 11358621 NR Description: phosphoserine phosphatase (EC 3
  misc_feature (1)..(174): NCBI GI NO: 34872053 NR Description: similar to expressed sequence AI480570
  misc_feature (1)..(174): NCBI GI NO: 4758972 NR Description: phosphoserine phosphatase
  misc_feature (1)..(174): NCBI GI NO: 19527116 NR Description: expressed sequence AI480570 [Mus musculus]
  misc_feature (1)..(174): NCBI GI NO: 31873380 NR Description: hypothetical protein [Homo sapiens]
  misc_feature (1)..(174): NCBI GI NO: 29726390 NR Description: Chain A
  misc_feature (1)..(171): NCBI GI NO: 31239763 NR Description: ENSANGP00000016587 [Anopheles gambiae]
  misc_feature (1)..(171): NCBI GI NO: 6513610 NR Description: O-phosphoserine phosphohydrolase Astray
  misc_feature (103)..(103): Xaa is any aa, unknown or other
  misc_feature (151)..(151): Xaa is any aa, unknown or other
MTGTVPFEEALAARLSLIKPSLSQVEECLEKRPPRISPGMADLVNKLKSNNIDVFLVSGGFRQMIKPVAFELGIPPENITANQLLFGTLGEYAGFDPTEPTSXSGGKAKAVQQIKQDHGYKTVVMIGDGATDLEARQPGGADLFICYAGVXMREPVAAQADWVVFDFQELITKLP

SEQ ID NO: 39257 - DNA, 831 bp, Zea mays subsp. mays
  misc_feature (1)..(831): Ceres Seq. ID no. 12375378
aggctcgtgcaccatttcccctggttcccctcaatccaaatagtgccgtcccccccatcggctacctttcctcatcccacgcggcgcccatgccagccacacctgttcgaccacctgacccgcgcgcgccctgatggctcccgcgctcacctccaacccgccctccttccgtcccctaacgtccccactccgccgtcgtgccgccaccgtcccatgccgcgtcggtaagcccggcaaggactcctccgctgcggatgacgctaccggccccaacaagaggcccaacctcttcgcggacttcgggaatgccaagtcgctcatacaggcgttcccgtcgcagtcgctgttcgcgggcggtggcaggggcaggaaggacccgcagacggtgttcgtcgcaggcgccacagggcaggccggggtccgcatcgcgcagaccctgctgcggcaggggtttgccgtgcgcgctggcgtcccggacctagcgtcggcgcaggagctagcgcggctggcggcggcataccggctcatctcccccgcggaagcgcggcggctaaacgcggtagaggcgggcttcggtgaccccgacgcgatagccaagtccatcggccccgccgcgaaggtggtggtcaccgtcggctcggccgagaaagggccagaaggcggaggcgtcaccaccgacgacgcgctccgagtggtgcgggccgcagatctcgccagcgtggcgcacgtcgttgtcgtgtatgacgagggggcggccagcggcggccttggcggcgggggctccacttacaatgtgcttagcaagttctatctatcagagtgttttagttc

SEQ ID NO: 39258 - protein, 232 aa, Zea mays subsp. mays
  peptide (1)..(232): Ceres Seq. ID no. 12375379
  misc_feature (5)..(222): NCBI GI NO: 7487756 NR Description: hypothetical protein T6H20
  misc_feature (5)..(222): NCBI GI NO: 18408279 NR Description: putative protein; protein id: At3g46780
  misc_feature (80)..(212): NCBI GI NO: 21616072 NR Description: Tic62 protein [Pisum sativum]
MAPALTSNPPSFRPLTSPLRRRAATVPCRVGKPGKDSSAADDATGPNKRPNLFADFGNAKSLIQAFPSQSLFAGGGRGRKDPQTVFVAGATGQAGVRIAQTLLRQGFAVRAGVPDLASAQELARLAAAYRLISPAEARRLNAVEAGFGDPDAIAKSIGPAAKVVVTVGSAEKGPEGGGVTTDDALRVVRAADLASVAHVVVVYDEGAASGGLGGGGSTYNVLSKFYLSECFS

SEQ ID NO: 39259 - DNA, 1155 bp, Zea mays subsp. mays
  misc_feature (1)..(1155): Ceres Seq. ID no. 12369561
atctctggtctggtcgctgcgcctcccgcttggccgcgagcccgcgaccatggcggcgccacccgtccccgtcctctgcagcgcttccccatgtcgcatcaccacccacctcgcccctcctgcctttcggaccgttgccgcggcgcggccgcaggccttgcccttcgtcttgtgcgtcgagcagcgcgtggggccctcggcgcgcgcgcgcgcgccgttcgcggccaagcgcggcggcggcggcgaggtatccgcggaagctccagacggcacgcgcgcgctgctccaggcggcgctctggggcgccgaggctgcctatatactctggctcttccttctgccttacgccccgggcgacccggtctgggcaatctcgcaggctaccatcagcgacctcatcggcctatcactcaacttcttcttcgtcctgccgctgctcaactcagttggcgttcacctgctcgaatcgcctctacttcaccctatggcagaaggattgttcaacttggtgctcgcttggacgctgctttttgcgccactcctcttcacggattgtaggagggaccgctacaagggatcgctcgacgtcctgtggggctttcagatgttcctcacaaacactttcttgataccttacatggcgatccgactgaacggtccggacgcggaccggtctccgccacgaagatcacagctgggttcagtcatggtcaacggcgcgccggctgtgggcgcggtcggcggcctcgtctgcgttctctcgatcgtttgggcgttctctggccgcggagattctggtttcggaggcattgcggaacggtggcagtatctgcagagctacctattctcggagcggcttgcttatgcgtttctctgggatatgtttctgtactccgtattccagccgtggctgatcggggacaatcttgggaacgtgaaggcggatgctgctgggcttgtgagtgtggtgcggttcgtccccgttgtgggtttagttgcctaccttctttgcttagaggaagaggattagctgttaactgtgttttttatatattttttttgtcgatcgtttggatcgttgatcagcgtgcagttgagtggattctgtgcttggtggcagtgagtttgcaactgaaaacacaaatcttgccgccg

SEQ ID NO: 39260 - protein, 342 aa, Zea mays subsp. mays
  peptide (1)..(342): Ceres Seq. ID no. 12369562
  misc_feature (16)..(342): NCBI GI NO: 38344973 NR Description: OSJNBa0072F16.18
  misc_feature (89)..(342): NCBI GI NO: 18404669 NR Description: Expressed protein; protein id: At3g25805
  misc_feature (16)..(148): NCBI GI NO: 38567712 NR Description: B1358B12.10
  misc_feature (204)..(342): NCBI GI NO: 38567712 NR Description: B1358B12.10
  misc_feature (204)..(342): NCBI GI NO: 7939567 NR Description: gene_id:K13N2.15~unknown protein
  misc_feature (154)..(336): NCBI GI NO: 23043330 NR Description: hypothetical protein
SLVWSLRLPLGREPATMAAPPVPVLCSASPCRITTHLAPPAFRTVAAARPQALPFVLCVEQRVGPSARARAPFAAKRGGGGEVSAEAPDGTRALLQAALWGAEAAYILWLFLLPYAPGDPVWAISQATISDLIGLSLNFFFVLPLLNSVGVHLLESPLLHPMAEGLFNLVLAWTLLFAPLLFTDCRRDRYKGSLDVLWGFQMFLTNTFLIPYMAIRLNGPDADRSPPRRSQLGSVMVNGAPAVGAVGGLVCVLSIVWAFSGRGDSGFGGIAERWQYLQSYLFSERLAYAFLWDMFLYSVFQPWLIGDNLGNVKADAAGLVSVVRFVPVVGLVAYLLCLEEED

SEQ ID NO: 39261 - protein, 326 aa, Zea mays subsp. mays
  peptide (1)..(326): Ceres Seq. ID no. 12369563
  misc_feature (1)..(326): NCBI GI NO: 38344973 NR Description: OSJNBa0072F16.18
  misc_feature (73)..(326): NCBI GI NO: 18404669 NR Description: Expressed protein; protein id: At3g25805
  misc_feature (1)..(132): NCBI GI NO: 38567712 NR Description: B1358B12.10
  misc_feature (188)..(326): NCBI GI NO: 38567712 NR Description: B1358B12.10
  misc_feature (188)..(326): NCBI GI NO: 7939567 NR Description: gene_id:K13N2.15~unknown protein
  misc_feature (138)..(320): NCBI GI NO: 23043330 NR Description: hypothetical protein
MAAPPVPVLCSASPCRITTHLAPPAFRTVAAARPQALPFVLCVEQRVGPSARARAPFAAKRGGGGEVSAEAPDGTRALLQAALWGAEAAYILWLFLLPYAPGDPVWAISQATISDLIGLSLNFFFVLPLLNSVGVHLLESPLLHPMAEGLFNLVLAWTLLFAPLLFTDCRRDRYKGSLDVLWGFQMFLTNTFLIPYMAIRLNGPDADRSPPRRSQLGSVMVNGAPAVGAVGGLVCVLSIVWAFSGRGDSGFGGIAERWQYLQSYLFSERLAYAFLWDMFLYSVFQPWLIGDNLGNVKADAAGLVSVVRFVPVVGLVAYLLCLEEED

SEQ ID NO: 39262 - protein, 208 aa, Zea mays subsp. mays
  peptide (1)..(208): Ceres Seq. ID no. 12369564
LWSGRCASRLAASPRPWRRHPSPSSAALPHVASPPTSPLLPFGPLPRRGRRPCPSSCASSSAWGPRRARARRSRPSAAAAARYPRKLQTARARCSRRRSGAPRLPIYSGSSFCLTPRATRSGQSRRLPSATSSAYHSTSSSSCRCSTQLAFTCSNRLYFTLWQKDCSTWCSLGRCFLRHSSSRIVGGTATRDRSTSCGAFRCSSQTLS

SEQ ID NO: 39263 - DNA, 2712 bp, Zea mays subsp. mays
  misc_feature (1)..(2712): Ceres Seq. ID no. 12382014
gcacgagaccattacctagaacatcctaatcaaaaaaaaaaccataagaacgcacgcgagtggccagtgggaaccaggaaacaagaaagtgagagggggaagctgcggccgacggccgagctcttgccgtccctatccacccctctcgcctttcgctcttgcctttcgctccgtccagccgccgcgtaaaatccgcggaaccagatgcccttatccgccctctgatcgaatccggccagaaagcccggttctttgtcgtcgtcctcggcatcgccgacgaccttgatggcactggaggcgggtagtagcggcggcggcgggaggggatggggtggcgggttccgaagtctgatgcggcggaagcaggtggactccgatcgggtccgcgccgagggccagccgcagctcgccaaggagctcaacgtgccggagctggtcgcgatcggggttggttccacagttggaccaggagtatatgttcttgttggaacagttgctagggagcacgctggtccagcattgacaatttcatttctgatagctggaatagcagccgcgctttcagctttctgttatgctgagcttgctagtcgttgcccctcagctggaagtgcttaccattattcatatatctgtgttggagaaggtgttgcctggttgattggctgggctctagtgctggaatatactattggtgggtctgctgttgcccgtggtatatctccaaatttagccttgttttttggaggacaggatagtgtgccatggattttagcacgccatcagcttccatggtttgatatcattgttgatccctgtgcagccgctcttgtttttgttgtcactgttttactatgtgtgggaattaaagagagttcatttgcacaaggagtcgtaacagttctcaatgcctgtgtaatgatatttgttattgtagctgggagttatattggcttccaaataggatgggtgggctacaaggtttctgacgggtatttcccacatggagtaaatggaatgcttgctggatcagcaactgtcttctttgcatacataggctttgatacagtcgctagtacagctgaagaggtaaagaatccacagagagatttgccattgggaattggagttgcattggctatttgttgtgcgttgtatatggctgtttctgttgttattgttgggctggtgccatatttcgccatggatccagatactcctatttcatctgcctttgcaaggcatggaatgcaatgggctatgtacgttgtgacaagtggtgctgttcttgcactctgctcgaccttgatgggctcacttcttccacagcctagaatacttatggccatggcacgagatggtctgttgccatccttcttctctgatgttaacaagcaaactcaagtacctgttaagagcacaattgtgactggcatctgtgcagctgctctggcttttgcaatggatgtttcacagttagcaggaatggtcagtgtaggcacactccttgcattcaccgtagttgctgtctcgatcttgatactcagatatgtccctccatatgaggtccctttgccgccttctatgcaagaatcattccgtttgaaccaggaatgtgatgaggaaagggataggggtcttcttggagttgggaactgtaacttatctcagacaaaggatgtgattgtggtagtagaatcagtgaaggatcctctcattgataaaagactgcataaaggcaagatggatgagacgaagcgccgaaagatagcctctttaagcatagggtctgtgtgtgtaggggttctgatccttgcttcttcagcctctgccacatggttgccttttctcccgatatgtattggctgcaccattggagttgtgctccttctggctggcctcagcttgctctcctggatcgaccaagatgctggcaggcactcttttggtcattccggaggattcacatgcccttttgttccagtgctaccagttttgtgtatcctgataaatacgtatctgttaataaacctgagtggtgacacatggatgagagttggcatatggctgctgctgggtgttcttgtgtacgctttctacggacgaacccacagctccttaatagatgttgtctacgttccggcagcgcaagctgatgagatatacaggagttcatcaggatatgtatcatagaaaagaacagctgcagctgcagtcatgtgacacgatagagccacagaaagaccgagcggatgacagttacttaaaaggtggttgtccatcagctgtagaaaattggttatcagccggggaagacggaactgactgttatttctttcatgctcggctagcatgatctcgtggatgcaacttggcaagatatatatgctgctcacgagccaggtcaatttatacattgttggagtgtgtgtagatgtggtgtatataaaaccaactgggtggagtatgtgatgcgatacataataatttgtctaattcatgtaaaagccctttgtgcggaaatgtgagtgcatttaaaggacctattgaaaacagtacacggacggcaaaagaagccaccttttttatatatcatgtatatgtcgtccacaaacattctcttcatgtgtcatgtatatttgaccttggtcaggggttcatgaatgtactttgtttcttggtgtggcttttattagggataaaaagtccact

SEQ ID NO: 39264 - protein, 635 aa, Zea mays subsp. mays
  peptide (1)..(635): Ceres Seq. ID no. 12382015
  misc_feature (1)..(635): NCBI GI NO: 29244640 NR Description: putative cationic amino acid transporter
  misc_feature (10)..(632): NCBI GI NO: 23306414 NR Description: Unknown protein [Arabidopsis thaliana]
  misc_feature (10)..(632): NCBI GI NO: 30696198 NR Description: expressed protein [Arabidopsis thaliana]
  misc_feature (17)..(630): NCBI GI NO: 30693001 NR Description: cationic amino acid transporter -related protein
  misc_feature (17)..(630): NCBI GI NO: 10178213 NR Description: cationic amino acid transporter-like protein
  misc_feature (21)..(619): NCBI GI NO: 22330822 NR Description: putative cationic amino acid transporter
  misc_feature (21)..(619): NCBI GI NO: 6006869 NR Description: putative cationic amino acid transporter
  misc_feature (55)..(617): NCBI GI NO: 37534696 NR Description: putative cationic amino acid transporter -likeprotein
  misc_feature (20)..(610): NCBI GI NO: 6671596 NR Description: solute carrier family 7
  misc_feature (236)..(610): NCBI GI NO: 4507047 NR Description: solute carrier family 7
MALEAGSSGGGGRGWGGGFRSLMRRKQVDSDRVRAEGQPQLAKELNVPELVAIGVGSTVGPGVYVLVGTVAREHAGPALTISFLIAGIAAALSAFCYAELASRCPSAGSAYHYSYICVGEGVAWLIGWALVLEYTIGGSAVARGISPNLALFFGGQDSVPWILARHQLPWFDIIVDPCAAALVFVVTVLLCVGIKESSFAQGVVTVLNACVMIFVIVAGSYIGFQIGWVGYKVSDGYFPHGVNGMLAGSATVFFAYIGFDTVASTAEEVKNPQRDLPLGIGVALAICCALYMAVSVVIVGLVPYFAMDPDTPISSAFARHGMQWAMYVVTSGAVLALCSTLMGSLLPQPRILMAMARDGLLPSFFSDVNKQTQVPVKSTIVTGICAAALAFAMDVSQLAGMVSVGTLLAFTVVAVSILILRYVPPYEVPLPPSMQESFRLNQECDEERDRGLLGVGNCNLSQTKDVIVVVESVKDPLIDKRLHKGKMDETKRRKIASLSIGSVCVGVLILASSASATWLPFLPICIGCTIGVVLLLAGLSLLSWIDQDAGRHSFGHSGGFTCPFVPVLPVLCILINTYLLINLSGDTWMRVGIWLLLGVLVYAFYGRTHSSLIDVVYVPAAQADEIYRSSSGYVS

SEQ ID NO: 39265 - protein, 613 aa, Zea mays subsp. mays
  peptide (1)..(613): Ceres Seq. ID no. 12382016
  misc_feature (1)..(613): NCBI GI NO: 29244640 NR Description: putative cationic amino acid transporter
  misc_feature (1)..(610): NCBI GI NO: 23306414 NR Description: Unknown protein [Arabidopsis thaliana]
  misc_feature (1)..(610): NCBI GI NO: 30696198 NR Description: expressed protein [Arabidopsis thaliana]
  misc_feature (1)..(608): NCBI GI NO: 30693001 NR Description: cationic amino acid transporter -related protein
  misc_feature (1)..(608): NCBI GI NO: 10178213 NR Description: cationic amino acid transporter-like protein
  misc_feature (1)..(597): NCBI GI NO: 22330822 NR Description: putative cationic amino acid transporter
  misc_feature (1)..(597): NCBI GI NO: 6006869 NR Description: putative cationic amino acid transporter
  misc_feature (33)..(595): NCBI GI NO: 37534696 NR Description: putative cationic amino acid transporter -likeprotein
  misc_feature (1)..(588): NCBI GI NO: 6671596 NR Description: solute carrier family 7
  misc_feature (214)..(588): NCBI GI NO: 4507047 NR Description: solute carrier family 7
MRRKQVDSDRVRAEGQPQLAKELNVPELVAIGVGSTVGPGVYVLVGTVAREHAGPALTISFLIAGIAAALSAFCYAELASRCPSAGSAYHYSYICVGEGVAWLIGWALVLEYTIGGSAVARGISPNLALFFGGQDSVPWILARHQLPWFDIIVDPCAAALVFVVTVLLCVGIKESSFAQGVVTVLNACVMIFVIVAGSYIGFQIGWVGYKVSDGYFPHGVNGMLAGSATVFFAYIGFDTVASTAEEVKNPQRDLPLGIGVALAICCALYMAVSVVIVGLVPYFAMDPDTPISSAFARHGMQWAMYVVTSGAVLALCSTLMGSLLPQPRILMAMARDGLLPSFFSDVNKQTQVPVKSTIVTGICAAALAFAMDVSQLAGMVSVGTLLAFTVVAVSILILRYVPPYEVPLPPSMQESFRLNQECDEERDRGLLGVGNCNLSQTKDVIVVVESVKDPLIDKRLHKGKMDETKRRKIASLSIGSVCVGVLILASSASATWLPFLPICIGCTIGVVLLLAGLSLLSWIDQDAGRHSFGHSGGFTCPFVPVLPVLCILINTYLLINLSGDTWMRVGIWLLLGVLVYAFYGRTHSSLIDVVYVPAAQADEIYRSSSGYVS

SEQ ID NO: 39266 - protein, 424 aa, Zea mays subsp. mays
  peptide (1)..(424): Ceres Seq. ID no. 12382017
  misc_feature (1)..(424): NCBI GI NO: 29244640 NR Description: putative cationic amino acid transporter
  misc_feature (1)..(421): NCBI GI NO: 23306414 NR Description: Unknown protein [Arabidopsis thaliana]
  misc_feature (1)..(421): NCBI GI NO: 30696198 NR Description: expressed protein [Arabidopsis thaliana]
  misc_feature (1)..(419): NCBI GI NO: 30693001 NR Description: cationic amino acid transporter -related protein
  misc_feature (1)..(419): NCBI GI NO: 10178213 NR Description: cationic amino acid transporter-like protein
  misc_feature (1)..(408): NCBI GI NO: 22330822 NR Description: putative cationic amino acid transporter
  misc_feature (1)..(408): NCBI GI NO: 6006869 NR Description: putative cationic amino acid transporter
  misc_feature (1)..(406): NCBI GI NO: 37534696 NR Description: putative cationic amino acid transporter -likeprotein
  misc_feature (1)..(399): NCBI GI NO: 6671596 NR Description: solute carrier family 7
  misc_feature (25)..(399): NCBI GI NO: 4507047 NR Description: solute carrier family 7
MIFVIVAGSYIGFQIGWVGYKVSDGYFPHGVNGMLAGSATVFFAYIGFDTVASTAEEVKNPQRDLPLGIGVALAICCALYMAVSVVIVGLVPYFAMDPDTPISSAFARHGMQWAMYVVTSGAVLALCSTLMGSLLPQPRILMAMARDGLLPSFFSDVNKQTQVPVKSTIVTGICAAALAFAMDVSQLAGMVSVGTLLAFTVVAVSILILRYVPPYEVPLPPSMQESFRLNQECDEERDRGLLGVGNCNLSQTKDVIVVVESVKDPLIDKRLHKGKMDETKRRKIASLSIGSVCVGVLILASSASATWLPFLPICIGCTIGVVLLLAGLSLLSWIDQDAGRHSFGHSGGFTCPFVPVLPVLCILINTYLLINLSGDTWMRVGIWLLLGVLVYAFYGRTHSSLIDVVYVPAAQADEIYRSSSGYVS

SEQ ID NO: 39267 - DNA, 1314 bp, Zea mays subsp. mays
  misc_feature (1)..(1314): Ceres Seq. ID no. 15179566
agaatacacaggctttcctatacttggagttgaatggcagaaaatggagaacccggatctccgcaaagcaatgggaatgaaaccagatcaaaagggtgttcgtgttagaagggtggagcccactgctccagaatctggatgcctacgaccatctgatattattcttagtttcgatggtgttgacattgctaatgatggaacagttcctttcaggcatggtgagcgcattggtttcagttatctggtttctcagaaatatactggagagaaagctcttgttaaagttctgcgtgattcaaaagttcatgaatttaaaataaggttagcaactcacaagcggcttgttgcggctcatgtgaagggcaggccaccgtcgtattacatagttgctggctttgtttttgcagctatctctgttccatatcttcgatctgagtatggaaaagattatgaatatgatgcacctgtcaagttgttggtgaaacatttacatgcgatggcggaatcacctgatgaacagcttgtggtggtatcacaggtgcttgtatcagatatcaatataggttatgaagaaatagtcaatactcaggtacttgctttcaatggccagcctgtaaaaaatttaaagaacttggcgaccatggtggaaaattgcaaggatgaatttttgaagtttgatctggagtatgaccagattgttgtcctcgagacgaaaactgcaaaggctgctacccaggacattctgacgacgcactgtataccttctgcaatgtcggatgaccttaaggcctagtggaaggaagggagcataacgcagccctgggccagggccatcaggtgggccaatagtttgggccgcattttcggctgaattgattagcgaagcgtacgatccgtgatgaagaggaaccccaatgtttatctgtttgagttaaatatcttttgaggggttgtggatgtgagagtgctggctggtgtctaaagctccgccattatagaaggtttgagggactgtcactgtcagataacaataaactggagttgttacaggcggagtcatcgtgaaaacgatagtgtctagtaagaagctgagtttgttttttctttacatgatttcattacaactacaccaaattattgacggggaaaggaatcataattggtccgtgatttcattacatccttggtgtctcaagcttgttccgcatagtacctgctatttgtcaacgatactttcacttctgcttgtaaagtatttgcatcttgtttctggacaagtggtacttaaaagatatttaagcgccgtgaaccaac

SEQ ID NO: 39268 - protein, 263 aa, Zea mays subsp. mays
  peptide (1)..(263): Ceres Seq. ID no. 15179567
  misc_feature (1)..(262): NCBI GI NO: 18421957 NR Description: DegP protease [Arabidopsis thaliana]
  misc_feature (1)..(261): NCBI GI NO: 18421592 NR Description: DegP protease [Arabidopsis thaliana]
  misc_feature (1)..(261): NCBI GI NO: 18407488 NR Description: DegP2 protease [Arabidopsis thaliana]
  misc_feature (1)..(261): NCBI GI NO: 25409077 NR Description: probable serine proteinase
  misc_feature (1)..(260): NCBI GI NO: 18408329 NR Description: DegP protease [Arabidopsis thaliana]
  misc_feature (1)..(262): NCBI GI NO: 18408327 NR Description: DegP protease [Arabidopsis thaliana]
  misc_feature (1)..(146): NCBI GI NO: 18401167 NR Description: DegP protease [Arabidopsis thaliana]
  misc_feature (179)..(261): NCBI GI NO: 18401167 NR Description: DegP protease [Arabidopsis thaliana]
  misc_feature (1)..(146): NCBI GI NO: 9279653 NR Description: gb|AAF23847
  misc_feature (175)..(261): NCBI GI NO: 9279653 NR Description: gb|AAF23847
EYTGFPILGVEWQKMENPDLRKAMGMKPDQKGVRVRRVEPTAPESGCLRPSDIILSFDGVDIANDGTVPFRHGERIGFSYLVSQKYTGEKALVKVLRDSKVHEFKIRLATHKRLVAAHVKGRPPSYYIVAGFVFAAISVPYLRSEYGKDYEYDAPVKLLVKHLHAMAESPDEQLVVVSQVLVSDINIGYEEIVNTQVLAFNGQPVKNLKNLATMVENCKDEFLKFDLEYDQIVVLETKTAKAATQDILTTHCIPSAMSDDLKA

SEQ ID NO: 39269 - protein, 249 aa, Zea mays subsp. mays
  peptide (1)..(249): Ceres Seq. ID no. 15179568
  misc_feature (1)..(248): NCBI GI NO: 18421957 NR Description: DegP protease [Arabidopsis thaliana]
  misc_feature (1)..(247): NCBI GI NO: 18421592 NR Description: DegP protease [Arabidopsis thaliana]
  misc_feature (1)..(247): NCBI GI NO: 18407488 NR Description: DegP2 protease [Arabidopsis thaliana]
  misc_feature (1)..(247): NCBI GI NO: 25409077 NR Description: probable serine proteinase
  misc_feature (1)..(246): NCBI GI NO: 18408329 NR Description: DegP protease [Arabidopsis thaliana]
  misc_feature (1)..(248): NCBI GI NO: 18408327 NR Description: DegP protease [Arabidopsis thaliana]
  misc_feature (1)..(132): NCBI GI NO: 18401167 NR Description: DegP protease [Arabidopsis thaliana]
  misc_feature (165)..(247): NCBI GI NO: 18401167 NR Description: DegP protease [Arabidopsis thaliana]
  misc_feature (1)..(132): NCBI GI NO: 9279653 NR Description: gb|AAF23847
  misc_feature (161)..(247): NCBI GI NO: 9279653 NR Description: gb|AAF23847
MENPDLRKAMGMKPDQKGVRVRRVEPTAPESGCLRPSDIILSFDGVDIANDGTVPFRHGERIGFSYLVSQKYTGEKALVKVLRDSKVHEFKIRLATHKRLVAAHVKGRPPSYYIVAGFVFAAISVPYLRSEYGKDYEYDAPVKLLVKHLHAMAESPDEQLVVVSQVLVSDINIGYEEIVNTQVLAFNGQPVKNLKNLATMVENCKDEFLKFDLEYDQIVVLETKTAKAATQDILTTHCIPSAMSDDLKA

SEQ ID NO: 39270 - protein, 240 aa, Zea mays subsp. mays
  peptide (1)..(240): Ceres Seq. ID no. 15179569
  misc_feature (1)..(239): NCBI GI NO: 18421957 NR Description: DegP protease [Arabidopsis thaliana]
  misc_feature (1)..(238): NCBI GI NO: 18421592 NR Description: DegP protease [Arabidopsis thaliana]
  misc_feature (1)..(238): NCBI GI NO: 18407488 NR Description: DegP2 protease [Arabidopsis thaliana]
  misc_feature (1)..(238): NCBI GI NO: 25409077 NR Description: probable serine proteinase
  misc_feature (1)..(237): NCBI GI NO: 18408329 NR Description: DegP protease [Arabidopsis thaliana]
  misc_feature (1)..(239): NCBI GI NO: 18408327 NR Description: DegP protease [Arabidopsis thaliana]
  misc_feature (1)..(123): NCBI GI NO: 18401167 NR Description: DegP protease [Arabidopsis thaliana]
  misc_feature (156)..(238): NCBI GI NO: 18401167 NR Description: DegP protease [Arabidopsis thaliana]
  misc_feature (1)..(123): NCBI GI NO: 9279653 NR Description: gb|AAF23847
  misc_feature (152)..(238): NCBI GI NO: 9279653 NR Description: gb|AAF23847
MGMKPDQKGVRVRRVEPTAPESGCLRPSDIILSFDGVDIANDGTVPFRHGERIGFSYLVSQKYTGEKALVKVLRDSKVHEFKIRLATHKRLVAAHVKGRPPSYYIVAGFVFAAISVPYLRSEYGKDYEYDAPVKLLVKHLHAMAESPDEQLVVVSQVLVSDINIGYEEIVNTQVLAFNGQPVKNLKNLATMVENCKDEFLKFDLEYDQIVVLETKTAKAATQDILTTHCIPSAMSDDLKA

SEQ ID NO: 39271 - DNA, 1498 bp, Zea mays subsp. mays; identical to SEQ ID NO: 30423
  misc_feature (1)..(1498): Ceres Seq. ID no. 13570285

SEQ ID NO: 39272 - protein, 180 aa, Zea mays subsp. mays; identical to SEQ ID NO: 30424
  peptide (1)..(180): Ceres Seq. ID no. 15222583
  misc_feature (1)..(85): Pfam Name: Pfam Description:  FAD binding domain
  misc_feature (1)..(179): NCBI GI NO: 34394418 NR Description: putative succinate dehydrogenase flavoprotein alpha subunit
  misc_feature (1)..(179): NCBI GI NO: 15240075 NR Description: succinate dehydrogenase
  misc_feature (1)..(179): NCBI GI NO: 15224174 NR Description: succinate dehydrogenase
  misc_feature (1)..(179): NCBI GI NO: 21231574 NR Description: succinate dehydrogenase flavoprotein subunit
  misc_feature (1)..(179): NCBI GI NO: 37362284 NR Description: succinate dehydrogenase complex
  misc_feature (1)..(179): NCBI GI NO: 28374211 NR Description: Similar to succinate dehydrogenase complex
  misc_feature (1)..(179): NCBI GI NO: 21242816 NR Description: succinate dehydrogenase flavoprotein subunit
  misc_feature (1)..(179): NCBI GI NO: 22996847 NR Description: hypothetical protein [Xylella fastidiosa Ann-1]
  misc_feature (1)..(179): NCBI GI NO: 15837674 NR Description: succinate dehydrogenase, flavoprotein subunit
  misc_feature (1)..(179): NCBI GI NO: 28198269 NR Description: succinate dehydrogenase flavoprotein subunit
  misc_feature (24)..(24): Xaa is any aa, unknown or other
  misc_feature (26)..(26): Xaa is any aa, unknown or other
  misc_feature (172)..(172): Xaa is any aa, unknown or other

SEQ ID NO: 39273 - protein, 153 aa, Zea mays subsp. mays; identical to SEQ ID NO: 30425
  peptide (1)..(153): Ceres Seq. ID no. 15222584
  misc_feature (1)..(58): Pfam Name: Pfam Description:  FAD binding domain
  misc_feature (1)..(152): NCBI GI NO: 34394418 NR Description: putative succinate dehydrogenase flavoprotein alpha subunit
  misc_feature (1)..(152): NCBI GI NO: 15240075 NR Description: succinate dehydrogenase
  misc_feature (1)..(152): NCBI GI NO: 15224174 NR Description: succinate dehydrogenase
  misc_feature (1)..(152): NCBI GI NO: 21231574 NR Description: succinate dehydrogenase flavoprotein subunit
  misc_feature (1)..(152): NCBI GI NO: 37362284 NR Description: succinate dehydrogenase complex
  misc_feature (1)..(152): NCBI GI NO: 28374211 NR Description: Similar to succinate dehydrogenase complex
  misc_feature (1)..(152): NCBI GI NO: 21242816 NR Description: succinate dehydrogenase flavoprotein subunit
  misc_feature (1)..(152): NCBI GI NO: 22996847 NR Description: hypothetical protein [Xylella fastidiosa Ann-1]
  misc_feature (1)..(152): NCBI GI NO: 15837674 NR Description: succinate dehydrogenase, flavoprotein subunit
  misc_feature (1)..(152): NCBI GI NO: 28198269 NR Description: succinate dehydrogenase flavoprotein subunit
  misc_feature (145)..(145): Xaa is any aa, unknown or other

SEQ ID NO: 39274 - protein, 135 aa, Zea mays subsp. mays; identical to SEQ ID NO: 30426
  peptide (1)..(135): Ceres Seq. ID no. 15222585

SEQ ID NO: 39275 - DNA, 1091 bp, Zea mays subsp. mays
  misc_feature (1)..(1091): Ceres Seq. ID no. 12350723
acaagtcacaacgccctagagtagaggctgagctgcatatatcaccgagcaccctctctctctctgttcccctccctcgctcgacatggaggtcgccgccgccacttgtacgctccttgctgccgtcgccctaccagtttcgtcctcagcagcagcagcacgctctgcgacgaaacagagctactcgaggaggaagacgacggccgtgcgagccgtcatggcgaggccgcatcaggtgccgccgcctgccactgccaccgccaccgccaccacgtaccgcgacaactggttcgacaagctggccatcgggtacctgtcccggaaccttcaagaagcttctgggatgaagaacggaaaggacggctacgagggcctgatagaggcggccctggccatctccgcgctgttcagggttgaccagcagtgggacactgtggccagcgctctccaacgggccttccccagctacatcctcaccatgatcaaggtgatgatgccaccctctcgattctcgcgggagtatttcgccgccttcaccacggtgttcttcccttggctcgtcggaccatgtgaggtcagggaatcccaagtggatggaagggaagagaggaacgtggtctacatacccaaatgcagatttctggaaagcaccaactgtgtcggaatgtgcacgaacctctgcaaaatcccatgccagaggttcatccaggattcacttggcacggctgtctacatgtctcccaattttgaggacatgagctgcgagatgatctttggacagcaaccacctgaagatgatccagcactgaagcagccctgcttccggacaaaatgcatcgcaaagcagaatcatcaagtgaattgctctatttgatttgagaggaagtggatatgtaaattactatactactatcagtggaaattcccaaaattacatgctttcatgtttattcccttagtaagcagcatcagtttcatagattctttttacttgaaaacatagcagaaggcaattctagtatacgtcaaattgttaggaaactggttgctgatcaagaggattgaagaggaaacacaagatatgcctttgt

SEQ ID NO: 39276 - protein, 262 aa, Zea mays subsp. mays
  peptide (1)..(262): Ceres Seq. ID no. 12350724
  misc_feature (56)..(258): NCBI GI NO: 18379048 NR Description: Expressed protein; protein id: At1g03055
  misc_feature (21)..(250): NCBI GI NO: 18408106 NR Description: expressed protein; protein id: At1g64680
  misc_feature (10)..(252): NCBI GI NO: 22328234 NR Description: unknown protein; protein id: At4g01995
  misc_feature (67)..(247): NCBI GI NO: 22299485 NR Description: ORF_ID:tll1942~hypothetical protein
MEVAAATCTLLAAVALPVSSSAAAARSATKQSYSRRKTTAVRAVMARPHQVPPPATATATATTYRDNWFDKLAIGYLSRNLQEASGMKNGKDGYEGLIEAALAISALFRVDQQWDTVASALQRAFPSYILTMIKVMMPPSRFSREYFAAFTTVFFPWLVGPCEVRESQVDGREERNVVYIPKCRFLESTNCVGMCTNLCKIPCQRFIQDSLGTAVYMSPNFEDMSCEMIFGQQPPEDDPALKQPCFRTKCIAKQNHQVNCSI

SEQ ID NO: 39277 - protein, 218 aa, Zea mays subsp. mays
  peptide (1)..(218): Ceres Seq. ID no. 12350725
  misc_feature (12)..(214): NCBI GI NO: 18379048 NR Description: Expressed protein; protein id: At1g03055
  misc_feature (1)..(206): NCBI GI NO: 18408106 NR Description: expressed protein; protein id: At1g64680
  misc_feature (1)..(208): NCBI GI NO: 22328234 NR Description: unknown protein; protein id: At4g01995
  misc_feature (23)..(203): NCBI GI NO: 22299485 NR Description: ORF_ID:tll1942~hypothetical protein
MARPHQVPPPATATATATTYRDNWFDKLAIGYLSRNLQEASGMKNGKDGYEGLIEAALAISALFRVDQQWDTVASALQRAFPSYILTMIKVMMPPSRFSREYFAAFTTVFFPWLVGPCEVRESQVDGREERNVVYIPKCRFLESTNCVGMCTNLCKIPCQRFIQDSLGTAVYMSPNFEDMSCEMIFGQQPPEDDPALKQPCFRTKCIAKQNHQVNCSI

SEQ ID NO: 39278 - protein, 176 aa, Zea mays subsp. mays
  peptide (1)..(176): Ceres Seq. ID no. 12350726
  misc_feature (1)..(172): NCBI GI NO: 18379048 NR Description: Expressed protein; protein id: At1g03055
  misc_feature (1)..(164): NCBI GI NO: 18408106 NR Description: expressed protein; protein id: At1g64680
  misc_feature (1)..(166): NCBI GI NO: 22328234 NR Description: unknown protein; protein id: At4g01995
  misc_feature (1)..(161): NCBI GI NO: 22299485 NR Description: ORF_ID:tll1942~hypothetical protein
MKNGKDGYEGLIEAALAISALFRVDQQWDTVASALQRAFPSYILTMIKVMMPPSRFSREYFAAFTTVFFPWLVGPCEVRESQVDGREERNVVYIPKCRFLESTNCVGMCTNLCKIPCQRFIQDSLGTAVYMSPNFEDMSCEMIFGQQPPEDDPALKQPCFRTKCIAKQNHQVNCSI

SEQ ID NO: 39279 - DNA, 1724 bp, Zea mays subsp. mays
  misc_feature (1)..(1724): Ceres Seq. ID no. 12359928
acgcgtttgcttcttcaagcattgaccccttccgccccgtccgtcatcttccccacctctctccgcactgcaggagcttgcgggcgtggcggcggccgtgaccggcgctggagatcttggacgcgcgcgacatcctggtctccgctctgtgcctctggtctccgaaggcgccgccaccctatttttttttaaaaaaaatcctaagatagtttcttcagtccgacaccgcttctagcttcccctcggcgatctgtgaagctatgaagccacctctcgagaggaacccgactaagaagcgccactcgtggtggtgggacagtcacattagccctaagaactcgaaatggctcgccgaaaatctcgaagaaatggacaagcaagtgaaggaaatgctccagctgatcgaggaggacggcgactccttcgctaagaaagcgcaaatgtattaccagaggcgtccgatgctcgtcacccacgtcgagaacttctaccgtatgtatcgtgctctagccgagcgctatgacaatgtaaccggcgagctgcgcaagaacatccctacaaggctgcagacaaccggatttttaaccagttcagagtacggttctgagctgcagaggtcgccctcaccgtctcctgagccgttacagaggtcgtggacaagggagcagagccctagggccgctggcttcgacttcttcctgagcaataggagcaatgactcgccacctgtctacaggaaggaacccgaggacgcggcatcgcagtcggagtctgacgcgaagtctgcagacggtgaggatgatggcatcgcctacacgctgcaccagagagttcttgagctagaggacgagctcaatgcgacaaaccagaaactacaagatgcaaacgagaagcttgaggttctggaggagaagagcttgaggtgccattgtgattataaagagaatggaaacggtgctcagcgaactacagaagtttcaggcaaagagggggagctggaagccgaaatcgtcaatctccaggaggaagcggactcggcaagaaggcgattcgaagaggcattgtctgaacgagatggagaaatcagcaagctaaagcaagagcttgctggtgcttctgagaagctgcagcgagagaagtacgccaatggcgtgcaggtatctgagctgcagcgatcggttgaacacatcaggtccgaactagagagagtttctgaagagaaactactgtccgagaacaagatcaaggagctggaggcagcaaacgctgaagccggtaagtacggccacgagctcacgcgagctgccgagaagatttccgaggagaagttcgcgctcgaagctgagatcctcacgatgcggcagaacattgaagatctgaaatccaggatcgagagcctcgctcgagagaagtccctgctcaaatcatggtttgaggacttggagcaagttgtggggcgaggaaggggcatcttcgccgattaaccgagtttctatccagaacatcatcggtagctagaatttagcaagttagcaacattttgttttgttttctggtactggtacccataccatcttgcgaaattgagatacgtcagtgtacttcctttttgttggctgaatcttaaacttagacgtgatggatggtggtgatgtactggcaatatatgaaatattatactgaaccgcgctcgacgtcaataataagattcctatggtgcatcc

SEQ ID NO: 39280 - protein, 407 aa, Zea mays subsp. mays
  peptide (1)..(407): Ceres Seq. ID no. 12359929
  misc_feature (195)..(395): Pfam Name: Pfam Description:  Tropomyosin
  misc_feature (1)..(385): NCBI GI NO: 34896152 NR Description: P0701D05.31
  misc_feature (5)..(398): NCBI GI NO: 34896156 NR Description: P0701D05.33
  misc_feature (11)..(398): NCBI GI NO: 22002966 NR Description: putative CENP-E like kinetochore protein
  misc_feature (199)..(407): NCBI GI NO: 34896152 NR Description: P0701D05.31
  misc_feature (1)..(384): NCBI GI NO: 8777333 NR Description: contains similarity to unknownprotein~gb|AAB63087
  misc_feature (2)..(384): NCBI GI NO: 30697043 NR Description: contains similarity to unknown protein(gb|AAB63087
  misc_feature (2)..(384): NCBI GI NO: 30697046 NR Description: contains similarity to unknown protein(gb|AAB63087
  misc_feature (2)..(385): NCBI GI NO: 15224515 NR Description: unknown protein; protein id: At2g30500.1
  misc_feature (2)..(385): NCBI GI NO: 28416683 NR Description: At2g30500 [Arabidopsis thaliana]
  misc_feature (8)..(387): NCBI GI NO: 15218702 NR Description: unknown protein; protein id: At1g03080.1
MKPPLERNPTKKRHSWWWDSHISPKNSKWLAENLEEMDKQVKEMLQLIEEDGDSFAKKAQMYYQRRPMLVTHVENFYRMYRALAERYDNVTGELRKNIPTRLQTTGFLTSSEYGSELQRSPSPSPEPLQRSWTREQSPRAAGFDFFLSNRSNDSPPVYRKEPEDAASQSESDAKSADGEDDGIAYTLHQRVLELEDELNATNQKLQDANEKLEVLEEKSLRCHCDYKENGNGAQRTTEVSGKEGELEAEIVNLQEEADSARRRFEEALSERDGEISKLKQELAGASEKLQREKYANGVQVSELQRSVEHIRSELERVSEEKLLSENKIKELEAANAEAGKYGHELTRAAEKISEEKFALEAEILTMRQNIEDLKSRIESLAREKSLLKSWFEDLEQVVGRGRGIFAD

SEQ ID NO: 39281 - protein, 371 aa, Zea mays subsp. mays
  peptide (1)..(371): Ceres Seq. ID no. 12359930
  misc_feature (159)..(359): Pfam Name: Pfam Description:  Tropomyosin
  misc_feature (1)..(349): NCBI GI NO: 34896152 NR Description: P0701D05.31
  misc_feature (1)..(362): NCBI GI NO: 34896156 NR Description: P0701D05.33
  misc_feature (1)..(362): NCBI GI NO: 22002966 NR Description: putative CENP-E like kinetochore protein
  misc_feature (163)..(371): NCBI GI NO: 34896152 NR Description: P0701D05.31
  misc_feature (1)..(348): NCBI GI NO: 8777333 NR Description: contains similarity to unknownprotein~gb|AAB63087
  misc_feature (1)..(348): NCBI GI NO: 30697043 NR Description: contains similarity to unknown protein(gb|AAB63087
  misc_feature (1)..(348): NCBI GI NO: 30697046 NR Description: contains similarity to unknown protein(gb|AAB63087
  misc_feature (1)..(349): NCBI GI NO: 15224515 NR Description: unknown protein; protein id: At2g30500.1
  misc_feature (1)..(349): NCBI GI NO: 28416683 NR Description: At2g30500 [Arabidopsis thaliana]
  misc_feature (1)..(351): NCBI GI NO: 15218702 NR Description: unknown protein; protein id: At1g03080.1
MDKQVKEMLQLIEEDGDSFAKKAQMYYQRRPMLVTHVENFYRMYRALAERYDNVTGELRKNIPTRLQTTGFLTSSEYGSELQRSPSPSPEPLQRSWTREQSPRAAGFDFFLSNRSNDSPPVYRKEPEDAASQSESDAKSADGEDDGIAYTLHQRVLELEDELNATNQKLQDANEKLEVLEEKSLRCHCDYKENGNGAQRTTEVSGKEGELEAEIVNLQEEADSARRRFEEALSERDGEISKLKQELAGASEKLQREKYANGVQVSELQRSVEHIRSELERVSEEKLLSENKIKELEAANAEAGKYGHELTRAAEKISEEKFALEAEILTMRQNIEDLKSRIESLAREKSLLKSWFEDLEQVVGRGRGIFAD

SEQ ID NO: 39282 - protein, 364 aa, Zea mays subsp. mays
  peptide (1)..(364): Ceres Seq. ID no. 12359931
  misc_feature (152)..(352): Pfam Name: Pfam Description:  Tropomyosin
  misc_feature (1)..(342): NCBI GI NO: 34896152 NR Description: P0701D05.31
  misc_feature (1)..(355): NCBI GI NO: 34896156 NR Description: P0701D05.33
  misc_feature (1)..(355): NCBI GI NO: 22002966 NR Description: putative CENP-E like kinetochore protein
  misc_feature (156)..(364): NCBI GI NO: 34896152 NR Description: P0701D05.31
  misc_feature (1)..(341): NCBI GI NO: 8777333 NR Description: contains similarity to unknownprotein~gb|AAB63087
  misc_feature (1)..(341): NCBI GI NO: 30697043 NR Description: contains similarity to unknown protein(gb|AAB63087
  misc_feature (1)..(341): NCBI GI NO: 30697046 NR Description: contains similarity to unknown protein(gb|AAB63087
  misc_feature (1)..(342): NCBI GI NO: 15224515 NR Description: unknown protein; protein id: At2g30500.1
  misc_feature (1)..(342): NCBI GI NO: 28416683 NR Description: At2g30500 [Arabidopsis thaliana]
  misc_feature (1)..(344): NCBI GI NO: 15218702 NR Description: unknown protein; protein id: At1g03080.1
MLQLIEEDGDSFAKKAQMYYQRRPMLVTHVENFYRMYRALAERYDNVTGELRKNIPTRLQTTGFLTSSEYGSELQRSPSPSPEPLQRSWTREQSPRAAGFDFFLSNRSNDSPPVYRKEPEDAASQSESDAKSADGEDDGIAYTLHQRVLELEDELNATNQKLQDANEKLEVLEEKSLRCHCDYKENGNGAQRTTEVSGKEGELEAEIVNLQEEADSARRRFEEALSERDGEISKLKQELAGASEKLQREKYANGVQVSELQRSVEHIRSELERVSEEKLLSENKIKELEAANAEAGKYGHELTRAAEKISEEKFALEAEILTMRQNIEDLKSRIESLAREKSLLKSWFEDLEQVVGRGRGIFAD

SEQ ID NO: 39283 - DNA, 2165 bp, Zea mays subsp. mays
  misc_feature (1)..(2165): Ceres Seq. ID no. 12435375
gcacgagaccattacctagaacatcctaatcgaaaaatcccagcacgtctcgtctcccggccctcccacaaaaaaaaactgctcggttgctgctcctgctccgccgcgccggcatcatgtgtggcatcttagccgtgctcggttgctccgactggtctcaggcaaagagggctcgcatcctcgcctgctccagaaggttgaagcacaggggccccgactggtcgggcctttaccagcacgagggcaacttcctggcgcagcagcggctcgccgtcgtctccccgctgtccggcgaccagccgctgttcaacgaggaccgcaccgtcgtggtggtggccaatggagagatctacaaccacaagaacgtccggaagcagttcaccggcacacacaacttcagcacgggcagtgactgcgaggtcatcatgcccctgtacgagaagtacggcgagaacttcgtggacatgctggacggggtgttcgcgttcgtgctctacgacacccgcgacaggacctacgtggcggcgcgcgacgccatcggcgtcaacccgctctacatcggctggggcagtgacggttccgtctggatcgcgtccgagatgaaggcgctgaacgaggactgcgtgcgcttcgagatcttccccgccgggccacctctactccagcgccggcggcgggttccggcggtggtacaccccgcactggttccaggagcaggtgccccggacgccgtaccagccgctcgtcctcagagaggccttcgagaaggcggtcatcaagaggctcatgactgacgtcccgttcggggtcctcctctccggcagcctcgactcctcgctagtcgcctccgtcaccaagcgccacctcgtcgagaccgaggccgccgagaagttcggcaccgagctccactcctttgtcgtcggcctcgagggctcccctgacctgaaggccgcacgagaggtcgctgactacctcggaaccatccatcacgagttccacttcaccgtacaggacggcatcgacgcgatcgaggaggtgatctaccacgacgagacgtacgacgtgacgacgatccgggccagcacgcccatgttcctgatggctcgcaagatcaagtcgctgggcgtgaagatggtgctgtccggggagggctccgacgagctcctgggcggctacctctacttccacttcgcccccaacaaggaggagttccacagggagacctgccgcaaggtgaaagccctgcaccagtacgactgcctgcgcgccaacaaggccacgtcggcgtggggcctggaggtccgcgtgccgttcctcgacaaggagttcatcaacgtcgccatgggcatggaccccgaatggaaaatgtacgacaagaacctgggccgcatcgagaagtgggtcatgaggaaggcgttcgacgacgacgagcacccttacctgcccaagcatattctctaccggcagaaagaacagttcagtgacggcgttggctacaactggatcgatggccttaaatccttcactgaacagcaggtgacggatgagatgatgaacaacgccgcccagatgttcccctacaacacgcccgtcaacaaggaggcctactactaccggatgatattcgagaggctcttccctcaggactcggcgagggagacggtgccgtggggcccgagcatcgcctgcagcacgcccgcggccatcgagtgggtggagcagtggaaggcctccaacgacccctccggccgcttcatctcctcccacgactccgccgccaccgaccacaccggcggtaagccggcggtggccaacggcggcggccacggcgcggcgaacggcacggtcaacggcaaggacgtcgcagtcgcgatcgcggtctgacgagagtacgtgctcgcgcacctccctgcttctaccgggctgcatcctgcagcatgcactgtgcgagcacagccgatcagcgccaataaactggaggataagaacgactggtagctgtgtgtgtgtgtgtcgtgcgtgcccaccggccatatcccggtgccgcagcacgtgctattgttacgtgttgtactgccaccagcgtacgtgtctgtgtgtctcgatcatatctgtacgtttttagatttagaaggggaaaaaaagtatgtccgtgtctgtatgtc

SEQ ID NO: 39284 - protein, 365 aa, Zea mays subsp. mays
  peptide (1)..(365): Ceres Seq. ID no. 12435376
  misc_feature (1)..(294): Pfam Name: Pfam Description:  Asparagine synthase
  misc_feature (1)..(365): NCBI GI NO: 1351989 NR Description: Asparagine synthetase
  misc_feature (1)..(336): NCBI GI NO: 6049841 NR Description: asparagine synthetase [Helianthus annuus]
  misc_feature (1)..(364): NCBI GI NO: 399064 NR Description: Asparagine synthase [glutamine-hydrolyzing] (AS)
  misc_feature (1)..(364): NCBI GI NO: 1617002 NR Description: asparagine synthetase [Asparagus officinalis]
  misc_feature (1)..(330): NCBI GI NO: 3821280 NR Description: asparagine synthetase type II [Phaseolus vulgaris]
  misc_feature (1)..(330): NCBI GI NO: 13925886 NR Description: glutamine-dependent asparagine synthetase 1
  misc_feature (1)..(330): NCBI GI NO: 7438075 NR Description: asparagine synthase (glutamine-hydrolysing) (EC6
  misc_feature (1)..(341): NCBI GI NO: 11136554 NR Description: asparagine synthetase [Raphanus sativus]
  misc_feature (1)..(330): NCBI GI NO: 8099159 NR Description: asparagine synthetase [Astragalus sinicus]
  misc_feature (1)..(330): NCBI GI NO: 7438078 NR Description: asparagine synthase (glutamine-hydrolysing) (EC6
MTDVPFGVLLSGSLDSSLVASVTKRHLVETEAAEKFGTELHSFVVGLEGSPDLKAAREVADYLGTIHHEFHFTVQDGIDAIEEVIYHDETYDVTTIRASTPMFLMARKIKSLGVKMVLSGEGSDELLGGYLYFHFAPNKEEFHRETCRKVKALHQYDCLRANKATSAWGLEVRVPFLDKEFINVAMGMDPEWKMYDKNLGRIEKWVMRKAFDDDEHPYLPKHILYRQKEQFSDGVGYNWIDGLKSFTEQQVTDEMMNNAAQMFPYNTPVNKEAYYYRMIFERLFPQDSARETVPWGPSIACSTPAAIEWVEQWKASNDPSGRFISSHDSAATDHTGGKPAVANGGGHGAANGTVNGKDVAVAIAV

SEQ ID NO: 39285 - protein, 264 aa, Zea mays subsp. mays
  peptide (1)..(264): Ceres Seq. ID no. 12435377
  misc_feature (1)..(193): Pfam Name: Pfam Description:  Asparagine synthase
  misc_feature (1)..(264): NCBI GI NO: 1351989 NR Description: Asparagine synthetase
  misc_feature (1)..(235): NCBI GI NO: 6049841 NR Description: asparagine synthetase [Helianthus annuus]
  misc_feature (1)..(263): NCBI GI NO: 399064 NR Description: Asparagine synthase [glutamine-hydrolyzing] (AS)
  misc_feature (1)..(263): NCBI GI NO: 1617002 NR Description: asparagine synthetase [Asparagus officinalis]
  misc_feature (1)..(229): NCBI GI NO: 3821280 NR Description: asparagine synthetase type II [Phaseolus vulgaris]
  misc_feature (1)..(229): NCBI GI NO: 13925886 NR Description: glutamine-dependent asparagine synthetase 1
  misc_feature (1)..(229): NCBI GI NO: 7438075 NR Description: asparagine synthase (glutamine-hydrolysing) (EC6
  misc_feature (1)..(240): NCBI GI NO: 11136554 NR Description: asparagine synthetase [Raphanus sativus]
  misc_feature (1)..(229): NCBI GI NO: 8099159 NR Description: asparagine synthetase [Astragalus sinicus]
  misc_feature (1)..(229): NCBI GI NO: 7438078 NR Description: asparagine synthase (glutamine-hydrolysing) (EC6
MFLMARKIKSLGVKMVLSGEGSDELLGGYLYFHFAPNKEEFHRETCRKVKALHQYDCLRANKATSAWGLEVRVPFLDKEFINVAMGMDPEWKMYDKNLGRIEKWVMRKAFDDDEHPYLPKHILYRQKEQFSDGVGYNWIDGLKSFTEQQVTDEMMNNAAQMFPYNTPVNKEAYYYRMIFERLFPQDSARETVPWGPSIACSTPAAIEWVEQWKASNDPSGRFISSHDSAATDHTGGKPAVANGGGHGAANGTVNGKDVAVAIAV

SEQ ID NO: 39286 - protein, 261 aa, Zea mays subsp. mays
  peptide (1)..(261): Ceres Seq. ID no. 12435378
  misc_feature (1)..(190): Pfam Name: Pfam Description:  Asparagine synthase
  misc_feature (1)..(261): NCBI GI NO: 1351989 NR Description: Asparagine synthetase
  misc_feature (1)..(232): NCBI GI NO: 6049841 NR Description: asparagine synthetase [Helianthus annuus]
  misc_feature (1)..(260): NCBI GI NO: 399064 NR Description: Asparagine synthase [glutamine-hydrolyzing] (AS)
  misc_feature (1)..(260): NCBI GI NO: 1617002 NR Description: asparagine synthetase [Asparagus officinalis]
  misc_feature (1)..(226): NCBI GI NO: 3821280 NR Description: asparagine synthetase type II [Phaseolus vulgaris]
  misc_feature (1)..(226): NCBI GI NO: 13925886 NR Description: glutamine-dependent asparagine synthetase 1
  misc_feature (1)..(226): NCBI GI NO: 7438075 NR Description: asparagine synthase (glutamine-hydrolysing) (EC6
  misc_feature (1)..(237): NCBI GI NO: 11136554 NR Description: asparagine synthetase [Raphanus sativus]
  misc_feature (1)..(226): NCBI GI NO: 8099159 NR Description: asparagine synthetase [Astragalus sinicus]
  misc_feature (1)..(226): NCBI GI NO: 7438078 NR Description: asparagine synthase (glutamine-hydrolysing) (EC6
MARKIKSLGVKMVLSGEGSDELLGGYLYFHFAPNKEEFHRETCRKVKALHQYDCLRANKATSAWGLEVRVPFLDKEFINVAMGMDPEWKMYDKNLGRIEKWVMRKAFDDDEHPYLPKHILYRQKEQFSDGVGYNWIDGLKSFTEQQVTDEMMNNAAQMFPYNTPVNKEAYYYRMIFERLFPQDSARETVPWGPSIACSTPAAIEWVEQWKASNDPSGRFISSHDSAATDHTGGKPAVANGGGHGAANGTVNGKDVAVAIAV

SEQ ID NO: 39287 - DNA, 898 bp, Zea mays subsp. mays
  misc_feature (1)..(898): Ceres Seq. ID no. 12377943
gcacgagaccattacctagaacatcctaatcgaaaactacaaggaaaatgaggattggggctgcagctagcaagaagaatacagatgctcagcagacatatgcaactaatggtgcataccagagttctcaaggcaattgttcagagaatgatcccaacaatacaacagtctttgtgggtgggttagattccaatgtagacgaggagtatctaagggaaatttttactccgtacggagaaatttcctatgtgaagattcctgtaggcaagcattgtggatttgttcaatttaccagcaggtcatgtgctgaggaagccatccaaatgctgaatgggagtcagattggtggacagaaagctcggctttcatggggccgtagtactcaaaacagacaggcttctcagcatgatgccaacagccagtataatgggaacaactattatcgataccaacagccgggtaatgaaggttatagctatggtgcacccaatgcacaagacccaagcattcaaaactactatggataccctggttatggtaactatgagcagcagtcaacacaggaacagcagcagcagcagcctccaccagcacaggagcagcctccaccggcaccacagtaacaatcatcgtggtgacgattgcttgggcacttctggaatgctatcagattagagggactacagtcagagcagtgccgtgccgaatgagacgtcctgaagatatggagggcatatagtctcatgggtgttcttgggccggtgttaatctacgatgacactcctgatgtctcttttgtttgtcattgagatcttgacggctgaagtatgcaccgttgaaattgatgtattcgtcgtcgtcggattgtttatttgctcggaaccattttttgcacttt

SEQ ID NO: 39288 - protein, 191 aa, Zea mays subsp. mays
  peptide (1)..(191): Ceres Seq. ID no. 12377944
  misc_feature (41)..(106): Pfam Name: a.k.a. RRM, RBD, or RNP domain Pfam Description: RNA recognition motif.
  misc_feature (1)..(187): NCBI GI NO: 34395214 NR Description: putative RNA Binding Protein
  misc_feature (1)..(187): NCBI GI NO: 34901884 NR Description: putative RNA Binding Protein 45
  misc_feature (1)..(177): NCBI GI NO: 34896988 NR Description: putative RNA binding protein [Oryza sativa]
  misc_feature (1)..(177): NCBI GI NO: 30524689 NR Description: salt tolerance protein 6 [Beta vulgaris]
  misc_feature (1)..(178): NCBI GI NO: 40253807 NR Description: putative RNA Binding Protein 45
  misc_feature (1)..(168): NCBI GI NO: 9663767 NR Description: RNA Binding Protein 45 [Nicotiana plumbaginifolia]
  misc_feature (1)..(180): NCBI GI NO: 39545835 NR Description: OSJNBb0060E08.6
  misc_feature (1)..(177): NCBI GI NO: 7485342 NR Description: hypothetical protein F10M23
  misc_feature (1)..(177): NCBI GI NO: 18416906 NR Description: RNA binding protein 45
  misc_feature (1)..(185): NCBI GI NO: 15221071 NR Description: RNA binding protein 45
MRIGAAASKKNTDAQQTYATNGAYQSSQGNCSENDPNNTTVFVGGLDSNVDEEYLREIFTPYGEISYVKIPVGKHCGFVQFTSRSCAEEAIQMLNGSQIGGQKARLSWGRSTQNRQASQHDANSQYNGNNYYRYQQPGNEGYSYGAPNAQDPSIQNYYGYPGYGNYEQQSTQEQQQQQPPPAQEQPPPAPQ

SEQ ID NO: 39289 - protein, 114 aa, Zea mays subsp. mays
  peptide (1)..(114): Ceres Seq. ID no. 12377945
MGVRLVDRKLGFHGAVVLKTDRLLSMMPTASIMGTTIIDTNSRVMKVIAMVHPMHKTQAFKTTMDTLVMVTMSSSQHRNSSSSSLHQHRSSLHRHHSNNHRGDDCLGTSGMLSD

SEQ ID NO: 39290 - protein, 99 aa, Zea mays subsp. mays
  peptide (1)..(99): Ceres Seq. ID no. 12377946
  misc_feature (1)..(95): NCBI GI NO: 34395214 NR Description: putative RNA Binding Protein
  misc_feature (1)..(95): NCBI GI NO: 34901884 NR Description: putative RNA Binding Protein 45
  misc_feature (1)..(85): NCBI GI NO: 34896988 NR Description: putative RNA binding protein [Oryza sativa]
  misc_feature (1)..(85): NCBI GI NO: 30524689 NR Description: salt tolerance protein 6 [Beta vulgaris]
  misc_feature (1)..(86): NCBI GI NO: 40253807 NR Description: putative RNA Binding Protein 45
  misc_feature (1)..(76): NCBI GI NO: 9663767 NR Description: RNA Binding Protein 45 [Nicotiana plumbaginifolia]
  misc_feature (1)..(88): NCBI GI NO: 39545835 NR Description: OSJNBb0060E08.6
  misc_feature (1)..(85): NCBI GI NO: 7485342 NR Description: hypothetical protein F10M23
  misc_feature (1)..(85): NCBI GI NO: 18416906 NR Description: RNA binding protein 45
  misc_feature (1)..(93): NCBI GI NO: 15221071 NR Description: RNA binding protein 45
MLNGSQIGGQKARLSWGRSTQNRQASQHDANSQYNGNNYYRYQQPGNEGYSYGAPNAQDPSIQNYYGYPGYGNYEQQSTQEQQQQQPPPAQEQPPPAPQ

SEQ ID NO: 39291 - DNA, 1484 bp, Zea mays subsp. mays
  misc_feature (1)..(1484): Ceres Seq. ID no. 12578861
gcacgagaccattacctagaacatcctaatcgaaaagacctcgcatccggcccgattcgactagggttttagcactcccagtcccggctcccgccgtcgcctcgacgcttcccccctcttcctccgccgccaacccagcgagagagctcccagtccgcgaagacatggcggggaagaagcgcaagtccggctccgagaagccgacgaagcaccgcctcccgctgggagccgatgccgacgctgtcgccgaagcctcgaagcgccgccgatcgggcgccaccaagcagcaccaggcggacgaggaagcgtccatcccgccctctctcagcgccaagatcctccgcgaggcgcgcaagcagcaggaagaggagatgcgcgccgactccagcgacgaacagcgaccctcagccgtcgaggcgaccgcggggccgtccacgtcgtcctcgtttcccgtccccgccgccgacggcgagaatgagggggacgacgtcgatgagttcgacgggtttgacgcgcctgagcgagtacgatggcggtgaggtggagatcaacgaggaggacgagaaggccctcgctgctttcatgtcaaaggacaaagctgccgagcgcacccttggcgatatcattctccagaagatcagggagaaggacgccgaggtcgcaactggtgaaggacgacctcgtgtaaaattggacaacagcattattgaactttataaagaggttgggaagttcttaagccggtacacgagtggggctggcttctcctccccctcttaccaagtcctcctcgggttagggttccttagggttttgtggaggggcgatggcggcggctgatgtggagtaccgttgcttcgtcggcgggcttgcctgggccaccagcaacgagtcgctggagaatgccttcgcctcctacggcgagatcctcgactccaaggtcatcaccgaccgggagacggggaggtctcgcggcttcggcttcgttaccttctcctccgagaactccatgctcgacgctatcgagaacatgaacggcaaggagctcgacggccgtaacatcaccgttaaccaggcccagtcccgtggcggtggcggtggcggcggtggccgcggcggtcgcggcggcggcggctatggtggcgggcgccgtgacggcggttatggcggcggtggcggctacggcggtcggcgcgagggtggtggcggcggctacggaggcggtggcggctacggcggtcggcgcgagggtggtggtggcggctacggcggcggcggcggcggctggagggactgatgtgtgggcccatcctggcttcggccgagttatcttatctatctatagtatcgtgttaccgttcgcttctgtcaccgtgttagtgtccgttctacctttggattaggtgttggtacccctgttgttccctttgtttgctcccgctatgaaacgagacgagagaagaatgagcaaggtttttgttcgc

SEQ ID NO: 39292 - protein, 202 aa, Zea mays subsp. mays
  peptide (1)..(202): Ceres Seq. ID no. 12578862
  misc_feature (117)..(175): Pfam Name: Pfam Description:  Bystin
  misc_feature (1)..(80): NCBI GI NO: 31414574 NR Description: large tegument protein
  misc_feature (1)..(90): NCBI GI NO: 31414574 NR Description: large tegument protein
MPTLSPKPRSAADRAPPSSTRRTRKRPSRPLSAPRSSARRASSRKRRCAPTPATNSDPQPSRRPRGRPRRPRFPSPPPTARMRGTTSMSSTGLTRLSEYDGGEVEINEEDEKALAAFMSKDKAAERTLGDIILQKIREKDAEVATGEGRPRVKLDNSIIELYKEVGKFLSRYTSGAGFSSPSYQVLLGLGFLRVLWRGDGGG

SEQ ID NO: 39293 - protein, 156 aa, Zea mays subsp. mays
  peptide (1)..(156): Ceres Seq. ID no. 12578863
  misc_feature (10)..(81): Pfam Name: a.k.a. RRM, RBD, or RNP domain Pfam Description: RNA recognition motif.
  misc_feature (1)..(156): NCBI GI NO: 112994 NR Description: Glycine-rich RNA-binding
  misc_feature (1)..(152): NCBI GI NO: 10799202 NR Description: glycine-rich RNA-binding protein [Sorghum bicolor]
  misc_feature (1)..(152): NCBI GI NO: 544423 NR Description: Glycine-rich RNA-binding protein 2
  misc_feature (4)..(155): NCBI GI NO: 544426 NR Description: Glycine-rich RNA-binding protein
  misc_feature (1)..(156): NCBI GI NO: 2331131 NR Description: glycine-rich protein [Oryza sativa]
  misc_feature (1)..(156): NCBI GI NO: 2331133 NR Description: glycine-rich protein [Oryza sativa]
  misc_feature (1)..(154): NCBI GI NO: 7439985 NR Description: glycine-rich RNA-binding protein - rice
  misc_feature (1)..(155): NCBI GI NO: 18076086 NR Description: glycine-rich RNA-binding protein
  misc_feature (4)..(155): NCBI GI NO: 2119042 NR Description: glycine-rich RNA-binding protein RGP-1a
  misc_feature (1)..(154): NCBI GI NO: 1346180 NR Description: Glycine-rich RNA-binding protein GRP1A
MAAADVEYRCFVGGLAWATSNESLENAFASYGEILDSKVITDRETGRSRGFGFVTFSSENSMLDAIENMNGKELDGRNITVNQAQSRGGGGGGGGRGGRGGGGYGGGRRDGGYGGGGGYGGRREGGGGGYGGGGGYGGRREGGGGGYGGGGGGWRD

SEQ ID NO: 39294 - protein, 124 aa, Zea mays subsp. mays
  peptide (1)..(124): Ceres Seq. ID no. 12578864
  misc_feature (1)..(119): NCBI GI NO: 422617 NR Description: nucleolin - African clawed frog
MAGKKRKSGSEKPTKHRLPLGADADAVAEASKRRRSGATKQHQADEEASIPPSLSAKILREARKQQEEEMRADSSDEQRPSAVEATAGPSTSSSFPVPAADGENEGDDVDEFDGFDAPERVRWR

SEQ ID NO: 39295 - DNA, 1833 bp, Zea mays subsp. mays
  misc_feature (1)..(1833): Ceres Seq. ID no. 12379198
acgacaaatcgacgatcgccgcttctcttggccattgtagagggagagagagagcgcgagcgacctaggtcagtcggtttcggttttgggcgtcagcttcagctatccgcgaccgcgacgatgggtctgcgcgtggccgccaccgcgccagctccggccggcgtgcgcgtgctcggcaggggcgccgcgcgcgtgacgccgcgaccgtgggcggctgtcggcggcaggagacgcttctccgtgcggatgtccgtcgcgaccaccgaggccaccaccaccatcgccgtgggcgcctcggaggaccaggcgctggaggctaggaactccaagacggtggtggcggtcatcctcggcggtggcgccgggaccaggctcttcccgcttaccagacgcagggccaagcccgcggtgccaattggcggcgcgtacaggctcatcgacgtgccgatgagcaactgcataaacagcgggatcaacaaggtctacatcctcacgcagttcaactcgcaatccctcaatcgccacctctccagagcctacgatttcagcaatggcgtggccatcggagacggattcgtcgaggttctagcagcaacccagaggcctggaacggaggggaaaaggtggtttcagggtactgctgatgcagttcggcagttcgactggcttttcgatgatgcaaaatctaaagacattgaagatgtgctgattctttctggtgaccatctctaccgtatggactacatggactttgttcagagtcatcggcaaagaggtgcaggcatcagcatctgttgtttgccaattgatggcagccgggcatctgattttggcctaatgaagatagacgacactggaagggtaatttcattcagtgagaaaccaaaaggagacgaattaaaggcaatgcaagttgacaccacagtgcttggcttatcaaaggaggaagcagaaaacaaaccttatatagcttcaatggggatctatatttttaagaaagacatactcctaaaccttctaagatggcgttttcccactgcaaatgattttggttctgaaataattcctgcttcagcaaaagaaatcgatgtaaaggcttatcttttcaatgattactgggaagatattggaactattaagtccttctttgaggcaaaccttgctcttgctgaacagcctccaaggttcagtttctacgatgctgacaaaccaatgtatacatcacggagaaacctaccaccatctatggtcaacaatagtaagatcactgattcaatcatttcccacggatgtttcttggataactgcaggatagaacatagtgttgttggagttcgttctcggataggctccaatgtgcacctcaaggatactgtaatgcttggcgctgattattatgaaactgccgtggaaagaggagagctgcttgcagaaggaaaagttcctattgggattggagagaatacaacgattcaaaagtgtatcatagacaagaatgcgaggatagggaagaaagtggtaatctccaactctgaaggtgtagatgaagctgatagaacttccgaaggcttctacattcgatctggcatcactgtcgtactgaagaacgcgataattgctgatggattggtcatatgagctgaaaaggtctcacaggacgggtatttgccgcacaaaatatcaataggagttctttgttagttttacaataagatgctgtatagcagtcaacaggttattcttgtctatacaagatacctttgtctacaaatcttgtctcaccatgttgtattcgactcaaacaatgttgcagtcatggacattgtccgttcc

SEQ ID NO: 39296 - protein, 545 aa, Zea mays subsp. mays
  peptide (1)..(545): Ceres Seq. ID no. 12379199
  misc_feature (113)..(392): Pfam Name: Pfam Description:  Nucleotidyl transferase
  misc_feature (41)..(545): NCBI GI NO: 7434885 NR Description: glucose-1-phosphate adenylyltransferase (EC2
  misc_feature (78)..(545): NCBI GI NO: 7434883 NR Description: glucose-1-phosphate adenylyltransferase (EC2
  misc_feature (76)..(545): NCBI GI NO: 15239684 NR Description: Glucose-1-phosphate adenylyltransferase
  misc_feature (76)..(545): NCBI GI NO: 22347636 NR Description: ADP-glucose pyrophosphorylase large subunit
  misc_feature (76)..(545): NCBI GI NO: 4586350 NR Description: glucose-1-phosphate adenylyltransferase
  misc_feature (81)..(545): NCBI GI NO: 13487783 NR Description: ADP-glucose pyrophosphorylase [Cicer arietinum]
  misc_feature (78)..(545): NCBI GI NO: 1707932 NR Description: Glucose-1-phosphate adenylyltransferase large subunit 3
  misc_feature (269)..(491): NCBI GI NO: 13487711 NR Description: ADP-glucose pyrophosphorylase large subunit
  misc_feature (77)..(270): NCBI GI NO: 13487711 NR Description: ADP-glucose pyrophosphorylase large subunit
  misc_feature (492)..(545): NCBI GI NO: 13487711 NR Description: ADP-glucose pyrophosphorylase large subunit
TTNRRSPLLLAIVEGERERERPRSVGFGFGRQLQLSATATMGLRVAATAPAPAGVRVLGRGAARVTPRPWAAVGGRRRFSVRMSVATTEATTTIAVGASEDQALEARNSKTVVAVILGGGAGTRLFPLTRRRAKPAVPIGGAYRLIDVPMSNCINSGINKVYILTQFNSQSLNRHLSRAYDFSNGVAIGDGFVEVLAATQRPGTEGKRWFQGTADAVRQFDWLFDDAKSKDIEDVLILSGDHLYRMDYMDFVQSHRQRGAGISICCLPIDGSRASDFGLMKIDDTGRVISFSEKPKGDELKAMQVDTTVLGLSKEEAENKPYIASMGIYIFKKDILLNLLRWRFPTANDFGSEIIPASAKEIDVKAYLFNDYWEDIGTIKSFFEANLALAEQPPRFSFYDADKPMYTSRRNLPPSMVNNSKITDSIISHGCFLDNCRIEHSVVGVRSRIGSNVHLKDTVMLGADYYETAVERGELLAEGKVPIGIGENTTIQKCIIDKNARIGKKVVISNSEGVDEADRTSEGFYIRSGITVVLKNAIIADGLVI

SEQ ID NO: 39297 - protein, 505 aa, Zea mays subsp. mays
  peptide (1)..(505): Ceres Seq. ID no. 12379200
  misc_feature (73)..(352): Pfam Name: Pfam Description:  Nucleotidyl transferase
  misc_feature (1)..(505): NCBI GI NO: 7434885 NR Description: glucose-1-phosphate adenylyltransferase (EC2
  misc_feature (38)..(505): NCBI GI NO: 7434883 NR Description: glucose-1-phosphate adenylyltransferase (EC2
  misc_feature (36)..(505): NCBI GI NO: 15239684 NR Description: Glucose-1-phosphate adenylyltransferase
  misc_feature (36)..(505): NCBI GI NO: 22347636 NR Description: ADP-glucose pyrophosphorylase large subunit
  misc_feature (36)..(505): NCBI GI NO: 4586350 NR Description: glucose-1-phosphate adenylyltransferase
  misc_feature (41)..(505): NCBI GI NO: 13487783 NR Description: ADP-glucose pyrophosphorylase [Cicer arietinum]
  misc_feature (38)..(505): NCBI GI NO: 1707932 NR Description: Glucose-1-phosphate adenylyltransferase large subunit 3
  misc_feature (229)..(451): NCBI GI NO: 13487711 NR Description: ADP-glucose pyrophosphorylase large subunit
  misc_feature (37)..(230): NCBI GI NO: 13487711 NR Description: ADP-glucose pyrophosphorylase large subunit
  misc_feature (452)..(505): NCBI GI NO: 13487711 NR Description: ADP-glucose pyrophosphorylase large subunit
MGLRVAATAPAPAGVRVLGRGAARVTPRPWAAVGGRRRFSVRMSVATTEATTTIAVGASEDQALEARNSKTVVAVILGGGAGTRLFPLTRRRAKPAVPIGGAYRLIDVPMSNCINSGINKVYILTQFNSQSLNRHLSRAYDFSNGVAIGDGFVEVLAATQRPGTEGKRWFQGTADAVRQFDWLFDDAKSKDIEDVLILSGDHLYRMDYMDFVQSHRQRGAGISICCLPIDGSRASDFGLMKIDDTGRVISFSEKPKGDELKAMQVDTTVLGLSKEEAENKPYIASMGIYIFKKDILLNLLRWRFPTANDFGSEIIPASAKEIDVKAYLFNDYWEDIGTIKSFFEANLALAEQPPRFSFYDADKPMYTSRRNLPPSMVNNSKITDSIISHGCFLDNCRIEHSVVGVRSRIGSNVHLKDTVMLGADYYETAVERGELLAEGKVPIGIGENTTIQKCIIDKNARIGKKVVISNSEGVDEADRTSEGFYIRSGITVVLKNAIIADGLVI

SEQ ID NO: 39298 - protein, 463 aa, Zea mays subsp. mays
  peptide (1)..(463): Ceres Seq. ID no. 12379201
  misc_feature (31)..(310): Pfam Name: Pfam Description:  Nucleotidyl transferase
  misc_feature (1)..(463): NCBI GI NO: 7434885 NR Description: glucose-1-phosphate adenylyltransferase (EC2
  misc_feature (1)..(463): NCBI GI NO: 7434883 NR Description: glucose-1-phosphate adenylyltransferase (EC2
  misc_feature (1)..(463): NCBI GI NO: 15239684 NR Description: Glucose-1-phosphate adenylyltransferase
  misc_feature (1)..(463): NCBI GI NO: 22347636 NR Description: ADP-glucose pyrophosphorylase large subunit
  misc_feature (1)..(463): NCBI GI NO: 4586350 NR Description: glucose-1-phosphate adenylyltransferase
  misc_feature (1)..(463): NCBI GI NO: 13487783 NR Description: ADP-glucose pyrophosphorylase [Cicer arietinum]
  misc_feature (1)..(463): NCBI GI NO: 1707932 NR Description: Glucose-1-phosphate adenylyltransferase large subunit 3
  misc_feature (187)..(409): NCBI GI NO: 13487711 NR Description: ADP-glucose pyrophosphorylase large subunit
  misc_feature (1)..(188): NCBI GI NO: 13487711 NR Description: ADP-glucose pyrophosphorylase large subunit
  misc_feature (410)..(463): NCBI GI NO: 13487711 NR Description: ADP-glucose pyrophosphorylase large subunit
MSVATTEATTTIAVGASEDQALEARNSKTVVAVILGGGAGTRLFPLTRRRAKPAVPIGGAYRLIDVPMSNCINSGINKVYILTQFNSQSLNRHLSRAYDFSNGVAIGDGFVEVLAATQRPGTEGKRWFQGTADAVRQFDWLFDDAKSKDIEDVLILSGDHLYRMDYMDFVQSHRQRGAGISICCLPIDGSRASDFGLMKIDDTGRVISFSEKPKGDELKAMQVDTTVLGLSKEEAENKPYIASMGIYIFKKDILLNLLRWRFPTANDFGSEIIPASAKEIDVKAYLFNDYWEDIGTIKSFFEANLALAEQPPRFSFYDADKPMYTSRRNLPPSMVNNSKITDSIISHGCFLDNCRIEHSVVGVRSRIGSNVHLKDTVMLGADYYETAVERGELLAEGKVPIGIGENTTIQKCIIDKNARIGKKVVISNSEGVDEADRTSEGFYIRSGITVVLKNAIIADGLVI

SEQ ID NO: 39299 - DNA, 1182 bp, Zea mays subsp. mays
  misc_feature (1)..(1182): Ceres Seq. ID no. 13499256
gcacgagaccattacctagaacatcctaatcaaaaaatctctagccagcgtcgtcggctgacctcctaccgtcgtcatggcttctcttcacccgttgatcgctgctgcgctcgtagtcgcggcggcctccacggcagcggcggcggcgagctgggcggcaccgtcgtcgccagcacgccctctgttccgcgagtacatcggcgcggagggcaagaacgtgacgttcgcggacgtgccggtgcacccgggcgtggacttccacttcatcctctccttcgccatcgactacgccgcgaacgccaccaacgcctccgcgccgccggtgcccacggacggccgcttcgccgtgttctgggacgaggcgaacctcaccccggccgccgtggccgccctcaagtgcccctcctcccacgcccgcgtcgcgctcagcctcggcggcgacaccgtgttcggcgccaacgccacgttccgcgcgtcctccgtcgacgcctgggtcggcaacgccgtggcgtcgctcgcggccatcctcacccgctacggcctcgacggggtggacgtggactacgagcacttcggggagcgcgagacgcccgaggtgttcgccgagtgcgtcggccgcctcgtgcgcgcgctccgggcccgcggcgtcatctccttcgcctccatcgcgcccttcgccaacccggacgtgcaggcgcactacgccgagctctggcgacgctacggccgcgacttcgactacgtcaacttccagttctacgcgtacccgtccaacaccacggtgccggagttcctggcccactatgacgagcagagcgcccggtacgccggcgccagcggaggggggaaggtgcttgtcagcttcgggacggaccccgccagcggcggcctgcgccccgggaagggcttcttcagggcgtgccgggagctgcgccgccaagggaggttgcatggaattttttgtctgggccgcggataactccgccgccgacgggtttcgcgacgagcgcctcgcgcagacgttcctcgccggcaacgccccgggtttcccctgacgcatgcatgcgttaagctccccgtgtctccgttccatatttccgttccttgtgtacgtcttgttatgttttgtcgcgtccatatgatttgtaattggtccagttcattgattatttgcgtgcatcc

SEQ ID NO: 39300 - protein, 300 aa, Zea mays subsp. mays
  peptide (1)..(300): Ceres Seq. ID no. 13499257
  misc_feature (53)..(295): Pfam Name: Pfam Description:  Glycosyl hydrolases family 18
  misc_feature (14)..(295): NCBI GI NO: 11262118 NR Description: chitinase (EC 3
  misc_feature (36)..(295): NCBI GI NO: 7434971 NR Description: chitinase (EC 3
  misc_feature (36)..(295): NCBI GI NO: 7434972 NR Description: chitinase (EC 3
  misc_feature (36)..(294): NCBI GI NO: 7434970 NR Description: chitinase (EC 3.2.1.14) a - Gladiolus gandavensis
  misc_feature (36)..(295): NCBI GI NO: 37534356 NR Description: putative class III chitinase
  misc_feature (36)..(295): NCBI GI NO: 37534362 NR Description: putative class III chitinase
  misc_feature (8)..(295): NCBI GI NO: 37534348 NR Description: putative class III chitinase RCB4
  misc_feature (36)..(295): NCBI GI NO: 27462188 NR Description: chitinase [Oryza sativa]
  misc_feature (36)..(225): NCBI GI NO: 730692 NR Description: RuBisCO-associated protein
MASLHPLIAAALVVAAASTAAAAASWAAPSSPARPLFREYIGAEGKNVTFADVPVHPGVDFHFILSFAIDYAANATNASAPPVPTDGRFAVFWDEANLTPAAVAALKCPSSHARVALSLGGDTVFGANATFRASSVDAWVGNAVASLAAILTRYGLDGVDVDYEHFGERETPEVFAECVGRLVRALRARGVISFASIAPFANPDVQAHYAELWRRYGRDFDYVNFQFYAYPSNTTVPEFLAHYDEQSARYAGASGGGKVLVSFGTDPASGGLRPGKGFFRACRELRRQGRLHGIFCLGRG

SEQ ID NO: 39301 - protein, 268 aa, Zea mays subsp. mays
  peptide (1)..(268): Ceres Seq. ID no. 13499258
  misc_feature (63)..(248): Pfam Name: Pfam Description:  HlyD family secretion protein
  misc_feature (33)..(268): NCBI GI NO: 29247944 NR Description: GLP_26_54603_52153 [Giardia lamblia ATCC 50803]
ARDHYLEHPNQKISSQRRRLTSYRRHGFSSPVDRCCARSRGGLHGSGGGELGGTVVASTPSVPRVHRRGGQERDVRGRAGAPGRGLPLHPLLRHRLRRERHQRLRAAGAHGRPLRRVLGRGEPHPGRRGRPQVPLLPRPRRAQPRRRHRVRRQRHVPRVLRRRLGRQRRGVARGHPHPLRPRRGGRGLRALRGARDARGVRRVRRPPRARAPGPRRHLLRLHRALRQPGRAGALRRALATLRPRLRLRQLPVLRVPVQHHGAGVPGPL

SEQ ID NO: 39302 - DNA, 461 bp, Zea mays subsp. mays
  misc_feature (1)..(461): Ceres Seq. ID no. 13635148
gacttgtgcgccatcacacacaagacacaaccccactcacccggcagggaggccctcttcgtcggcggaggccatggtttccctcaagccgcagaagaggctcgccgcgggagtcctaaaatgtggcaaggggaaggtgtggcttgaccccaacgaggtctacgagatctcgatggctaactcgcgtcagaacattcgtaagctggtgaaggatggattcataattaagaagccacagaaaatccactcaaggtcccgggcaaggagggcccatgaggccaagcagaaggggaggcactctggttacggtaagcgcaggggtaccagggaggctaggctccccaccaagatcctttggatgcgcaggatgcgtgtcctttttttttcaggcgtctgctgcgcaagtatcgtgaagcaaagaaaatcgacaaacacatgtaccacgatatgtatatgaaagt

SEQ ID NO: 39303 - protein, 151 aa, Zea mays subsp. mays
  peptide (1)..(151): Ceres Seq. ID no. 13635149
  misc_feature (26)..(126): Pfam Name: Pfam Description:  Ribosomal protein L19e
  misc_feature (25)..(126): NCBI GI NO: 29837764 NR Description: putative ribosomal protein L19
  misc_feature (25)..(126): NCBI GI NO: 32401377 NR Description: ribosomal protein L19 [Triticum aestivum]
  misc_feature (25)..(126): NCBI GI NO: 40287526 NR Description: 60S ribosomal protein L19 [Capsicum annuum]
  misc_feature (25)..(126): NCBI GI NO: 15228314 NR Description: 60S ribosomal protein L19 (RPL19B)
  misc_feature (25)..(126): NCBI GI NO: 15218602 NR Description: 60S ribosomal protein L19 (RPL19A)
  misc_feature (25)..(126): NCBI GI NO: 18087585 NR Description: At1g02780/T14P4_3 [Arabidopsis thaliana]
  misc_feature (25)..(126): NCBI GI NO: 7440943 NR Description: ribosomal protein L19
  misc_feature (25)..(126): NCBI GI NO: 15235290 NR Description: 60S ribosomal protein L19 (RPL19C)
  misc_feature (25)..(126): NCBI GI NO: 28200276 NR Description: ribosomal protein L19
  misc_feature (25)..(126): NCBI GI NO: 28630352 NR Description: ribosomal protein L19 [Branchiostoma lanceolatum]
TCAPSHTRHNPTHPAGRPSSSAEAMVSLKPQKRLAAGVLKCGKGKVWLDPNEVYEISMANSRQNIRKLVKDGFIIKKPQKIHSRSRARRAHEAKQKGRHSGYGKRRGTREARLPTKILWMRRMRVLFFSGVCCASIVKQRKSTNTCTTICI

SEQ ID NO: 39304 - protein, 127 aa, Zea mays subsp. mays
  peptide (1)..(127): Ceres Seq. ID no. 13635150
  misc_feature (2)..(102): Pfam Name: Pfam Description:  Ribosomal protein L19e
  misc_feature (1)..(102): NCBI GI NO: 29837764 NR Description: putative ribosomal protein L19
  misc_feature (1)..(102): NCBI GI NO: 32401377 NR Description: ribosomal protein L19 [Triticum aestivum]
  misc_feature (1)..(102): NCBI GI NO: 40287526 NR Description: 60S ribosomal protein L19 [Capsicum annuum]
  misc_feature (1)..(102): NCBI GI NO: 15228314 NR Description: 60S ribosomal protein L19 (RPL19B)
  misc_feature (1)..(102): NCBI GI NO: 15218602 NR Description: 60S ribosomal protein L19 (RPL19A)
  misc_feature (1)..(102): NCBI GI NO: 18087585 NR Description: At1g02780/T14P4_3 [Arabidopsis thaliana]
  misc_feature (1)..(102): NCBI GI NO: 7440943 NR Description: ribosomal protein L19
  misc_feature (1)..(102): NCBI GI NO: 15235290 NR Description: 60S ribosomal protein L19 (RPL19C)
  misc_feature (1)..(102): NCBI GI NO: 28200276 NR Description: ribosomal protein L19
  misc_feature (1)..(102): NCBI GI NO: 28630352 NR Description: ribosomal protein L19 [Branchiostoma lanceolatum]
MVSLKPQKRLAAGVLKCGKGKVWLDPNEVYEISMANSRQNIRKLVKDGFIIKKPQKIHSRSRARRAHEAKQKGRHSGYGKRRGTREARLPTKILWMRRMRVLFFSGVCCASIVKQRKSTNTCTTICI

SEQ ID NO: 39305 - protein, 94 aa, Zea mays subsp. mays
  peptide (1)..(94): Ceres Seq. ID no. 13635151
  misc_feature (1)..(69): Pfam Name: Pfam Description:  Ribosomal protein L19e
  misc_feature (1)..(69): NCBI GI NO: 29837764 NR Description: putative ribosomal protein L19
  misc_feature (1)..(69): NCBI GI NO: 32401377 NR Description: ribosomal protein L19 [Triticum aestivum]
  misc_feature (1)..(69): NCBI GI NO: 40287526 NR Description: 60S ribosomal protein L19 [Capsicum annuum]
  misc_feature (1)..(69): NCBI GI NO: 15228314 NR Description: 60S ribosomal protein L19 (RPL19B)
  misc_feature (1)..(69): NCBI GI NO: 15218602 NR Description: 60S ribosomal protein L19 (RPL19A)
  misc_feature (1)..(69): NCBI GI NO: 18087585 NR Description: At1g02780/T14P4_3 [Arabidopsis thaliana]
  misc_feature (1)..(69): NCBI GI NO: 7440943 NR Description: ribosomal protein L19
  misc_feature (1)..(69): NCBI GI NO: 15235290 NR Description: 60S ribosomal protein L19 (RPL19C)
  misc_feature (1)..(69): NCBI GI NO: 28200276 NR Description: ribosomal protein L19
  misc_feature (1)..(69): NCBI GI NO: 28630352 NR Description: ribosomal protein L19 [Branchiostoma lanceolatum]
MANSRQNIRKLVKDGFIIKKPQKIHSRSRARRAHEAKQKGRHSGYGKRRGTREARLPTKILWMRRMRVLFFSGVCCASIVKQRKSTNTCTTICI

SEQ ID NO: 39306 - DNA, 533 bp, Zea mays subsp. mays
  misc_feature (1)..(533): Ceres Seq. ID no. 1674907
aacaggctccccgccgtgagctcttcggccacgcgggcgtcttgcctccctcgtccttcctcaccgcaggaggatggccgcgatagcctcagcttcgcccaggaccctgatccctccgcggccgcgccaccacggcgccgcgccctccccatccacctccgacgtctcctcgctccgactcctccgcgcgcacccgcgccacgtccgacgcagccgcggagtgtccatctcgatgcccgtggcgcggagccggtcgttcgtcttctccccgcgcgcggtggctgactccaagagctcccagacctgcctggaccccgacgccagcacgagtgttcttggaatcattctgggaggtggtgctgggactagattgtaccccttgacaaagaagcgtgccaagcctgcagtgccattgggtgccaactatagactgattgatattcctgtcagcaattgtctcaacagcaacatatccaagatctatgtgctaacgcaatttaactctgcttccctcaaccgtcactctcaagagc

SEQ ID NO: 39307 - protein, 94 aa, Zea mays subsp. mays
  peptide (1)..(94): Ceres Seq. ID no. 1674908
NRLPAVSSSATRASCLPRPSSPQEDGRDSLSFAQDPDPSAAAPPRRRALPIHLRRLLAPTPPRAPAPRPTQPRSVHLDARGAEPVVRLLPARGG

SEQ ID NO: 39308 - protein, 153 aa, Zea mays subsp. mays
  peptide (1)..(153): Ceres Seq. ID no. 1674909
  misc_feature (88)..(150): Pfam Name: Pfam Description:  Nucleotidyl transferase
  misc_feature (1)..(150): NCBI GI NO: 14582768 NR Description: ADP-glucose pyrophosphorylase small subunit
  misc_feature (1)..(150): NCBI GI NO: 1707940 NR Description: Glucose-1-phosphate adenylyltransferase small subunit
  misc_feature (19)..(150): NCBI GI NO: 38423972 NR Description: putative glucose-1-phosphate adenylyltransferase
  misc_feature (1)..(150): NCBI GI NO: 27464770 NR Description: ADP-glucose pyrophosphorylase small subunit
  misc_feature (55)..(150): NCBI GI NO: 13892040 NR Description: ADP-glucose pyrophosphorylase small subunit
  misc_feature (45)..(150): NCBI GI NO: 13508485 NR Description: ADP-glucose pyrophosphorylase small subunit
  misc_feature (5)..(150): NCBI GI NO: 27819107 NR Description: ADP-glucose pyrophosphorylase small subunit
  misc_feature (13)..(150): NCBI GI NO: 1707944 NR Description: Glucose-1-phosphate adenylyltransferase small subunit 2
  misc_feature (27)..(150): NCBI GI NO: 7434881 NR Description: glucose-1-phosphate adenylyltransferase (EC2
  misc_feature (5)..(150): NCBI GI NO: 232164 NR Description: Glucose-1-phosphate adenylyltransferase small subunit
MAAIASASPRTLIPPRPRHHGAAPSPSTSDVSSLRLLRAHPRHVRRSRGVSISMPVARSRSFVFSPRAVADSKSSQTCLDPDASTSVLGIILGGGAGTRLYPLTKKRAKPAVPLGANYRLIDIPVSNCLNSNISKIYVLTQFNSASLNRHSQE

SEQ ID NO: 39309 - protein, 100 aa, Zea mays subsp. mays
  peptide (1)..(100): Ceres Seq. ID no. 1674910
  misc_feature (35)..(97): Pfam Name: Pfam Description:  Nucleotidyl transferase
  misc_feature (1)..(97): NCBI GI NO: 14582768 NR Description: ADP-glucose pyrophosphorylase small subunit
  misc_feature (1)..(97): NCBI GI NO: 1707940 NR Description: Glucose-1-phosphate adenylyltransferase small subunit
  misc_feature (1)..(97): NCBI GI NO: 38423972 NR Description: putative glucose-1-phosphate adenylyltransferase
  misc_feature (1)..(97): NCBI GI NO: 27464770 NR Description: ADP-glucose pyrophosphorylase small subunit
  misc_feature (2)..(97): NCBI GI NO: 13892040 NR Description: ADP-glucose pyrophosphorylase small subunit
  misc_feature (1)..(97): NCBI GI NO: 13508485 NR Description: ADP-glucose pyrophosphorylase small subunit
  misc_feature (1)..(97): NCBI GI NO: 27819107 NR Description: ADP-glucose pyrophosphorylase small subunit
  misc_feature (1)..(97): NCBI GI NO: 1707944 NR Description: Glucose-1-phosphate adenylyltransferase small subunit 2
  misc_feature (1)..(97): NCBI GI NO: 7434881 NR Description: glucose-1-phosphate adenylyltransferase (EC2
  misc_feature (1)..(97): NCBI GI NO: 232164 NR Description: Glucose-1-phosphate adenylyltransferase small subunit
MPVARSRSFVFSPRAVADSKSSQTCLDPDASTSVLGIILGGGAGTRLYPLTKKRAKPAVPLGANYRLIDIPVSNCLNSNISKIYVLTQFNSASLNRHSQE

SEQ ID NO: 39310 - DNA, 2297 bp, Zea mays subsp. mays
  misc_feature (1)..(2297): Ceres Seq. ID no. 12375193
  misc_feature (26)..(26): n is a, c, t, g, unknown, or other
gcacgagaccattacctagaacatcntaatcgaaaaactcgtcacaagctctctttcatcgcatccaccattccacttccaccccacgaggatccagcctgcctgtccctctcgccgcacgccacaaccgtagtcgctcgccggcgtatctagcctagccggggcctgggcctccgcgctcgtgctcccgggaaacaacgaccgacgcgtcctcatagtcatagaggcagctaaggcagccacgcattcgtcactcgctcgaccggcgatggcgagaggtggcacggcgggcgcgggcgcgggcggggaggggagggcggctagcgaggcgctgacggcggactcagccgacgaggaggggcgccgcgggagcagctccagcgccagctccgacgccgcctccagcttctcctgcacgtactccccggccccgcccgacgagtggcacaaggtggccatcatcaagacctgcgtgtctgtgtcggccgacgccgcgggcggcggcggcggcaaggaccagaagccgcgcggcgtcgtcgccgcggccgacaggcacggaggagcatcagagatggagatgatgaaggagcggttctccaagctgctgctcggcgaggacatgtccgggagcggcaagggcgtctgcaccgcgctcgccatctccaacgccgtcaccaacctctgcgcgacggtgttcggccagctctggaggctggagccgctgccgccggagaagaaggccatgtggcggcgcgagttggactgcctgctctgcgtcagcgaccacatcgtggagctggtgcccacgtggcagacattcccggatggtacaaggcttgagatcatgacaagcaggccgcggtctgatctgtacatcaacctgccggcgcttcggaagctagacaacatgctcctcgaaatcctggaaggtttcagggacgtcgagttctggtacgtggaccagggcatctgtgcgccggactgcgacagctccgcgtcctaccggagaacgttccaccgccgcgacgacaagtggtggctgccggtgccgcacgtgccccacggcggtctccgcgaggccacgcggaggcagctggagcaccgtcgcgactgcgccagccagatcctcaaggccgccatggccatcaacagcaacgcactggccgagatggccgtgccggtctcctacctcgactcgctgccaaagaacgggcgcgcggcgctgggcgacgtcatctaccggtacatcacctcggaccagttctcccaggactgcctcctcgactgcctcgacctgtcgtcggaataccaggcgctggagatcgccaaccgcgtcgaggcctccatctacgtgtggcgccggaaggggggcggcggcgccagatcgtcctggggcatcgtgaaggacatggtcatggacacggagaagagggacctgctcgccgagcgcgcggaggcgctgctcatgtccctcaagcagcggttccccgggctcactcagacgagcttggacatgagcaagatccagtacaacaaggacgtgggcaaatcgatcctcgagagctactcgagggtcctggagagcctggcctccaacatcatcgcgcggatcgacgacctgctcaacgtcgacgagctgagcaagcaaccagctgacagcatcccgtccgccggagcggacgcgaaggttgcgtgcaagagcaacggcagcaagcaggccacggcggtgcctgcctcgggcacgccgtacgcgacggcgtacgccacgccgagcttctcgccggcgcagctgtcgagcccgtccaagatcgggagggccctgctggtcgaccgccggtcgcaccacgttgccggagctaagagggcaacggcgtccgcggctgatcgcgctggcgtggaggtggtcaagggaatggtggtcgacggcagcagcgccatattcgatatcatcccgatagctgtcccagcaaagatatgaagagtccgctcgtctgtgcggaccagatacgtcatacgtgttgtgttggcgtgaagtagtgggtttactgtagcatccgagggcgatttctcttgttgccgatggcagccctccgcttgcgactgtaatgcttttggtgcggtgtcgtgtagtatgttacacgtagagttttctgtatctgtcagatgttcgttggatgaaagcaccgccgacactggtcgtcggctgtcgcggagtaagattatgtcaccacactcacgatctcactcctatttcaaactactacactttacaaaaaaaaaaaaaaaaaaaaagaaaa

SEQ ID NO: 39311 - protein, 569 aa, Zea mays subsp. mays
  peptide (1)..(569): Ceres Seq. ID no. 12375194
  misc_feature (100)..(459): Pfam Name: DUF315 Pfam Description: Domain of unknown function
  misc_feature (29)..(553): NCBI GI NO: 34908302 NR Description: P0005H10.23
  misc_feature (100)..(514): NCBI GI NO: 15241663 NR Description: putative protein; protein id: At5g02010.1
  misc_feature (101)..(513): NCBI GI NO: 15239292 NR Description: putative protein; protein id: At5g05940.1
  misc_feature (100)..(542): NCBI GI NO: 15233845 NR Description: putative protein; protein id: At4g38430
  misc_feature (100)..(542): NCBI GI NO: 15810309 NR Description: unknown protein [Arabidopsis thaliana]
  misc_feature (20)..(518): NCBI GI NO: 15228166 NR Description: putative protein; protein id: At3g55660.1
  misc_feature (11)..(460): NCBI GI NO: 37536670 NR Description: hypothetical protein
  misc_feature (25)..(460): NCBI GI NO: 38345761 NR Description: OSJNBa0065O17.14
  misc_feature (101)..(456): NCBI GI NO: 15236138 NR Description: putative protein; protein id: At4g00460.1
  misc_feature (101)..(455): NCBI GI NO: 33146611 NR Description: hypothetical protein
MARGGTAGAGAGGEGRAASEALTADSADEEGRRGSSSSASSDAASSFSCTYSPAPPDEWHKVAIIKTCVSVSADAAGGGGGKDQKPRGVVAAADRHGGASEMEMMKERFSKLLLGEDMSGSGKGVCTALAISNAVTNLCATVFGQLWRLEPLPPEKKAMWRRELDCLLCVSDHIVELVPTWQTFPDGTRLEIMTSRPRSDLYINLPALRKLDNMLLEILEGFRDVEFWYVDQGICAPDCDSSASYRRTFHRRDDKWWLPVPHVPHGGLREATRRQLEHRRDCASQILKAAMAINSNALAEMAVPVSYLDSLPKNGRAALGDVIYRYITSDQFSQDCLLDCLDLSSEYQALEIANRVEASIYVWRRKGGGGARSSWGIVKDMVMDTEKRDLLAERAEALLMSLKQRFPGLTQTSLDMSKIQYNKDVGKSILESYSRVLESLASNIIARIDDLLNVDELSKQPADSIPSAGADAKVACKSNGSKQATAVPASGTPYATAYATPSFSPAQLSSPSKIGRALLVDRRSHHVAGAKRATASAADRAGVEVVKGMVVDGSSAIFDIIPIAVPAKI

SEQ ID NO: 39312 - protein, 468 aa, Zea mays subsp. mays
  peptide (1)..(468): Ceres Seq. ID no. 12375195
  misc_feature (1)..(358): Pfam Name: DUF315 Pfam Description: Domain of unknown function
  misc_feature (1)..(452): NCBI GI NO: 34908302 NR Description: P0005H10.23
  misc_feature (1)..(413): NCBI GI NO: 15241663 NR Description: putative protein; protein id: At5g02010.1
  misc_feature (1)..(412): NCBI GI NO: 15239292 NR Description: putative protein; protein id: At5g05940.1
  misc_feature (1)..(441): NCBI GI NO: 15233845 NR Description: putative protein; protein id: At4g38430
  misc_feature (1)..(441): NCBI GI NO: 15810309 NR Description: unknown protein [Arabidopsis thaliana]
  misc_feature (1)..(417): NCBI GI NO: 15228166 NR Description: putative protein; protein id: At3g55660.1
  misc_feature (1)..(359): NCBI GI NO: 37536670 NR Description: hypothetical protein
  misc_feature (1)..(359): NCBI GI NO: 38345761 NR Description: OSJNBa0065O17.14
  misc_feature (1)..(355): NCBI GI NO: 15236138 NR Description: putative protein; protein id: At4g00460.1
  misc_feature (1)..(354): NCBI GI NO: 33146611 NR Description: hypothetical protein
MEMMKERFSKLLLGEDMSGSGKGVCTALAISNAVTNLCATVFGQLWRLEPLPPEKKAMWRRELDCLLCVSDHIVELVPTWQTFPDGTRLEIMTSRPRSDLYINLPALRKLDNMLLEILEGFRDVEFWYVDQGICAPDCDSSASYRRTFHRRDDKWWLPVPHVPHGGLREATRRQLEHRRDCASQILKAAMAINSNALAEMAVPVSYLDSLPKNGRAALGDVIYRYITSDQFSQDCLLDCLDLSSEYQALEIANRVEASIYVWRRKGGGGARSSWGIVKDMVMDTEKRDLLAERAEALLMSLKQRFPGLTQTSLDMSKIQYNKDVGKSILESYSRVLESLASNIIARIDDLLNVDELSKQPADSIPSAGADAKVACKSNGSKQATAVPASGTPYATAYATPSFSPAQLSSPSKIGRALLVDRRSHHVAGAKRATASAADRAGVEVVKGMVVDGSSAIFDIIPIAVPAKI

SEQ ID NO: 39313 - protein, 466 aa, Zea mays subsp. mays
  peptide (1)..(466): Ceres Seq. ID no. 12375196
  misc_feature (1)..(356): Pfam Name: DUF315 Pfam Description: Domain of unknown function
  misc_feature (1)..(450): NCBI GI NO: 34908302 NR Description: P0005H10.23
  misc_feature (1)..(411): NCBI GI NO: 15241663 NR Description: putative protein; protein id: At5g02010.1
  misc_feature (1)..(410): NCBI GI NO: 15239292 NR Description: putative protein; protein id: At5g05940.1
  misc_feature (1)..(439): NCBI GI NO: 15233845 NR Description: putative protein; protein id: At4g38430
  misc_feature (1)..(439): NCBI GI NO: 15810309 NR Description: unknown protein [Arabidopsis thaliana]
  misc_feature (1)..(415): NCBI GI NO: 15228166 NR Description: putative protein; protein id: At3g55660.1
  misc_feature (1)..(357): NCBI GI NO: 37536670 NR Description: hypothetical protein
  misc_feature (1)..(357): NCBI GI NO: 38345761 NR Description: OSJNBa0065O17.14
  misc_feature (1)..(353): NCBI GI NO: 15236138 NR Description: putative protein; protein id: At4g00460.1
  misc_feature (1)..(352): NCBI GI NO: 33146611 NR Description: hypothetical protein
MMKERFSKLLLGEDMSGSGKGVCTALAISNAVTNLCATVFGQLWRLEPLPPEKKAMWRRELDCLLCVSDHIVELVPTWQTFPDGTRLEIMTSRPRSDLYINLPALRKLDNMLLEILEGFRDVEFWYVDQGICAPDCDSSASYRRTFHRRDDKWWLPVPHVPHGGLREATRRQLEHRRDCASQILKAAMAINSNALAEMAVPVSYLDSLPKNGRAALGDVIYRYITSDQFSQDCLLDCLDLSSEYQALEIANRVEASIYVWRRKGGGGARSSWGIVKDMVMDTEKRDLLAERAEALLMSLKQRFPGLTQTSLDMSKIQYNKDVGKSILESYSRVLESLASNIIARIDDLLNVDELSKQPADSIPSAGADAKVACKSNGSKQATAVPASGTPYATAYATPSFSPAQLSSPSKIGRALLVDRRSHHVAGAKRATASAADRAGVEVVKGMVVDGSSAIFDIIPIAVPAKI

SEQ ID NO: 39314 - DNA, 2429 bp, Zea mays subsp. mays
  misc_feature (1)..(2429): Ceres Seq. ID no. 12366265
gcacgagaccattacctagaacatcctaatcgaaaaaagacaagaccataaagattactcatagattaaagtagggtttggacgtctgcctgtccatttcggcgtctgttcttagcggccgacaagcggaatctggatcaagtcccctgcttcaacccatcccctctcatcgattcattgccacaaggcagctgattgctcacagcgttggatgtgagaattggattcggacccaccgatcgatatgccgttcggccacacgcggctcgatgtccggcgtccgccgcagtcgtcctacctctgctgctccacaaccaccgtcgccgtattcgtcgcgctctgcctggtggctgtgtggatggcgtcgtccatgctcgtcacccctgccgagttccctccatttcagtccaaagtgcgtccactgaggcctcatgactctcctcctgccaccggaagcttaaccagtgctgatcagggcgatggcatcaccacccatgatgatccaccacctgctacacaacaattgcctcctgtaacagacagcatggatggtgaaaatcagcaacaagaacttttcactacagagcgcggaccatggtcaaccaaggctgaacaatctaacaaggacgctaaagagcaaaccttgacgtccagtagcccactgagcttccgttgggcgttatgcaacgtcgatgctggagcagattatatttccatgcctcgacaacgtagcagctatcaagaagctccgttccaccaagcactacgaacaccgagaaaggcattgccccgagaaatctcctacctgccttgttcctctaccagagggctacaggaatccaattaggtggccaaagagcagagatcagatatggtacaataacgttcctcatactaagctggttgaatacaagggacaccaaaactgggttaaggtttctggagaatacctcaccttccccggaggcgggactcagtttaaacatggtgcgttgcgctacattgattttattcaggaggcaaagaaggatgtagcatggggaaaacgaagccgtgtagtgttagatgttggttgtggagtagctagctttggaggatatctatttgacagagatgtgattactatgtcatttgcacctaaagatgagcacgaagctcaggttcagtttgctcttgaaagaggaatacctgctatatcagctgtcatgggtacaaaaaggctcccatttcccagtagggtgtttgatgttgttcattgtgcacgatgtagggtaccgtggcatattgaaggcggtaaactcttgcttgaactggacagactgttacgtcctggtggttactttgtgtggtctgctacacccgtataccagaagctgcctgaagatgttgagatatggcaagccatgtctgctctaaccagttcaatgtgctggaaaatggtcaacaaagtaaaggatagggtgaatagagtgggtatagcaatttacagaaagccaacagacaacagctgctacgaagcaagatctgaaacaaaccctccactctgtggagagtacgacgatcctgatgctgcctggaacatatcgttgggggcttgtatgcataagttgcctgtagatcctaccgttcgtggttcacagtggcctgagttatggccattgagactggagaaaccaccttattggctgagaggttctgaggctggagtatatgggaaacctgccccggaggattttcaagcagactatgaacactggaagcgagtcgtgagcaattcatacatgaatggtttgggtattgactggtctactgttagaaatgttatggatatgaaagccgtatatgcagggttcgcagcagctttgcgcgatctcaaggtgtgggtcatgaatgtggttccaattgattcacctgacacgcttccaattatatatgagcgcgggctgtttggactgtaccatgactggtgtgagtcgtttagcacctatccgagaacttatgatcttgtgcacgccaaccatctgttctccaaggttaagaagaggtgcgagctattacctgttatcgtggaggtggaccgggtgttgaggccacaaggccggctaattgtcagagacaacattgaaacaacaagtgaggtggagaacattctgaaatctctccactgggaggtccgcatgtcttacttccaggagaaagaaggcttgctgttggtgcagaagacgacatggcggccaaatgaaactgaagctaagctatgatgcagagcccttgccccttggaaggaggaaaggaagatctagtgtttgcaaggtcctctacttttgtgaggcatcttttatttatgtagaatttgtagagctatatgattggtagatgtggaggaatctggtggtttccagcatatccatattcatctgtggaagtcg

SEQ ID NO: 39315 - protein, 522 aa, Zea mays subsp. mays
  peptide (1)..(522): Ceres Seq. ID no. 12366266
  misc_feature (8)..(510): Pfam Name: Pfam Description:  Putative methyltransferase
  misc_feature (8)..(491): NCBI GI NO: 38567836 NR Description: OSJNBb0020J19.14
  misc_feature (452)..(522): NCBI GI NO: 38567836 NR Description: OSJNBb0020J19.14
  misc_feature (8)..(522): NCBI GI NO: 20161455 NR Description: ankyrin-like protein
  misc_feature (8)..(519): NCBI GI NO: 30697941 NR Description: dehydration-induced protein-related
  misc_feature (8)..(519): NCBI GI NO: 15230391 NR Description: putative protein; protein id: At3g51070.1
  misc_feature (8)..(519): NCBI GI NO: 25403070 NR Description: unknown protein, 55790-52851
  misc_feature (8)..(519): NCBI GI NO: 30690755 NR Description: dehydration-induced protein-related
  misc_feature (8)..(519): NCBI GI NO: 15226271 NR Description: unknown protein; protein id: At2g34300.1
  misc_feature (8)..(496): NCBI GI NO: 18405331 NR Description: expressed protein; protein id: At2g40280
  misc_feature (8)..(496): NCBI GI NO: 25408683 NR Description: hypothetical protein At2g40280
MLEQIIFPCLDNVAAIKKLRSTKHYEHRERHCPEKSPTCLVPLPEGYRNPIRWPKSRDQIWYNNVPHTKLVEYKGHQNWVKVSGEYLTFPGGGTQFKHGALRYIDFIQEAKKDVAWGKRSRVVLDVGCGVASFGGYLFDRDVITMSFAPKDEHEAQVQFALERGIPAISAVMGTKRLPFPSRVFDVVHCARCRVPWHIEGGKLLLELDRLLRPGGYFVWSATPVYQKLPEDVEIWQAMSALTSSMCWKMVNKVKDRVNRVGIAIYRKPTDNSCYEARSETNPPLCGEYDDPDAAWNISLGACMHKLPVDPTVRGSQWPELWPLRLEKPPYWLRGSEAGVYGKPAPEDFQADYEHWKRVVSNSYMNGLGIDWSTVRNVMDMKAVYAGFAAALRDLKVWVMNVVPIDSPDTLPIIYERGLFGLYHDWCESFSTYPRTYDLVHANHLFSKVKKRCELLPVIVEVDRVLRPQGRLIVRDNIETTSEVENILKSLHWEVRMSYFQEKEGLLLVQKTTWRPNETEAKL

SEQ ID NO: 39316 - protein, 378 aa, Zea mays subsp. mays
  peptide (1)..(378): Ceres Seq. ID no. 12366267
  misc_feature (1)..(366): Pfam Name: Pfam Description:  Putative methyltransferase
  misc_feature (1)..(347): NCBI GI NO: 38567836 NR Description: OSJNBb0020J19.14
  misc_feature (308)..(378): NCBI GI NO: 38567836 NR Description: OSJNBb0020J19.14
  misc_feature (1)..(378): NCBI GI NO: 20161455 NR Description: ankyrin-like protein
  misc_feature (1)..(375): NCBI GI NO: 30697941 NR Description: dehydration-induced protein-related
  misc_feature (1)..(375): NCBI GI NO: 15230391 NR Description: putative protein; protein id: At3g51070.1
  misc_feature (1)..(375): NCBI GI NO: 25403070 NR Description: unknown protein, 55790-52851
  misc_feature (1)..(375): NCBI GI NO: 30690755 NR Description: dehydration-induced protein-related
  misc_feature (1)..(375): NCBI GI NO: 15226271 NR Description: unknown protein; protein id: At2g34300.1
  misc_feature (1)..(352): NCBI GI NO: 18405331 NR Description: expressed protein; protein id: At2g40280
  misc_feature (1)..(352): NCBI GI NO: 25408683 NR Description: hypothetical protein At2g40280
MSFAPKDEHEAQVQFALERGIPAISAVMGTKRLPFPSRVFDVVHCARCRVPWHIEGGKLLLELDRLLRPGGYFVWSATPVYQKLPEDVEIWQAMSALTSSMCWKMVNKVKDRVNRVGIAIYRKPTDNSCYEARSETNPPLCGEYDDPDAAWNISLGACMHKLPVDPTVRGSQWPELWPLRLEKPPYWLRGSEAGVYGKPAPEDFQADYEHWKRVVSNSYMNGLGIDWSTVRNVMDMKAVYAGFAAALRDLKVWVMNVVPIDSPDTLPIIYERGLFGLYHDWCESFSTYPRTYDLVHANHLFSKVKKRCELLPVIVEVDRVLRPQGRLIVRDNIETTSEVENILKSLHWEVRMSYFQEKEGLLLVQKTTWRPNETEAKL

SEQ ID NO: 39317 - protein, 351 aa, Zea mays subsp. mays
  peptide (1)..(351): Ceres Seq. ID no. 12366268
  misc_feature (1)..(339): Pfam Name: Pfam Description:  Putative methyltransferase
  misc_feature (1)..(320): NCBI GI NO: 38567836 NR Description: OSJNBb0020J19.14
  misc_feature (281)..(351): NCBI GI NO: 38567836 NR Description: OSJNBb0020J19.14
  misc_feature (1)..(351): NCBI GI NO: 20161455 NR Description: ankyrin-like protein
  misc_feature (1)..(348): NCBI GI NO: 30697941 NR Description: dehydration-induced protein-related
  misc_feature (1)..(348): NCBI GI NO: 15230391 NR Description: putative protein; protein id: At3g51070.1
  misc_feature (1)..(348): NCBI GI NO: 25403070 NR Description: unknown protein, 55790-52851
  misc_feature (1)..(348): NCBI GI NO: 30690755 NR Description: dehydration-induced protein-related
  misc_feature (1)..(348): NCBI GI NO: 15226271 NR Description: unknown protein; protein id: At2g34300.1
  misc_feature (1)..(325): NCBI GI NO: 18405331 NR Description: expressed protein; protein id: At2g40280
  misc_feature (1)..(325): NCBI GI NO: 25408683 NR Description: hypothetical protein At2g40280
MGTKRLPFPSRVFDVVHCARCRVPWHIEGGKLLLELDRLLRPGGYFVWSATPVYQKLPEDVEIWQAMSALTSSMCWKMVNKVKDRVNRVGIAIYRKPTDNSCYEARSETNPPLCGEYDDPDAAWNISLGACMHKLPVDPTVRGSQWPELWPLRLEKPPYWLRGSEAGVYGKPAPEDFQADYEHWKRVVSNSYMNGLGIDWSTVRNVMDMKAVYAGFAAALRDLKVWVMNVVPIDSPDTLPIIYERGLFGLYHDWCESFSTYPRTYDLVHANHLFSKVKKRCELLPVIVEVDRVLRPQGRLIVRDNIETTSEVENILKSLHWEVRMSYFQEKEGLLLVQKTTWRPNETEAKL

SEQ ID NO: 39318 - DNA, 1872 bp, Zea mays subsp. mays
  misc_feature (1)..(1872): Ceres Seq. ID no. 12366269
cttttcccctctcgaaacgcaccctgcatttactgcacgtcgctcgccctccggccatccgcgatcttcaaatcttccactgtaaaaagcgggcggagacgggaaggccgtgcgctcaaggatggcgcgcgagcagctggaggagtccatcgtggccgacggcaacggcaaggaggaagaggtcggggtcatgggcatcggcgccgcggacggcgccgacgaccagcacggcggcggcaagctcagcatgaagagcctgctgtggcacggcggctccgtctgggacgcgtggttcagctgcgcctccaaccaggtggcgcaggtgctcctgacgctgccgtactccttctcccagctggggatgctgtccggcgtgctgctgcagatcttctacggcttcctgggcagctggaccgcgtacctcatcagcgtcctctacgtcgagtaccgctcccgcaaggagaaggagggcgtcagcttcaagaaccacgtcatccagtggttcgaggtgctggacgggttgctgggcccctactggaaggcggcgggtctggccttcaactgcacgttcctgctgttcggctccgtcatccagctgatcgcctgcgcgagcaacatctactacatcaacgatcggctggacaagcggacatggacgtacatcttcggcgcctgctgcgccaccacggtgttcatcccgtccttccacaactaccggatctggtccttcctgggcctcggcatgaccacctacaccgcgtggtacctcgccatcgccgcgctcctcaacggccaggccgaaggcgtggcgcactccggcccgaccaagctcgtgctctacttcaccggcgccaccaacatcctctacaccttcggcggccacgccgtcacagtcgagatcatgcacgcgatgtggaagcccgccaagttcaagtacatctacctgctggcgacgctgtacgtgttcacgctgacgctgccgtcggcggcggccatgtactgggcgttcggcgacgagctgctgacccactcgaacgccttctcgctgctgcccaagacccggtggcgcgacgcggcggtgatcctgatgctgatccaccagttcatcaccttcggcttcgcgtgcacgccgctctacttcgtgtgggagaaggtgatcgggatgcacgacgccaagagcatcttcaagcgcgcgctggcgaggctgcccatcgtcgtgcccatctggttcctcgccatcatcttcccccttcttcgggcccatcaactccgccgtcggcgcgctgctcgtcagcttcaccgtctacatcatcccggccctggcgcacgtcctcacctaccgcacggcgtccgcgcgcatgaacgccgcggagaagccgcccttcttcctgccgagctggacggggatgttcgtcctcaacatgttcatcgtggtgtgggtgctggtggtcggcttcgggctgggcggctgggccagcatggtcaacttcgtgaggcagatcgacacgttcgggctgttcgccaagtgctaccagtgcccgaagccgccggtcccggcggccgcgcagtcgccggcgccgctgccgcaccactagggcgcgcaggcatggagctagcgtcgctgcttgcattgcagccggtgttaattgctactaggttttggtcgccttgtaatatacaagcctcctctagggtcgtagaactcgatcacagcagagtcacgcaaaggcggctcgtgccgtgccgccgccgcgttgctttcccgcccaccctcctctgcctgatcggtccgtcggcattggtgtcgttttgttttcgtttggcttgccaccggtattaaaaagttgagtgatggtcatggcttcttaatcc

SEQ ID NO: 39319 - protein, 572 aa, Zea mays subsp. mays
  peptide (1)..(572): Ceres Seq. ID no. 12366270
  misc_feature (1)..(376): NCBI GI NO: 10800920 NR Description: putative AUX1-like permease [Medicago truncatula]
  misc_feature (4)..(376): NCBI GI NO: 15240927 NR Description: LAX1 / AUX1 -like permease; protein id: At5g01240
  misc_feature (8)..(376): NCBI GI NO: 18404642 NR Description: expressed protein; protein id: At2g38120
  misc_feature (1)..(376): NCBI GI NO: 21586468 NR Description: auxin influx carrier protein [Medicago truncatula]
  misc_feature (1)..(376): NCBI GI NO: 6650716 NR Description: AUX1-like protein
  misc_feature (7)..(376): NCBI GI NO: 10441742 NR Description: putative AUX1-like permease
  misc_feature (4)..(376): NCBI GI NO: 5881784 NR Description: putative AUX1-like permease [Arabidopsis thaliana]
  misc_feature (1)..(378): NCBI GI NO: 25956260 NR Description: AUX1-like auxin transport protein
  misc_feature (33)..(376): NCBI GI NO: 10800918 NR Description: putative AUX1-like permease [Medicago truncatula]
MAREQLEESIVADGNGKEEEVGVMGIGAADGADDQHGGGKLSMKSLLWHGGSVWDAWFSCASNQVAQVLLTLPYSFSQLGMLSGVLLQIFYGFLGSWTAYLISVLYVEYRSRKEKEGVSFKNHVIQWFEVLDGLLGPYWKAAGLAFNCTFLLFGSVIQLIACASNIYYINDRLDKRTWTYIFGACCATTVFIPSFHNYRIWSFLGLGMTTYTAWYLAIAALLNGQAEGVAHSGPTKLVLYFTGATNILYTFGGHAVTVEIMHAMWKPAKFKYIYLLATLYVFTLTLPSAAAMYWAFGDELLTHSNAFSLLPKTRWRDAAVILMLIHQFITFGFACTPLYFVWEKVIGMHDAKSIFKRALARLPIVVPIWFLAIIFPLLRAHQLRRRRAARQLHRLHHPGPGARPHLPHGVRAHERRGEAALLPAELDGDVRPQHVHRGVGAGGRLRAGRLGQHGQLREADRHVRAVRQVLPVPEAAGPGGRAVAGAAAAPLGRAGMELASLLALQPVLIATRFWSPCNIQASSRVVELDHSRVTQRRLVPCRRRVAFPPTLLCLIGPSALVSFCFRLACHRY

SEQ ID NO: 39320 - protein, 549 aa, Zea mays subsp. mays
  peptide (1)..(549): Ceres Seq. ID no. 12366271
  misc_feature (1)..(353): NCBI GI NO: 10800920 NR Description: putative AUX1-like permease [Medicago truncatula]
  misc_feature (1)..(353): NCBI GI NO: 15240927 NR Description: LAX1 / AUX1 -like permease; protein id: At5g01240
  misc_feature (1)..(353): NCBI GI NO: 18404642 NR Description: expressed protein; protein id: At2g38120
  misc_feature (1)..(353): NCBI GI NO: 21586468 NR Description: auxin influx carrier protein [Medicago truncatula]
  misc_feature (1)..(353): NCBI GI NO: 6650716 NR Description: AUX1-like protein
  misc_feature (1)..(353): NCBI GI NO: 10441742 NR Description: putative AUX1-like permease
  misc_feature (1)..(353): NCBI GI NO: 5881784 NR Description: putative AUX1-like permease [Arabidopsis thaliana]
  misc_feature (1)..(355): NCBI GI NO: 25956260 NR Description: AUX1-like auxin transport protein
  misc_feature (10)..(353): NCBI GI NO: 10800918 NR Description: putative AUX1-like permease [Medicago truncatula]
MGIGAADGADDQHGGGKLSMKSLLWHGGSVWDAWFSCASNQVAQVLLTLPYSFSQLGMLSGVLLQIFYGFLGSWTAYLISVLYVEYRSRKEKEGVSFKNHVIQWFEVLDGLLGPYWKAAGLAFNCTFLLFGSVIQLIACASNIYYINDRLDKRTWTYIFGACCATTVFIPSFHNYRIWSFLGLGMTTYTAWYLAIAALLNGQAEGVAHSGPTKLVLYFTGATNILYTFGGHAVTVEIMHAMWKPAKFKYIYLLATLYVFTLTLPSAAAMYWAFGDELLTHSNAFSLLPKTRWRDAAVILMLIHQFITFGFACTPLYFVWEKVIGMHDAKSIFKRALARLPIVVPIWFLAIIFPLLRAHQLRRRRAARQLHRLHHPGPGARPHLPHGVRAHERRGEAALLPAELDGDVRPQHVHRGVGAGGRLRAGRLGQHGQLREADRHVRAVRQVLPVPEAAGPGGRAVAGAAAAPLGRAGMELASLLALQPVLIATRFWSPCNIQASSRVVELDHSRVTQRRLVPCRRRVAFPPTLLCLIGPSALVSFCFRLACHRY

SEQ ID NO: 39321 - protein, 530 aa, Zea mays subsp. mays
  peptide (1)..(530): Ceres Seq. ID no. 12366272
  misc_feature (1)..(334): NCBI GI NO: 10800920 NR Description: putative AUX1-like permease [Medicago truncatula]
  misc_feature (1)..(334): NCBI GI NO: 15240927 NR Description: LAX1 / AUX1 -like permease; protein id: At5g01240
  misc_feature (1)..(334): NCBI GI NO: 18404642 NR Description: expressed protein; protein id: At2g38120
  misc_feature (1)..(334): NCBI GI NO: 21586468 NR Description: auxin influx carrier protein [Medicago truncatula]
  misc_feature (1)..(334): NCBI GI NO: 6650716 NR Description: AUX1-like protein
  misc_feature (1)..(334): NCBI GI NO: 10441742 NR Description: putative AUX1-like permease
  misc_feature (1)..(334): NCBI GI NO: 5881784 NR Description: putative AUX1-like permease [Arabidopsis thaliana]
  misc_feature (1)..(336): NCBI GI NO: 25956260 NR Description: AUX1-like auxin transport protein
  misc_feature (1)..(334): NCBI GI NO: 10800918 NR Description: putative AUX1-like permease [Medicago truncatula]
MKSLLWHGGSVWDAWFSCASNQVAQVLLTLPYSFSQLGMLSGVLLQIFYGFLGSWTAYLISVLYVEYRSRKEKEGVSFKNHVIQWFEVLDGLLGPYWKAAGLAFNCTFLLFGSVIQLIACASNIYYINDRLDKRTWTYIFGACCATTVFIPSFHNYRIWSFLGLGMTTYTAWYLAIAALLNGQAEGVAHSGPTKLVLYFTGATNILYTFGGHAVTVEIMHAMWKPAKFKYIYLLATLYVFTLTLPSAAAMYWAFGDELLTHSNAFSLLPKTRWRDAAVILMLIHQFITFGFACTPLYFVWEKVIGMHDAKSIFKRALARLPIVVPIWFLAIIFPLLRAHQLRRRRAARQLHRLHHPGPGARPHLPHGVRAHERRGEAALLPAELDGDVRPQHVHRGVGAGGRLRAGRLGQHGQLREADRHVRAVRQVLPVPEAAGPGGRAVAGAAAAPLGRAGMELASLLALQPVLIATRFWSPCNIQASSRVVELDHSRVTQRRLVPCRRRVAFPPTLLCLIGPSALVSFCFRLACHRY

SEQ ID NO: 39322 - DNA, 727 bp, Zea mays subsp. mays
  misc_feature (1)..(727): Ceres Seq. ID no. 12417192
gaactcaagattgcaacagggtcgtccgccgccaccaattgctagcgcaatcctagccctagcccagcgccccctccggccctccctgcttcgtgcttggtagcgatggcgtcgttttctgaagcgcccccggggaacccaactgctggcgagaagatcttcaagaccaagtgcgcgcagtgccacaccgtcgacaagggcgccggccacaagcaaggtcctaatttgaatggtctgtttgggaggcagtctggtacaacacctggctactcttactcttcggctaacaagaacatggctgtgatttgggaggagaacactttgtatgactacttgcttaatcccaagaagtacattcctggaaccaagatggtattccctggactgaaaaagccacaggaacgtgctgatctcattgcatacctgaagaatgccactgtctgacgaggatgctgctgtggctctaaagatgaagagcagcgattctctttttttgcagttaaaataatgacacgaatttactttaatttgacagactggataatcaagaaagctaagaactccaggtagttctgtaacggttttgtctattgctgggggtaaacaccacccttgaagagcttttgattagtggttgaaatgtgacatcaccataatacgtttgacctgacgagcatttaaacacacgtttgggaagcttttgattagtgttttaatgttcgttttt

SEQ ID NO: 39323 - protein, 112 aa, Zea mays subsp. mays
  peptide (1)..(112): Ceres Seq. ID no. 12417193
  misc_feature (1)..(111): NCBI GI NO: 118011 NR Description: Cytochrome c
  misc_feature (2)..(111): NCBI GI NO: 229737 NR Description: Cytochrome c
  misc_feature (2)..(111): NCBI GI NO: 476418 NR Description: cytochrome c - maize
  misc_feature (2)..(111): NCBI GI NO: 476417 NR Description: cytochrome c - cuckoopint
  misc_feature (2)..(111): NCBI GI NO: 117976 NR Description: Cytochrome c
  misc_feature (2)..(111): NCBI GI NO: 118022 NR Description: CYTOCHROME C
  misc_feature (2)..(111): NCBI GI NO: 118023 NR Description: CYTOCHROME C
  misc_feature (2)..(111): NCBI GI NO: 350295 NR Description: cytochrome c
  misc_feature (1)..(111): NCBI GI NO: 2506328 NR Description: Cytochrome c
  misc_feature (2)..(111): NCBI GI NO: 118004 NR Description: CYTOCHROME C
MASFSEAPPGNPTAGEKIFKTKCAQCHTVDKGAGHKQGPNLNGLFGRQSGTTPGYSYSSANKNMAVIWEENTLYDYLLNPKKYIPGTKMVFPGLKKPQERADLIAYLKNATV

SEQ ID NO: 39324 - DNA, 1787 bp, Zea mays subsp. mays
  misc_feature (1)..(1787): Ceres Seq. ID no. 13498188
cctcccctcccctccctgctcctctaccccttcctctcccggcgaccagctggcctctcctttgttgaggcgagagacccccacccgatccggcgatggacgccgcgtccaggccgcctccgccccacggagcaggggtccgcgtccgcgccccgctggtggagtctgtctcctgctactgcagattagatacaggccttaaaactgttgttgaggccaggaagtttgttcctggcgcgaaaatgtgcatgcaacctgaagtcaaacaaaacaagcgcaagtcaaggggctcaaaaaaggaaaggtgcaggactcaagcaccacttttacctggccttcctgatgatcttgctattgcctgccttatacgagttcctcgacttgaacagcccaaactcaggatggtttgcaaaagatggaaccgtcttttgtctgggaattacttttactccttgcgtaagaaaattggagtggcagaagaatgggtgtatgtctttaaaagggaccgtgaagggaagatatcctggtatgcctttgatccactccaccagctatggaagtcactcccaccagttccacaagagtattcagaagcattgggctttgggtgtgccgttctgagtggttgctatctgtacttgtttggcgggaaagatcctttgaggggttctatgaggcgtgttgtattctacaatgctcgtacaaacaaatggcaccgggctccggatatgatgaggaaacgtcacttttttggttcttgtgtaataaacaattgtctctatgttgctggaggagagtgtgaaggaatacagagaacactgcagtctgcggaagtttatgatccaaataggaacagatgggcctgtgttactgaaatgaacaatgggatggtgcctttcattggagttgtatatgatggcaagtggttcttaaaggggctagattcccatcgccaagtaactagtgaggtctacttaccatcatccaatacatggtcagcaattgatgatgagatggtcacaggctggcggaacccaagtatttctttcaatggccgtctctattcagctgactgccgggatggctgcaagcttagagtctatgatgagaacacaggaacatggacaaggttcatggacagcaagcaccacttgggcagctcacgtgcctttgaagctgcagctttggtgtcactaaatgggaaactctgtgtcatcaggaacaacatgagcataactcttgttgatgtctccaacccaacaatgagtgttgagacagatagtgcgcgcatgtgggaaactgttgttcggaagggccagcacaggtcgtttgtggcgaacttatggtcgagcattgcaggacggaacttaaagagtcacattatccattgccatgtgctgcaagtttgagggcaggttttgttagtgggaacatgatcaagttttttaagaagcaaaaggttcagatcagtgacagaaccctccatttcgaaggtagtaaggtttcattgcagaatcgcggggaaaaaggtcattggcgtgccactgctgcccccaaagtcccaaatagttatttgctctcttccagaactgaaaattccaattactttctggcaacatttgaagactcttatcattaatggataaggtttttcagattttgagtgcaaaccagaaagtgagtaggaacttccctagtgtaatgacattttccccttgctggcaggctgggaaatgtgtttggtggatatattggtctcttatcatatttatctatctttgcattgt

SEQ ID NO: 39325 - protein, 437 aa, Zea mays subsp. mays
  peptide (1)..(437): Ceres Seq. ID no. 13498189
  misc_feature (167)..(213): Pfam Name: Pfam Description:  Kelch motif
  misc_feature (1)..(437): NCBI GI NO: 37534254 NR Description: unknown protein
  misc_feature (22)..(437): NCBI GI NO: 19071626 NR Description: putative Kelch motif containing protein
  misc_feature (1)..(436): NCBI GI NO: 18405298 NR Description: Kelch repeat containing F-box protein family
  misc_feature (1)..(403): NCBI GI NO: 25405811 NR Description: unknown protein, 58496-60308
  misc_feature (73)..(387): NCBI GI NO: 18411974 NR Description: SKP1 interacting partner 4 (SKIP4), putative
  misc_feature (73)..(387): NCBI GI NO: 26453288 NR Description: putative SKP1 interacting partner 4 SKIP4
  misc_feature (65)..(371): NCBI GI NO: 7487225 NR Description: hypothetical protein T1F15
  misc_feature (65)..(371): NCBI GI NO: 15220452 NR Description: Kelch repeat containing F-box protein family
  misc_feature (64)..(403): NCBI GI NO: 18397351 NR Description: Kelch repeat containing F-box protein family
  misc_feature (73)..(344): NCBI GI NO: 15223520 NR Description: Kelch repeat containing F-box protein family
MDAASRPPPPHGAGVRVRAPLVESVSCYCRLDTGLKTVVEARKFVPGAKMCMQPEVKQNKRKSRGSKKERCRTQAPLLPGLPDDLAIACLIRVPRLEQPKLRMVCKRWNRLLSGNYFYSLRKKIGVAEEWVYVFKRDREGKISWYAFDPLHQLWKSLPPVPQEYSEALGFGCAVLSGCYLYLFGGKDPLRGSMRRVVFYNARTNKWHRAPDMMRKRHFFGSCVINNCLYVAGGECEGIQRTLQSAEVYDPNRNRWACVTEMNNGMVPFIGVVYDGKWFLKGLDSHRQVTSEVYLPSSNTWSAIDDEMVTGWRNPSISFNGRLYSADCRDGCKLRVYDENTGTWTRFMDSKHHLGSSRAFEAAALVSLNGKLCVIRNNMSITLVDVSNPTMSVETDSARMWETVVRKGQHRSFVANLWSSIAGRNLKSHIIHCHVLQV

SEQ ID NO: 39326 - protein, 388 aa, Zea mays subsp. mays
  peptide (1)..(388): Ceres Seq. ID no. 13498190
  misc_feature (118)..(164): Pfam Name: Pfam Description:  Kelch motif
  misc_feature (1)..(388): NCBI GI NO: 37534254 NR Description: unknown protein
  misc_feature (1)..(388): NCBI GI NO: 19071626 NR Description: putative Kelch motif containing protein
  misc_feature (1)..(387): NCBI GI NO: 18405298 NR Description: Kelch repeat containing F-box protein family
  misc_feature (1)..(354): NCBI GI NO: 25405811 NR Description: unknown protein, 58496-60308
  misc_feature (24)..(338): NCBI GI NO: 18411974 NR Description: SKP1 interacting partner 4 (SKIP4), putative
  misc_feature (24)..(338): NCBI GI NO: 26453288 NR Description: putative SKP1 interacting partner 4 SKIP4
  misc_feature (16)..(322): NCBI GI NO: 7487225 NR Description: hypothetical protein T1F15
  misc_feature (16)..(322): NCBI GI NO: 15220452 NR Description: Kelch repeat containing F-box protein family
  misc_feature (15)..(354): NCBI GI NO: 18397351 NR Description: Kelch repeat containing F-box protein family
  misc_feature (24)..(295): NCBI GI NO: 15223520 NR Description: Kelch repeat containing F-box protein family
MCMQPEVKQNKRKSRGSKKERCRTQAPLLPGLPDDLAIACLIRVPRLEQPKLRMVCKRWNRLLSGNYFYSLRKKIGVAEEWVYVFKRDREGKISWYAFDPLHQLWKSLPPVPQEYSEALGFGCAVLSGCYLYLFGGKDPLRGSMRRVVFYNARTNKWHRAPDMMRKRHFFGSCVINNCLYVAGGECEGIQRTLQSAEVYDPNRNRWACVTEMNNGMVPFIGVVYDGKWFLKGLDSHRQVTSEVYLPSSNTWSAIDDEMVTGWRNPSISFNGRLYSADCRDGCKLRVYDENTGTWTRFMDSKHHLGSSRAFEAAALVSLNGKLCVIRNNMSITLVDVSNPTMSVETDSARMWETVVRKGQHRSFVANLWSSIAGRNLKSHIIHCHVLQV

SEQ ID NO: 39327 - protein, 386 aa, Zea mays subsp. mays
  peptide (1)..(386): Ceres Seq. ID no. 13498191
  misc_feature (116)..(162): Pfam Name: Pfam Description:  Kelch motif
  misc_feature (1)..(386): NCBI GI NO: 37534254 NR Description: unknown protein
  misc_feature (1)..(386): NCBI GI NO: 19071626 NR Description: putative Kelch motif containing protein
  misc_feature (1)..(385): NCBI GI NO: 18405298 NR Description: Kelch repeat containing F-box protein family
  misc_feature (1)..(352): NCBI GI NO: 25405811 NR Description: unknown protein, 58496-60308
  misc_feature (22)..(336): NCBI GI NO: 18411974 NR Description: SKP1 interacting partner 4 (SKIP4), putative
  misc_feature (22)..(336): NCBI GI NO: 26453288 NR Description: putative SKP1 interacting partner 4 SKIP4
  misc_feature (14)..(320): NCBI GI NO: 7487225 NR Description: hypothetical protein T1F15
  misc_feature (14)..(320): NCBI GI NO: 15220452 NR Description: Kelch repeat containing F-box protein family
  misc_feature (13)..(352): NCBI GI NO: 18397351 NR Description: Kelch repeat containing F-box protein family
  misc_feature (22)..(293): NCBI GI NO: 15223520 NR Description: Kelch repeat containing F-box protein family
MQPEVKQNKRKSRGSKKERCRTQAPLLPGLPDDLAIACLIRVPRLEQPKLRMVCKRWNRLLSGNYFYSLRKKIGVAEEWVYVFKRDREGKISWYAFDPLHQLWKSLPPVPQEYSEALGFGCAVLSGCYLYLFGGKDPLRGSMRRVVFYNARTNKWHRAPDMMRKRHFFGSCVINNCLYVAGGECEGIQRTLQSAEVYDPNRNRWACVTEMNNGMVPFIGVVYDGKWFLKGLDSHRQVTSEVYLPSSNTWSAIDDEMVTGWRNPSISFNGRLYSADCRDGCKLRVYDENTGTWTRFMDSKHHLGSSRAFEAAALVSLNGKLCVIRNNMSITLVDVSNPTMSVETDSARMWETVVRKGQHRSFVANLWSSIAGRNLKSHIIHCHVLQV

SEQ ID NO: 39328 - DNA, 1974 bp, Zea mays subsp. mays
  misc_feature (1)..(1974): Ceres Seq. ID no. 12366224
gcacgagaccattacctagaacatcctaatcgaaaacttcgtcttctgtcactgtcccacactcctatcattctcgccttcgacttcccaggagcgcccagcgccgcggagcttctagaacacgcgactggggcgagctagacgaagctaaggaggcgcgaggggtgacgatgcggggcaggtgacggtgcggcgtggtggaggcgggacagaggccgggggatggtggcggcggagggtgggcccgtcgaggagggcgtcggggagagctcgtccccgccgcgcgtagacgcagccccagcgccctctggctccgttgggagcgggggcagaggaggcgccagcgacatctgcgccgaggtgctcgagcgcctcgtcgccgacggccacgcggaggcgtccgaccccgagttccgcgacaggctcgccgcacatttcgggcggctcccgcacagctatcagctggatatcaatgttgacaaagcaaccgatgtcttggtccaccagaatgtcttagcggaagcaaaggatcctgataggcgccctgcattctatgttcgtttcttgaggattgaagatattgatcctgcaaacgactccgatgcatctgaagaaggggatggtgatggtgatgatctctctgtaaggcaggacacaccatatactcacattcatgaggtagtattctccacaatcgacaagccaaagctccttagtcagctatctgcattgctatctgacattggattgaacatcagagaagcacatgttttctctactcatgatggctattctcttgatgttttcgttgttgatggctggcccattaaggatactgatggtttgcacaaagcactggaagcatccattttaagaaatgagggttcatggtctggttcatctcattcgtcagcagctgaaagaacactgcccttccaagttaaaggtggtgaatgggaaatcgataaacgacttctgaagatgggagggttgattgcttctggttcttgtggggacttgtatcacgggacttacctcggtgaggatgtagctgttaaagttctaagagctgagcatttgaataagaatgtttggaacgaatttactcaagaagtatatatactaagagaagttcaacatacaaatgttgtgcgattcattggtgcttgcacaaaaccaccacaattttgcataattacagaatacatgtctggaggaagcttatatgactttgtgcacaagcagcataacgttctaaacctcacgactctattgaagtttgcagttgatgtatgccgagggatgtgctacttgcatgaaaggggtatcatccatagagacttaaagactgccaaccttctaatggacaacgatcatgctgtgaaagtggctgattttggcgtagctcggttccaggatcaaggaggtatcatgacagctgaaactggaacatacagatggatggcgcctgaggttataaaccaccaaccctatgatagcaaagcagatgtgttcagctttgccattgttctctgggagctgataacgtccaagatcccatatgataccatgacccctctccaagcggctgtaggtgtgagacaggggttgcgcccaggacttccgaagaagacgcacccaaagctgttggacttgatgcagagatgttgggaagcagatccatccgaccggcctgctttctcggacattttagccgaactggaggatcttttggcacaagctcagggaacatcgggaaagacggtccaagatccatcaaactcgaacgcgaaagattaacccccatgccatgcacatacctgacattttttctcaatccagtgatttgccacatctaggattcgagttgccaattatgaggaaatttgttttgcttgtgtacattcgaacaatcttcttggggcctattttttatgggcacctcattattcttatacaaaagaaattgggccc

SEQ ID NO: 39329 - protein, 525 aa, Zea mays subsp. mays
  peptide (1)..(525): Ceres Seq. ID no. 12366225
  misc_feature (252)..(500): Pfam Name: Pfam Description:  Protein kinase domain
  misc_feature (137)..(506): NCBI GI NO: 22329194 NR Description: putative protein; protein id: At4g35780
  misc_feature (42)..(144): NCBI GI NO: 22329194 NR Description: putative protein; protein id: At4g35780
  misc_feature (137)..(506): NCBI GI NO: 7486654 NR Description: hypothetical protein F8D20
  misc_feature (42)..(144): NCBI GI NO: 7486654 NR Description: hypothetical protein F8D20
  misc_feature (267)..(444): NCBI GI NO: 7485889 NR Description: hypothetical protein F20M13
  misc_feature (128)..(220): NCBI GI NO: 7485889 NR Description: hypothetical protein F20M13
  misc_feature (23)..(116): NCBI GI NO: 7485889 NR Description: hypothetical protein F20M13
  misc_feature (461)..(513): NCBI GI NO: 7485889 NR Description: hypothetical protein F20M13
  misc_feature (59)..(513): NCBI GI NO: 18420244 NR Description: protein kinase like protein; protein id:At4g38470
  misc_feature (14)..(516): NCBI GI NO: 34901608 NR Description: P0571D04.18
MVAAEGGPVEEGVGESSSPPRVDAAPAPSGSVGSGGRGGASDICAEVLERLVADGHAEASDPEFRDRLAAHFGRLPHSYQLDINVDKATDVLVHQNVLAEAKDPDRRPAFYVRFLRIEDIDPANDSDASEEGDGDGDDLSVRQDTPYTHIHEVVFSTIDKPKLLSQLSALLSDIGLNIREAHVFSTHDGYSLDVFVVDGWPIKDTDGLHKALEASILRNEGSWSGSSHSSAAERTLPFQVKGGEWEIDKRLLKMGGLIASGSCGDLYHGTYLGEDVAVKVLRAEHLNKNVWNEFTQEVYILREVQHTNVVRFIGACTKPPQFCIITEYMSGGSLYDFVHKQHNVLNLTTLLKFAVDVCRGMCYLHERGIIHRDLKTANLLMDNDHAVKVADFGVARFQDQGGIMTAETGTYRWMAPEVINHQPYDSKADVFSFAIVLWELITSKIPYDTMTPLQAAVGVRQGLRPGLPKKTHPKLLDLMQRCWEADPSDRPAFSDILAELEDLLAQAQGTSGKTVQDPSNSNAKD

SEQ ID NO: 39330 - protein, 272 aa, Zea mays subsp. mays
  peptide (1)..(272): Ceres Seq. ID no. 12366226
  misc_feature (1)..(247): Pfam Name: Pfam Description:  Protein kinase domain
  misc_feature (1)..(253): NCBI GI NO: 22329194 NR Description: putative protein; protein id: At4g35780
  misc_feature (1)..(253): NCBI GI NO: 7486654 NR Description: hypothetical protein F8D20
  misc_feature (14)..(191): NCBI GI NO: 7485889 NR Description: hypothetical protein F20M13
  misc_feature (208)..(260): NCBI GI NO: 7485889 NR Description: hypothetical protein F20M13
  misc_feature (1)..(260): NCBI GI NO: 18420244 NR Description: protein kinase like protein; protein id:At4g38470
  misc_feature (1)..(263): NCBI GI NO: 34901608 NR Description: P0571D04.18
  misc_feature (1)..(93): NCBI GI NO: 7486398 NR Description: hypothetical protein F4B14
  misc_feature (97)..(196): NCBI GI NO: 7486398 NR Description: hypothetical protein F4B14
  misc_feature (208)..(253): NCBI GI NO: 7486398 NR Description: hypothetical protein F4B14
  misc_feature (1)..(253): NCBI GI NO: 15227883 NR Description: putative protein kinase; protein id: At2g17700
MGGLIASGSCGDLYHGTYLGEDVAVKVLRAEHLNKNVWNEFTQEVYILREVQHTNVVRFIGACTKPPQFCIITEYMSGGSLYDFVHKQHNVLNLTTLLKFAVDVCRGMCYLHERGIIHRDLKTANLLMDNDHAVKVADFGVARFQDQGGIMTAETGTYRWMAPEVINHQPYDSKADVFSFAIVLWELITSKIPYDTMTPLQAAVGVRQGLRPGLPKKTHPKLLDLMQRCWEADPSDRPAFSDILAELEDLLAQAQGTSGKTVQDPSNSNAKD

SEQ ID NO: 39331 - DNA, 437 bp, Zea mays subsp. mays
  misc_feature (1)..(437): Ceres Seq. ID no. 2790081
aaccttaaaagtggaattggttccaatctcacccccccgcgcgctgcagtgtgcaggccctgccgtctgccgcaaaagagagcactaggaaaagaagtgctgcggcgttgcgaggtgggggacgaggacgaggccagaacgccccaaaaccaaaaacccccagaaccccgacctagggttacgccatcgccatgggatctgttgcctccgccgctgtgccaccacctcctcctcaatcagcgctgcctcaggcgggcgcgccgccctacgggcccgggctcgccgggatcctcccgcagatgtcgaagggggaggagaagaaggatgagaaggtggactacctcaacctcccctgccccgtgcccttcgaggagatccagcgcgaggctctcatgtctttgaagcctgaactttttgaaggattgaggtttgacttc

SEQ ID NO: 39332 - protein, 133 aa, Zea mays subsp. mays
  peptide (1)..(133): Ceres Seq. ID no. 2790082
NLKSGIGSNLTPPRAAVCRPCRLPQKRALGKEVLRRCEVGDEDEARTPQNQKPPEPRPRVTPSPWDLLPPPLCHHLLLNQRCLRRARRPTGPGSPGSSRRCRRGRRRRMRRWTTSTSPAPCPSRRSSARLSCL

SEQ ID NO: 39333 - protein, 82 aa, Zea mays subsp. mays
  peptide (1)..(82): Ceres Seq. ID no. 2790083
  misc_feature (1)..(81): NCBI GI NO: 34903264 NR Description: unnamed protein product
  misc_feature (30)..(81): NCBI GI NO: 11994775 NR Description: membrane import protein-like
  misc_feature (30)..(81): NCBI GI NO: 15231008 NR Description: membrane import protein, putative
  misc_feature (43)..(81): NCBI GI NO: 13162531 NR Description: Hypothetical protein [Arabidopsis thaliana]
  misc_feature (43)..(81): NCBI GI NO: 15222963 NR Description: hypothetical protein; protein id: At1g50400.1
MGSVASAAVPPPPPQSALPQAGAPPYGPGLAGILPQMSKGEEKKDEKVDYLNLPCPVPFEEIQREALMSLKPELFEGLRFDF

SEQ ID NO: 39334 - DNA, 1529 bp, Zea mays subsp. mays
  misc_feature (1)..(1529): Ceres Seq. ID no. 12366273
  misc_feature (723)..(723): n is a, c, t, g, unknown, or other
cactccgtaaaaccacaggaaacctcacacgtcttcctccgtccagcctgtctccggccggccccccgccttccttaactccgcatcatccccttccaatctcgtcttcccagcacccgaaccgatcaaattcacttccgctcgattctccgggagggggagggtagctgaaggacatcccggggacgcaatgcgcgtcctcgccgtgttcctcctcggcgcagcgttcgcggcggcggccggaggcggcggggagcttccggagttccgggaagctccggcgttccgcaacggcgcagcctgcgcggacgcgccgacgatccacatcgcgatgacgctggacggcacctacctgcggggctccctcgccggcgtcctctccgtgctccgccacgccgcctgtccggagtccgtcgccttccacttcgtcgcctcctcggcctccccggcgcgccgcctcgcctcgctccgccgtgcgctggcggctgccttccccacgctcccggccaccgtgcatcgcttcgacgcacgcctcgtccggggcaagatctcctcatccgtccggcgcgcgctcgaccagcccctcaactacgcccgcatctacctcgcggacctcctgccgcgctccgtctcccgcgtgctctacctcgactccgacctcctcgtggtcgacgacgtggcccgcctctgggcgaccgacctcggccccgacgccgccctcgntgcccccgagtactgccacgccaactttacctcctatttcaccgacgcgttctggagccaccccgagtacaccgccgtcttcgccaaccggacgcgcgtcccctgctacttcaacaccggggtaatggtcatcgacctggacaggtggcgctccggtgggtacaccgcgaagctggaatactggatggaggtgcagaagcaggaggccaggatttacgagctgggctccctcccgccgtttctcctggtgttcgccggcgaggtgaaagccgtggagcaccggtggaaccagcacgggctcggcggcgacaacgtggcggggcagtgccggcagctgcaccccggtccggttagcctgctgcactggagtgggaaggggaagccgtggctgcggctggacgccgggcggccgtgcccgctcgacgcgctctggatgccctacgacctccttcgccgccgcggcgctcgggacgatctcctcgccgccgtctcctgacaatgctgtccgcgcatcgctgcagggcgatcgatttgctcgcgtccgatcggatcatatgccacggcgcttggctgctccgctcgttccgtcgtcccacgggtcggcgtcggtcaccaagtcacagacacgttggacccacctggacactctcctctccgcatgggtccatgcgcaatggcgttagttggtgtggccctgtcggtactgaagtccgtcggccccactcgttggtggcggatggggatttttggggtgggggccaaggtgaaattcagacatggggctgtgtacagctgttgtttttggc

SEQ ID NO: 39335 - protein, 342 aa, Zea mays subsp. mays
  peptide (1)..(342): Ceres Seq. ID no. 12366274
  misc_feature (1)..(342): NCBI GI NO: 38346630 NR Description: OSJNBa0074L08.24
  misc_feature (1)..(329): NCBI GI NO: 18391493 NR Description: glycosyltransferase family; protein id:At1g13250
  misc_feature (1)..(329): NCBI GI NO: 21536997 NR Description: putative glycosyl transferase
  misc_feature (24)..(329): NCBI GI NO: 34898906 NR Description: putative glycosyl transferase
  misc_feature (23)..(335): NCBI GI NO: 18394719 NR Description: glycosyltransferase family; protein id:At1g19300
  misc_feature (23)..(335): NCBI GI NO: 20466660 NR Description: unknown protein [Arabidopsis thaliana]
  misc_feature (23)..(335): NCBI GI NO: 21537193 NR Description: Avr9/Cf-9 rapidly elicited protein 231
  misc_feature (15)..(329): NCBI GI NO: 15235247 NR Description: predicted glycosyl transferase
  misc_feature (23)..(329): NCBI GI NO: 15230679 NR Description: putative glycosyl transferase
  misc_feature (15)..(329): NCBI GI NO: 21554300 NR Description: putative glycosyl transferase
  misc_feature (178)..(178): Xaa is any aa, unknown or other
MRVLAVFLLGAAFAAAAGGGGELPEFREAPAFRNGAACADAPTIHIAMTLDGTYLRGSLAGVLSVLRHAACPESVAFHFVASSASPARRLASLRRALAAAFPTLPATVHRFDARLVRGKISSSVRRALDQPLNYARIYLADLLPRSVSRVLYLDSDLLVVDDVARLWATDLGPDAALXAPEYCHANFTSYFTDAFWSHPEYTAVFANRTRVPCYFNTGVMVIDLDRWRSGGYTAKLEYWMEVQKQEARIYELGSLPPFLLVFAGEVKAVEHRWNQHGLGGDNVAGQCRQLHPGPVSLLHWSGKGKPWLRLDAGRPCPLDALWMPYDLLRRRGARDDLLAAVS

SEQ ID NO: 39336 - protein, 295 aa, Zea mays subsp. mays
  peptide (1)..(295): Ceres Seq. ID no. 12366275
  misc_feature (1)..(295): NCBI GI NO: 38346630 NR Description: OSJNBa0074L08.24
  misc_feature (1)..(282): NCBI GI NO: 18391493 NR Description: glycosyltransferase family; protein id:At1g13250
  misc_feature (1)..(282): NCBI GI NO: 21536997 NR Description: putative glycosyl transferase
  misc_feature (1)..(282): NCBI GI NO: 34898906 NR Description: putative glycosyl transferase
  misc_feature (1)..(288): NCBI GI NO: 18394719 NR Description: glycosyltransferase family; protein id:At1g19300
  misc_feature (1)..(288): NCBI GI NO: 20466660 NR Description: unknown protein [Arabidopsis thaliana]
  misc_feature (1)..(288): NCBI GI NO: 21537193 NR Description: Avr9/Cf-9 rapidly elicited protein 231
  misc_feature (1)..(282): NCBI GI NO: 15235247 NR Description: predicted glycosyl transferase
  misc_feature (1)..(282): NCBI GI NO: 15230679 NR Description: putative glycosyl transferase
  misc_feature (1)..(282): NCBI GI NO: 21554300 NR Description: putative glycosyl transferase
  misc_feature (131)..(131): Xaa is any aa, unknown or other
MTLDGTYLRGSLAGVLSVLRHAACPESVAFHFVASSASPARRLASLRRALAAAFPTLPATVHRFDARLVRGKISSSVRRALDQPLNYARIYLADLLPRSVSRVLYLDSDLLVVDDVARLWATDLGPDAALXAPEYCHANFTSYFTDAFWSHPEYTAVFANRTRVPCYFNTGVMVIDLDRWRSGGYTAKLEYWMEVQKQEARIYELGSLPPFLLVFAGEVKAVEHRWNQHGLGGDNVAGQCRQLHPGPVSLLHWSGKGKPWLRLDAGRPCPLDALWMPYDLLRRRGARDDLLAAVS

SEQ ID NO: 39337 - DNA, 489 bp, Zea mays subsp. mays
  misc_feature (1)..(489): Ceres Seq. ID no. 1677695
acgaaaatctgacatctcatcttgatccatccagctttgcctcgatcgccggccggtagccatgtcccccacggaagaagccgctggtggtggtctcgacgactatgaccgcttgagcgagctgaaggcgttcgacgacagcaaggccggcgtcaagggcctcgtggacgctggcgtcacgaccatccctgccatcttccgcggccatctccttcaggaagggccgaagtcgcacgggaggaggtggtcgcccagtygaaggctgcagccgagacggtggggttcttccagctggtgaaccacggcgttcccagcgagctcctgtccgagatgctggcgtcggtgaggcggttcaacgaggagccccacgaggtgaagcggccctactacacgcgggacgcacgtcgcaaggtgcggttcaactccaacttcgatctgttccagtcgccggcggccaactggcgcgacacgctcttctgcgaggcagcg

SEQ ID NO: 39338 - protein, 78 aa, Zea mays subsp. mays
  peptide (1)..(78): Ceres Seq. ID no. 1677696
  misc_feature (16)..(49): NCBI GI NO: 40253431 NR Description: putative 2-oxoglutarate-dependent oxygenase
  misc_feature (10)..(51): NCBI GI NO: 31193909 NR Description: putative dioxygenase
  misc_feature (16)..(47): NCBI GI NO: 40253423 NR Description: putative 2-oxoglutarate-dependent oxygenase
  misc_feature (16)..(49): NCBI GI NO: 40253419 NR Description: putative 2-oxoglutarate-dependent oxygenase
  misc_feature (16)..(49): NCBI GI NO: 40253427 NR Description: putative 2-oxoglutarate-dependent oxygenase
  misc_feature (1)..(46): NCBI GI NO: 29123084 NR Description: 2-oxoglutarate-dependent oxygenase [Zea mays]
  misc_feature (13)..(56): NCBI GI NO: 15224730 NR Description: putative dioxygenase; protein id: At2g25450
  misc_feature (14)..(50): NCBI GI NO: 5031283 NR Description: unknown [Prunus armeniaca]
  misc_feature (13)..(46): NCBI GI NO: 119640 NR Description: 1-AMINOCYCLOPROPANE-1-CARBOXYLATE OXIDASE HOMOLOG
  misc_feature (15)..(50): NCBI GI NO: 15224576 NR Description: putative dioxygenase; protein id: At2g30840.1
  misc_feature (66)..(66): Xaa is any aa, unknown or other
MSPTEEAAGGGLDDYDRLSELKAFDDSKAGVKGLVDAGVTTIPAIFRGHLLQEGPKSHGRRWSPSXRLQPRRWGSSSW

SEQ ID NO: 39339 - protein, 53 aa, Zea mays subsp. mays
  peptide (1)..(53): Ceres Seq. ID no. 1677697
  misc_feature (1)..(51): NCBI GI NO: 40253431 NR Description: putative 2-oxoglutarate-dependent oxygenase
  misc_feature (1)..(51): NCBI GI NO: 31193909 NR Description: putative dioxygenase
  misc_feature (1)..(51): NCBI GI NO: 40253423 NR Description: putative 2-oxoglutarate-dependent oxygenase
  misc_feature (1)..(51): NCBI GI NO: 40253419 NR Description: putative 2-oxoglutarate-dependent oxygenase
  misc_feature (1)..(51): NCBI GI NO: 40253427 NR Description: putative 2-oxoglutarate-dependent oxygenase
  misc_feature (1)..(52): NCBI GI NO: 29123084 NR Description: 2-oxoglutarate-dependent oxygenase [Zea mays]
  misc_feature (1)..(52): NCBI GI NO: 15224730 NR Description: putative dioxygenase; protein id: At2g25450
  misc_feature (1)..(52): NCBI GI NO: 5031283 NR Description: unknown [Prunus armeniaca]
  misc_feature (1)..(52): NCBI GI NO: 119640 NR Description: 1-AMINOCYCLOPROPANE-1-CARBOXYLATE OXIDASE HOMOLOG
  misc_feature (1)..(50): NCBI GI NO: 15224576 NR Description: putative dioxygenase; protein id: At2g30840.1
MLASVRRFNEEPHEVKRPYYTRDARRKVRFNSNFDLFQSPAANWRDTLFCEAA

SEQ ID NO: 39340 - DNA, 2290 bp, Zea mays subsp. mays
  misc_feature (1)..(2290): Ceres Seq. ID no. 12375158
gcacgagaccattacctagaacatcctaatcgaaaaaccagtcagcactcagcacacagagtccgcctccgccgcggctccggcgcccgcatccgtctcaggagtcccttctccccgcgggtggagacatcttgatcatttctgagattaaactgatgatgctgatgctcgtttagttatcttggtttggagatatatcagatatgggtgatcggaatcatggacgctctctccctctactgctctatctacatcttttgctgccaatacttccgtttgctatggcagatatagcctccgagaagcaagcactccttgcttttgcctctgcagtctaccatggcaacaaactgaattggagccaaaatatcccagtgtgctcatggcatggtgtgacatgctcactggatcgatcgtgtatattggcccttagggtgccaggtgctggtttgattggtaccattcctgctgatactcttggcaggcttgtgtccctccaagttttaagcatgaggtctaaccgtttgagtggaagccttccgaacgatgttgtctcacttccttctttacaagccatatttgttcagcacaacgaactgtcaggagacttgcctccatttctctctccaaaccttaatacccttgatctctcttacaactcctttacaggacaaatcccatcaggtttgcagaatcttaccaaattgtctgtcttgaatttagcagaaaattccctgtccgggccgattccggatctcaaacttcctagcttaagacagctaaatctgagcaacaatgaactgaatggttcgattcctccctttttccaaatcttctcaaatagttccttcctagggaactctggattgtgtggaccgccgctaactgaatgttcttttctatcttcaccaacaccgtcgcaagtgccttcaccaccaaaattaccaaatcatgagaagaaggctggcaatggcttggtaatcgtggctgttgctgggagctttgtcatatttctgctagctgctgtgatgttcactatgtgcatttcaaagaggaaggagaagaaagacgaagcgggttacaacggtaaggttactgatggtggaaggattgagaagcgcaaagaggatctcagcagtggcgtccaaatggcgcataagaacaagttagttttcttggagggatgcagttacaactttgacttggaggacttgctgagagcttctgctgaagttctcgggaaagggagctatggaactgcctacaaggctatactcgaggatggctctactgtggtagtcaagaggctaaaggatgtcgtggcagggaagaaagaatttgagcagcagatggagctcatagggagggtaggtaaacatgcaaacatcgcgcctattcgtgcttactactactcgaaggatgagaagcttgttgtttatgagtatattggtagaggcagcttctcagctctgttgcatggtatcaagggcgtgtgtgagaagaccccattagattggaacacaaggatgaagattatactcggaacagcacgcggcctcgagcacatccattcagaaggcggctccaggctcgcacacggcaacatcaagtcaaccaacgttctgctcgacggagaccacaacccttacgtctcagactacgggctgagctcgttgacgagccttccgatcaccacttcccgagctgtcgctggctaccgagctcaggagaccttcgaatcgaggaagttcacccacaagtccgacgtgtacggtttcggcgtcctcctcatggagacgctgacgggcaaggccccgcttcagtcacagggtcaggacgacgccgtcgacctaccgaggtgggtgcattcggtggtccgcgaggagtggaccgctgaggtgtttgacgtccagctgatgaagtatcccaacatagaagacgagctggtccagatgctccgtatcgccatggcgtgcacggcgtggtctcccgaccggcgtccgacgatggcgcaggtggttaggatggtggaggagctccggcactctgcttccgggagtcgcgctctctccgttggcagtcccaaggaatccagccctctgtcagcctgaattgtggttctgattcagaattcgtgtatccatgacatcgatgatcgatggtatcctgcatgtggttcacggtgcacacgttgtctgcctcgtcagatacttcgtactgctgtaactttggttcaatggaatgcttaagaaacaaggtcggaataggcgaatagctattttcgtctttc

SEQ ID NO: 39341 - protein, 635 aa, Zea mays subsp. mays
  peptide (1)..(635): Ceres Seq. ID no. 12375159
  misc_feature (10)..(634): NCBI GI NO: 33146664 NR Description: putative receptor-like protein kinase
  misc_feature (10)..(631): NCBI GI NO: 34909286 NR Description: putative receptor-like protein kinase
  misc_feature (12)..(631): NCBI GI NO: 15237162 NR Description: leucine-rich repeat transmembrane protein kinase
  misc_feature (28)..(618): NCBI GI NO: 15231955 NR Description: leucine-rich repeat transmembrane protein kinase
  misc_feature (5)..(613): NCBI GI NO: 15238453 NR Description: leucine-rich repeat transmembrane protein kinase
  misc_feature (28)..(630): NCBI GI NO: 15225780 NR Description: leucine-rich repeat transmembrane protein kinase
  misc_feature (28)..(630): NCBI GI NO: 15292873 NR Description: putative receptor protein kinase
  misc_feature (10)..(626): NCBI GI NO: 34904136 NR Description: unnamed protein product
  misc_feature (14)..(634): NCBI GI NO: 15236593 NR Description: leucine-rich repeat transmembrane protein kinase
  misc_feature (315)..(616): NCBI GI NO: 13324792 NR Description: putative receptor kinase [Oryza sativa]
MGDRNHGRSLPLLLYLHLLLPILPFAMADIASEKQALLAFASAVYHGNKLNWSQNIPVCSWHGVTCSLDRSCILALRVPGAGLIGTIPADTLGRLVSLQVLSMRSNRLSGSLPNDVVSLPSLQAIFVQHNELSGDLPPFLSPNLNTLDLSYNSFTGQIPSGLQNLTKLSVLNLAENSLSGPIPDLKLPSLRQLNLSNNELNGSIPPFFQIFSNSSFLGNSGLCGPPLTECSFLSSPTPSQVPSPPKLPNHEKKAGNGLVIVAVAGSFVIFLLAAVMFTMCISKRKEKKDEAGYNGKVTDGGRIEKRKEDLSSGVQMAHKNKLVFLEGCSYNFDLEDLLRASAEVLGKGSYGTAYKAILEDGSTVVVKRLKDVVAGKKEFEQQMELIGRVGKHANIAPIRAYYYSKDEKLVVYEYIGRGSFSALLHGIKGVCEKTPLDWNTRMKIILGTARGLEHIHSEGGSRLAHGNIKSTNVLLDGDHNPYVSDYGLSSLTSLPITTSRAVAGYRAQETFESRKFTHKSDVYGFGVLLMETLTGKAPLQSQGQDDAVDLPRWVHSVVREEWTAEVFDVQLMKYPNIEDELVQMLRIAMACTAWSPDRRPTMAQVVRMVEELRHSASGSRALSVGSPKESSPLSA

SEQ ID NO: 39342 - protein, 609 aa, Zea mays subsp. mays
  peptide (1)..(609): Ceres Seq. ID no. 12375160
  misc_feature (1)..(608): NCBI GI NO: 33146664 NR Description: putative receptor-like protein kinase
  misc_feature (1)..(605): NCBI GI NO: 34909286 NR Description: putative receptor-like protein kinase
  misc_feature (1)..(605): NCBI GI NO: 15237162 NR Description: leucine-rich repeat transmembrane protein kinase
  misc_feature (2)..(592): NCBI GI NO: 15231955 NR Description: leucine-rich repeat transmembrane protein kinase
  misc_feature (1)..(587): NCBI GI NO: 15238453 NR Description: leucine-rich repeat transmembrane protein kinase
  misc_feature (2)..(604): NCBI GI NO: 15225780 NR Description: leucine-rich repeat transmembrane protein kinase
  misc_feature (2)..(604): NCBI GI NO: 15292873 NR Description: putative receptor protein kinase
  misc_feature (1)..(600): NCBI GI NO: 34904136 NR Description: unnamed protein product
  misc_feature (1)..(608): NCBI GI NO: 15236593 NR Description: leucine-rich repeat transmembrane protein kinase
  misc_feature (289)..(590): NCBI GI NO: 13324792 NR Description: putative receptor kinase [Oryza sativa]
MADIASEKQALLAFASAVYHGNKLNWSQNIPVCSWHGVTCSLDRSCILALRVPGAGLIGTIPADTLGRLVSLQVLSMRSNRLSGSLPNDVVSLPSLQAIFVQHNELSGDLPPFLSPNLNTLDLSYNSFTGQIPSGLQNLTKLSVLNLAENSLSGPIPDLKLPSLRQLNLSNNELNGSIPPFFQIFSNSSFLGNSGLCGPPLTECSFLSSPTPSQVPSPPKLPNHEKKAGNGLVIVAVAGSFVIFLLAAVMFTMCISKRKEKKDEAGYNGKVTDGGRIEKRKEDLSSGVQMAHKNKLVFLEGCSYNFDLEDLLRASAEVLGKGSYGTAYKAILEDGSTVVVKRLKDVVAGKKEFEQQMELIGRVGKHANIAPIRAYYYSKDEKLVVYEYIGRGSFSALLHGIKGVCEKTPLDWNTRMKIILGTARGLEHIHSEGGSRLAHGNIKSTNVLLDGDHNPYVSDYGLSSLTSLPITTSRAVAGYRAQETFESRKFTHKSDVYGFGVLLMETLTGKAPLQSQGQDDAVDLPRWVHSVVREEWTAEVFDVQLMKYPNIEDELVQMLRIAMACTAWSPDRRPTMAQVVRMVEELRHSASGSRALSVGSPKESSPLSA

SEQ ID NO: 39343 - protein, 533 aa, Zea mays subsp. mays
  peptide (1)..(533): Ceres Seq. ID no. 12375161
  misc_feature (1)..(532): NCBI GI NO: 33146664 NR Description: putative receptor-like protein kinase
  misc_feature (1)..(529): NCBI GI NO: 34909286 NR Description: putative receptor-like protein kinase
  misc_feature (1)..(529): NCBI GI NO: 15237162 NR Description: leucine-rich repeat transmembrane protein kinase
  misc_feature (1)..(516): NCBI GI NO: 15231955 NR Description: leucine-rich repeat transmembrane protein kinase
  misc_feature (1)..(511): NCBI GI NO: 15238453 NR Description: leucine-rich repeat transmembrane protein kinase
  misc_feature (1)..(528): NCBI GI NO: 15225780 NR Description: leucine-rich repeat transmembrane protein kinase
  misc_feature (1)..(528): NCBI GI NO: 15292873 NR Description: putative receptor protein kinase
  misc_feature (1)..(524): NCBI GI NO: 34904136 NR Description: unnamed protein product
  misc_feature (1)..(532): NCBI GI NO: 15236593 NR Description: leucine-rich repeat transmembrane protein kinase
  misc_feature (213)..(514): NCBI GI NO: 13324792 NR Description: putative receptor kinase [Oryza sativa]
MRSNRLSGSLPNDVVSLPSLQAIFVQHNELSGDLPPFLSPNLNTLDLSYNSFTGQIPSGLQNLTKLSVLNLAENSLSGPIPDLKLPSLRQLNLSNNELNGSIPPFFQIFSNSSFLGNSGLCGPPLTECSFLSSPTPSQVPSPPKLPNHEKKAGNGLVIVAVAGSFVIFLLAAVMFTMCISKRKEKKDEAGYNGKVTDGGRIEKRKEDLSSGVQMAHKNKLVFLEGCSYNFDLEDLLRASAEVLGKGSYGTAYKAILEDGSTVVVKRLKDVVAGKKEFEQQMELIGRVGKHANIAPIRAYYYSKDEKLVVYEYIGRGSFSALLHGIKGVCEKTPLDWNTRMKIILGTARGLEHIHSEGGSRLAHGNIKSTNVLLDGDHNPYVSDYGLSSLTSLPITTSRAVAGYRAQETFESRKFTHKSDVYGFGVLLMETLTGKAPLQSQGQDDAVDLPRWVHSVVREEWTAEVFDVQLMKYPNIEDELVQMLRIAMACTAWSPDRRPTMAQVVRMVEELRHSASGSRALSVGSPKESSPLSA

SEQ ID NO: 39344 - DNA, 3580 bp, Zea mays subsp. mays
  misc_feature (1)..(3580): Ceres Seq. ID no. 12366227
gcacgagaccattacctagaacatcctaatcgaaaaatcaatctctttcgctgcttgctttccattgaaaatgatgtgttctcccacaccctgcaacctgaaggcaacatgcctagcacaaaattctcccaaggattcccatggtttcctagcccaagatgtgcatggagccttgcttcttgatctccagcagaacagaagtgaagcactgtggccttgcatgcccaagttttgttgttagcgttaccaagatcatagctaccactgatgcagtgcgttcgcgatgaactgtgtagagcaggttctgaagagagtgttacctgcatctgcatggaagagggaggagacccgcagcttccgagcatctccgtggcacgcaccacgtccgaaggcgcgggggccgtcgacttggatctccttgagcagctactgtccggcgacaacggttggctcgaggtggtctcgcgctcgcccaactcggtagcgtttcctccaccctcggccttcttctcggctgacgcgacggccaccacagtgacgacgacggcggcgccggccgcgaacgccagctggttgattcagacgggcggcgcgagcaccccctccgtgcgggagcggttcagccaggccctgtcctacatccgtgatacgcagagcgacggcgacgtcctcgtgcagctctgggtgccggtcaaccgcgatgacgggaagctggtgctgaccaccagcggtcagccgttcacgctcgaccaccgctccgacagcctcatccggttcagggaggtgtccaccaagtaccagttcccagccgacgttaggtcaggggagtcaccagggttgccagggagggtcttcatcggcaggctccctgagtggtcgccggacatcaggtgcttcaccagctacgagtacgccagggtgacagatgcaaagtacctcgatgtccacggcaccatggggctgccagtgttcgagaaaagaagttacagttgcctgggcgttatcgagctgatcatgacaaagcagaagctcaacttcacctctgagctcaacaccatctgcagtgctctacaggcagttaatctcagaagtacagaagtttcgagcattccacgcaaaaagtttagcactgcttcctacaaagatgctttaccagagatactggaggtcctgagggcagcctgcttgacccacaagctgccattagctcagacatgggtcacatgtactcaacaagggaaacgaggcagccgacattctgacgagaactacaggtactgcatttccaccatcgacgaagcatgctttgtgaatgaagccgagatgcggggcttccatgaggcctgctccgaacaccatctgctgcgtggcgagggggtggcagggaaggccctcacgacaaaccagccatgcttcctgccggacattggatcctcaactaaattggaataccccttgtctcaccatgctaagatcttcaggttaaaaggtgcagtggcgatccgactgcggtgcacacgcactgggatagcagacttcgtgctggaattctttcttccaacagattgtgaagcactggaggagcagaagacagtgctggactccttgtcaggcaccatgcgaagtgtttgccagaccctacgtgtggtcacagatagagagatggaaggcgaagcggcgctggaaatgaacgagctgaactcttttactcctcctgagaaggacaaagatgagttgtcctttggaggcaattcagcagatcgtagaggggcctcttggacaagtctggcaggaacttcacagcaagaacccgagttagctgcattgcggatgcatggaacgttctcacctgtggggcagggtccatctctatctggtgttcaggcaactgctgaaggcagtaagacaaaaaggcgcacaaaggccgagaagaccgttagtttgcaggttcttcggcagtacttcgctggtagcctcaaagatgcagcgagaagccttggagtgtgtcccacgaccctcaaaagaatatgcaggcaacatggtataacccgctggccatcacgaaagatcaagaaggtagaccactctctaagaaagctccaacagatcattgattcggttcatggtgcagagacagctttccagctaaacaccctgtacaaggatctcacagacacctcaatatcatctgacaacaatttgtcaggaagtgtcacggttcctccaactaaccagagcaatctcaccgacttcaacaagcaccaaccccacaagtcaagtagcaatatgccatcaacttcacactcacactcctcatgcagccacggttctcagtcaagcccctcgtgtagcgttggtgcaacagaacatgcacaacagggtataattgatctgatgaagtcagaaaatcctgtgaaagacagctctattcagactatgcaaacagaaaacacttcattatatgagcatttctcagttcatgaggctccaattgatcttctacaggatgttactgaaaaggctaatggtgcacatcattcttctcgaagcctgtcatcccccaaccccaagcagaacacagatgcaaatatgagagtaaaggcaacatttggctcagaaaaggtgagattccgactaaacccagagtgcaattttcaaggactgaagcatgagctagcgaaacgtttgagtatagtagacacaaaccccttggttttaaagtacttggatgatgattcagaatgggtcttgatgacatgtgatgcagatctgcaggagtgccttcatgtatacaaactagcagatatccaaacaatcaaaatttcagttcatttagctgttagtccagctacaagggtcacagctggtcacactggtttgtcatgacaacagtatgagcctcaccactttgtgaggtttaatcaaattcaaccaggatcacatggttttgtgcaggggaaaccaaagattccaggagtccagggttggtagctgtgcaatactgcaatgtactatgtaccaccacgtcccagttctactgttagatcaattagtcttgtttctgatgctcaggttaggaactaatgatcaaacaagaatacttgacaatgagagagtcaagaaatcaggataaacagaagtaagcatgcattgcttgtaaatacttattgatgaacctgaatctctgaatgacaatgcaattgattgaattaatagggtgacgtatctacaaatcagatttgctccaactccaagtatgttttgtttctttgagtgctgatgtgcaacaatcattgatggcttctttctgataattgatcagctacaattgtcccttaagatcacagcattccttcatcgcctgagcgatcagcatgctctgttcaatgcacatgaaattctgcttctgaaattgtaattttctgcagcaaggattagatctagaataggatgataggatacttagtttgttcaatatgtttgtccattgcaaaaaaaataaaaaatgaatggtacactgaattatgggcctctttgaaagaacgtctgctgctgtagacattatagattgttttccttt

SEQ ID NO: 39345 - protein, 872 aa, Zea mays subsp. mays
  peptide (1)..(872): Ceres Seq. ID no. 12366228
  misc_feature (553)..(604): Pfam Name: Pfam Description:  RWP-RK domain
  misc_feature (444)..(872): NCBI GI NO: 20503001 NR Description: Putataive nodule inception protein
  misc_feature (98)..(520): NCBI GI NO: 20503001 NR Description: Putataive nodule inception protein
  misc_feature (99)..(728): NCBI GI NO: 15217991 NR Description: nodule inception protein, putative
  misc_feature (682)..(852): NCBI GI NO: 15217991 NR Description: nodule inception protein, putative
  misc_feature (60)..(854): NCBI GI NO: 33468530 NR Description: NIN-like protein 1
  misc_feature (99)..(689): NCBI GI NO: 15223014 NR Description: hypothetical protein; protein id: At1g76350.1
  misc_feature (746)..(859): NCBI GI NO: 15223014 NR Description: hypothetical protein; protein id: At1g76350.1
  misc_feature (60)..(476): NCBI GI NO: 30690272 NR Description: RWP-RK domain containing protein
  misc_feature (484)..(871): NCBI GI NO: 30690272 NR Description: RWP-RK domain containing protein
  misc_feature (415)..(872): NCBI GI NO: 30679885 NR Description: RWP-RK domain containing protein
MQCVRDELCRAGSEESVTCICMEEGGDPQLPSISVARTTSEGAGAVDLDLLEQLLSGDNGWLEVVSRSPNSVAFPPPSAFFSADATATTVTTTAAPAANASWLIQTGGASTPSVRERFSQALSYIRDTQSDGDVLVQLWVPVNRDDGKLVLTTSGQPFTLDHRSDSLIRFREVSTKYQFPADVRSGESPGLPGRVFIGRLPEWSPDIRCFTSYEYARVTDAKYLDVHGTMGLPVFEKRSYSCLGVIELIMTKQKLNFTSELNTICSALQAVNLRSTEVSSIPRKKFSTASYKDALPEILEVLRAACLTHKLPLAQTWVTCTQQGKRGSRHSDENYRYCISTIDEACFVNEAEMRGFHEACSEHHLLRGEGVAGKALTTNQPCFLPDIGSSTKLEYPLSHHAKIFRLKGAVAIRLRCTRTGIADFVLEFFLPTDCEALEEQKTVLDSLSGTMRSVCQTLRVVTDREMEGEAALEMNELNSFTPPEKDKDELSFGGNSADRRGASWTSLAGTSQQEPELAALRMHGTFSPVGQGPSLSGVQATAEGSKTKRRTKAEKTVSLQVLRQYFAGSLKDAARSLGVCPTTLKRICRQHGITRWPSRKIKKVDHSLRKLQQIIDSVHGAETAFQLNTLYKDLTDTSISSDNNLSGSVTVPPTNQSNLTDFNKHQPHKSSSNMPSTSHSHSSCSHGSQSSPSCSVGATEHAQQGIIDLMKSENPVKDSSIQTMQTENTSLYEHFSVHEAPIDLLQDVTEKANGAHHSSRSLSSPNPKQNTDANMRVKATFGSEKVRFRLNPECNFQGLKHELAKRLSIVDTNPLVLKYLDDDSEWVLMTCDADLQECLHVYKLADIQTIKISVHLAVSPATRVTAGHTGLS

SEQ ID NO: 39346 - protein, 851 aa, Zea mays subsp. mays
  peptide (1)..(851): Ceres Seq. ID no. 12366229
  misc_feature (532)..(583): Pfam Name: Pfam Description:  RWP-RK domain
  misc_feature (423)..(851): NCBI GI NO: 20503001 NR Description: Putataive nodule inception protein
  misc_feature (77)..(499): NCBI GI NO: 20503001 NR Description: Putataive nodule inception protein
  misc_feature (78)..(707): NCBI GI NO: 15217991 NR Description: nodule inception protein, putative
  misc_feature (661)..(831): NCBI GI NO: 15217991 NR Description: nodule inception protein, putative
  misc_feature (39)..(833): NCBI GI NO: 33468530 NR Description: NIN-like protein 1
  misc_feature (78)..(668): NCBI GI NO: 15223014 NR Description: hypothetical protein; protein id: At1g76350.1
  misc_feature (725)..(838): NCBI GI NO: 15223014 NR Description: hypothetical protein; protein id: At1g76350.1
  misc_feature (39)..(455): NCBI GI NO: 30690272 NR Description: RWP-RK domain containing protein
  misc_feature (463)..(850): NCBI GI NO: 30690272 NR Description: RWP-RK domain containing protein
  misc_feature (394)..(851): NCBI GI NO: 30679885 NR Description: RWP-RK domain containing protein
MEEGGDPQLPSISVARTTSEGAGAVDLDLLEQLLSGDNGWLEVVSRSPNSVAFPPPSAFFSADATATTVTTTAAPAANASWLIQTGGASTPSVRERFSQALSYIRDTQSDGDVLVQLWVPVNRDDGKLVLTTSGQPFTLDHRSDSLIRFREVSTKYQFPADVRSGESPGLPGRVFIGRLPEWSPDIRCFTSYEYARVTDAKYLDVHGTMGLPVFEKRSYSCLGVIELIMTKQKLNFTSELNTICSALQAVNLRSTEVSSIPRKKFSTASYKDALPEILEVLRAACLTHKLPLAQTWVTCTQQGKRGSRHSDENYRYCISTIDEACFVNEAEMRGFHEACSEHHLLRGEGVAGKALTTNQPCFLPDIGSSTKLEYPLSHHAKIFRLKGAVAIRLRCTRTGIADFVLEFFLPTDCEALEEQKTVLDSLSGTMRSVCQTLRVVTDREMEGEAALEMNELNSFTPPEKDKDELSFGGNSADRRGASWTSLAGTSQQEPELAALRMHGTFSPVGQGPSLSGVQATAEGSKTKRRTKAEKTVSLQVLRQYFAGSLKDAARSLGVCPTTLKRICRQHGITRWPSRKIKKVDHSLRKLQQIIDSVHGAETAFQLNTLYKDLTDTSISSDNNLSGSVTVPPTNQSNLTDFNKHQPHKSSSNMPSTSHSHSSCSHGSQSSPSCSVGATEHAQQGIIDLMKSENPVKDSSIQTMQTENTSLYEHFSVHEAPIDLLQDVTEKANGAHHSSRSLSSPNPKQNTDANMRVKATFGSEKVRFRLNPECNFQGLKHELAKRLSIVDTNPLVLKYLDDDSEWVLMTCDADLQECLHVYKLADIQTIKISVHLAVSPATRVTAGHTGLS

SEQ ID NO: 39347 - protein, 643 aa, Zea mays subsp. mays
  peptide (1)..(643): Ceres Seq. ID no. 12366230
  misc_feature (324)..(375): Pfam Name: Pfam Description:  RWP-RK domain
  misc_feature (215)..(643): NCBI GI NO: 20503001 NR Description: Putataive nodule inception protein
  misc_feature (1)..(291): NCBI GI NO: 20503001 NR Description: Putataive nodule inception protein
  misc_feature (1)..(499): NCBI GI NO: 15217991 NR Description: nodule inception protein, putative
  misc_feature (453)..(623): NCBI GI NO: 15217991 NR Description: nodule inception protein, putative
  misc_feature (1)..(625): NCBI GI NO: 33468530 NR Description: NIN-like protein 1
  misc_feature (1)..(460): NCBI GI NO: 15223014 NR Description: hypothetical protein; protein id: At1g76350.1
  misc_feature (517)..(630): NCBI GI NO: 15223014 NR Description: hypothetical protein; protein id: At1g76350.1
  misc_feature (1)..(247): NCBI GI NO: 30690272 NR Description: RWP-RK domain containing protein
  misc_feature (255)..(642): NCBI GI NO: 30690272 NR Description: RWP-RK domain containing protein
  misc_feature (186)..(643): NCBI GI NO: 30679885 NR Description: RWP-RK domain containing protein
MGLPVFEKRSYSCLGVIELIMTKQKLNFTSELNTICSALQAVNLRSTEVSSIPRKKFSTASYKDALPEILEVLRAACLTHKLPLAQTWVTCTQQGKRGSRHSDENYRYCISTIDEACFVNEAEMRGFHEACSEHHLLRGEGVAGKALTTNQPCFLPDIGSSTKLEYPLSHHAKIFRLKGAVAIRLRCTRTGIADFVLEFFLPTDCEALEEQKTVLDSLSGTMRSVCQTLRVVTDREMEGEAALEMNELNSFTPPEKDKDELSFGGNSADRRGASWTSLAGTSQQEPELAALRMHGTFSPVGQGPSLSGVQATAEGSKTKRRTKAEKTVSLQVLRQYFAGSLKDAARSLGVCPTTLKRICRQHGITRWPSRKIKKVDHSLRKLQQIIDSVHGAETAFQLNTLYKDLTDTSISSDNNLSGSVTVPPTNQSNLTDFNKHQPHKSSSNMPSTSHSHSSCSHGSQSSPSCSVGATEHAQQGIIDLMKSENPVKDSSIQTMQTENTSLYEHFSVHEAPIDLLQDVTEKANGAHHSSRSLSSPNPKQNTDANMRVKATFGSEKVRFRLNPECNFQGLKHELAKRLSIVDTNPLVLKYLDDDSEWVLMTCDADLQECLHVYKLADIQTIKISVHLAVSPATRVTAGHTGLS

SEQ ID NO: 39348 - DNA, 2511 bp, Zea mays subsp. mays
  misc_feature (1)..(2511): Ceres Seq. ID no. 12361105
gcacgagaccattacctagaacatcctaatcgaaaaaccaatccgactctcgtccctccccgactcaccccactgcccagccgcacgcgccgccgtgtgttcgcgctctctcccactgtgtctgtgacgactgggtaggctacagccgccgcccgtcgccaggtgccgatcccttcgccgacgaagagcatccaccaggctccggccaagggcgtgatggcggctgtagggagcttgcagccgggggtggagactctacatgtgcaggattacaaggacgcgcctccagccaaggctgtggcggccgcggtagagagcttgcagccggcgatggagagcctacatgtgcaggaattcaaggacgcggctccggctaagggcgtttccgccgctgctgtagggagcttgcagccggggatggagaacctgcaggtgcaggattacaaggacgctagcatgtattatggtgcttacccggcttatccctatggagcaccctatggtggctggggggagtactccacatacttgagccatgatggagcacagacaccaactgctggcgcgtatgctgacatgtactatggccatgctgcatatggtcatatttatgggtctcagaattaccagtatccatcgacctacagcaagcaacagaattccactgccaagctgtcgtccaatggtaaaagtgagaaattggctccagctccggaaggggatgtctccactattgttgttgatgaggtgaaagtcctgaaaaatccaaacccgaccctgaaggcagacaggaatgcaccaggttccaatggttcatatggccgatctagtgtgcgttctggtaactatcagaaccagactagttggtcacactatccatattatagtagtgagatgttctctgacaagcagcaaaagtttaccagcaatcacaattcgactgctcccaatgataaaaccaaggggcagtcgaggaaccaaaacacgagacagtatcctcatctcatgggtctgcaaacaccaacttccccatcagtttactcagctaatggaatatatcggtatgatggcagctatggacctagcctttggtatggatcacacatgtatagttctgggttatatggtggatggaattcactgtatgatgggaagtacagaaccagaggaagatgtaataatggctattatgcttatggtaatggaagccttgatggctttaatgagctgaaaagagggccaagaagtgggatgtacacaaaccagctggggcttggagctactactgaagtaccagcaaaagagcaggaccttctgtctgctaatggttcacatcctgccatgaaggaccagtataatcgggctgactttgcggaaacatactcagacgcaaaattcttcattatcaaatcatacagtgaagacgatgttcacaagagcgtaaagtacaatgtgtgggctagcactccaaatggtaataagaaacttgatgctgcctatcaagaggctaaagaaaaatcaagcgaaactcctgttttccttcttttctctgtgaatgcaagtggccagtttgttgggcttgctgagatggtgggtcgtgttgattttaacaaaacagtagatcattggcaacaggacaagtggactggttgtttccctgtcaagtggcacattgtgaaggatgttccaaacagtttgctgaagcacatcattctcgagaacaatgaaaacaagccagtgacaaacagcagagatacacatgaggtgaagcttgagcaaggccttcaagtgcttaaggttttcaaggatcatgtgtgcaagacatctatactggatgactttggcttttacgataatcgtgagaagatgatgcaatataggaaagcaaagcagcagcagtcactgaaaaaggtcatcgatgtgaaggtgcctaacgccactgacgcagatacaagtctcgtaggaactggatcaacggaactcaccaatgttgaggctgatgtcttgaacaaagagctttcattagacaaagcagtagagaaaaacgaggagaaaggaaatgatgtcgccccacaggacctgaaatcatcagctgagaagtcggcaagcccaaatggctgttaatttttttttttttggttagctcggccattgacagtggtatggggcgggaacctgaggctgggggttgtttgaggaaatcctgagatcccattgagcttgtttcttgcccttgttttctatagttcatagaggattagttagttgcttgtgtgtttgggtgataggtgaggtcagtgtcctggcatggcaggtatttaggaatagaaggacgattaactggggtttacaatggtggttcatgggtttgaggttgtgtttccatctatttgcctttcccctctctatattccagttcctacctctctagattctggacaaacgtagtgcttatttaatgctggctggtttaagaacctgaaatggacaaaggaatccaatcaagtgttt

SEQ ID NO: 39349 - protein, 635 aa, Zea mays subsp. mays
  peptide (1)..(635): Ceres Seq. ID no. 12361106
  misc_feature (442)..(532): Pfam Name: Pfam Description:  YT521-B-like family
  misc_feature (51)..(635): NCBI GI NO: 34395023 NR Description: high-glucose-regulated protein 8-like
  misc_feature (83)..(615): NCBI GI NO: 18087662 NR Description: putative RNA-binding protein [Oryza sativa]
  misc_feature (140)..(591): NCBI GI NO: 22773231 NR Description: Putative RNA-binding protein
  misc_feature (80)..(570): NCBI GI NO: 18405397 NR Description: expressed protein; protein id: At1g55500
  misc_feature (80)..(565): NCBI GI NO: 25372787 NR Description: Rubisco subunit binding-protein beta subunit
  misc_feature (83)..(580): NCBI GI NO: 25084169 NR Description: Unknown protein [Arabidopsis thaliana]
  misc_feature (150)..(612): NCBI GI NO: 30697464 NR Description: expressed protein [Arabidopsis thaliana]
  misc_feature (150)..(612): NCBI GI NO: 15912287 NR Description: AT5g61020/maf19_20 [Arabidopsis thaliana]
  misc_feature (273)..(612): NCBI GI NO: 30697466 NR Description: expressed protein [Arabidopsis thaliana]
  misc_feature (83)..(580): NCBI GI NO: 30682679 NR Description: expressed protein [Arabidopsis thaliana]
MAAVGSLQPGVETLHVQDYKDAPPAKAVAAAVESLQPAMESLHVQEFKDAAPAKGVSAAAVGSLQPGMENLQVQDYKDASMYYGAYPAYPYGAPYGGWGEYSTYLSHDGAQTPTAGAYADMYYGHAAYGHIYGSQNYQYPSTYSKQQNSTAKLSSNGKSEKLAPAPEGDVSTIVVDEVKVLKNPNPTLKADRNAPGSNGSYGRSSVRSGNYQNQTSWSHYPYYSSEMFSDKQQKFTSNHNSTAPNDKTKGQSRNQNTRQYPHLMGLQTPTSPSVYSANGIYRYDGSYGPSLWYGSHMYSSGLYGGWNSLYDGKYRTRGRCNNGYYAYGNGSLDGFNELKRGPRSGMYTNQLGLGATTEVPAKEQDLLSANGSHPAMKDQYNRADFAETYSDAKFFIIKSYSEDDVHKSVKYNVWASTPNGNKKLDAAYQEAKEKSSETPVFLLFSVNASGQFVGLAEMVGRVDFNKTVDHWQQDKWTGCFPVKWHIVKDVPNSLLKHIILENNENKPVTNSRDTHEVKLEQGLQVLKVFKDHVCKTSILDDFGFYDNREKMMQYRKAKQQQSLKKVIDVKVPNATDADTSLVGTGSTELTNVEADVLNKELSLDKAVEKNEEKGNDVAPQDLKSSAEKSASPNGC

SEQ ID NO: 39350 - protein, 597 aa, Zea mays subsp. mays
  peptide (1)..(597): Ceres Seq. ID no. 12361107
  misc_feature (404)..(494): Pfam Name: Pfam Description:  YT521-B-like family
  misc_feature (13)..(597): NCBI GI NO: 34395023 NR Description: high-glucose-regulated protein 8-like
  misc_feature (45)..(577): NCBI GI NO: 18087662 NR Description: putative RNA-binding protein [Oryza sativa]
  misc_feature (102)..(553): NCBI GI NO: 22773231 NR Description: Putative RNA-binding protein
  misc_feature (42)..(532): NCBI GI NO: 18405397 NR Description: expressed protein; protein id: At1g55500
  misc_feature (42)..(527): NCBI GI NO: 25372787 NR Description: Rubisco subunit binding-protein beta subunit
  misc_feature (45)..(542): NCBI GI NO: 25084169 NR Description: Unknown protein [Arabidopsis thaliana]
  misc_feature (112)..(574): NCBI GI NO: 30697464 NR Description: expressed protein [Arabidopsis thaliana]
  misc_feature (112)..(574): NCBI GI NO: 15912287 NR Description: AT5g61020/maf19_20 [Arabidopsis thaliana]
  misc_feature (235)..(574): NCBI GI NO: 30697466 NR Description: expressed protein [Arabidopsis thaliana]
  misc_feature (45)..(542): NCBI GI NO: 30682679 NR Description: expressed protein [Arabidopsis thaliana]
MESLHVQEFKDAAPAKGVSAAAVGSLQPGMENLQVQDYKDASMYYGAYPAYPYGAPYGGWGEYSTYLSHDGAQTPTAGAYADMYYGHAAYGHIYGSQNYQYPSTYSKQQNSTAKLSSNGKSEKLAPAPEGDVSTIVVDEVKVLKNPNPTLKADRNAPGSNGSYGRSSVRSGNYQNQTSWSHYPYYSSEMFSDKQQKFTSNHNSTAPNDKTKGQSRNQNTRQYPHLMGLQTPTSPSVYSANGIYRYDGSYGPSLWYGSHMYSSGLYGGWNSLYDGKYRTRGRCNNGYYAYGNGSLDGFNELKRGPRSGMYTNQLGLGATTEVPAKEQDLLSANGSHPAMKDQYNRADFAETYSDAKFFIIKSYSEDDVHKSVKYNVWASTPNGNKKLDAAYQEAKEKSSETPVFLLFSVNASGQFVGLAEMVGRVDFNKTVDHWQQDKWTGCFPVKWHIVKDVPNSLLKHIILENNENKPVTNSRDTHEVKLEQGLQVLKVFKDHVCKTSILDDFGFYDNREKMMQYRKAKQQQSLKKVIDVKVPNATDADTSLVGTGSTELTNVEADVLNKELSLDKAVEKNEEKGNDVAPQDLKSSAEKSASPNGC

SEQ ID NO: 39351 - protein, 568 aa, Zea mays subsp. mays
  peptide (1)..(568): Ceres Seq. ID no. 12361108
  misc_feature (375)..(465): Pfam Name: Pfam Description:  YT521-B-like family
  misc_feature (1)..(568): NCBI GI NO: 34395023 NR Description: high-glucose-regulated protein 8-like
  misc_feature (16)..(548): NCBI GI NO: 18087662 NR Description: putative RNA-binding protein [Oryza sativa]
  misc_feature (73)..(524): NCBI GI NO: 22773231 NR Description: Putative RNA-binding protein
  misc_feature (13)..(503): NCBI GI NO: 18405397 NR Description: expressed protein; protein id: At1g55500
  misc_feature (13)..(498): NCBI GI NO: 25372787 NR Description: Rubisco subunit binding-protein beta subunit
  misc_feature (16)..(513): NCBI GI NO: 25084169 NR Description: Unknown protein [Arabidopsis thaliana]
  misc_feature (83)..(545): NCBI GI NO: 30697464 NR Description: expressed protein [Arabidopsis thaliana]
  misc_feature (83)..(545): NCBI GI NO: 15912287 NR Description: AT5g61020/maf19_20 [Arabidopsis thaliana]
  misc_feature (206)..(545): NCBI GI NO: 30697466 NR Description: expressed protein [Arabidopsis thaliana]
  misc_feature (16)..(513): NCBI GI NO: 30682679 NR Description: expressed protein [Arabidopsis thaliana]
MENLQVQDYKDASMYYGAYPAYPYGAPYGGWGEYSTYLSHDGAQTPTAGAYADMYYGHAAYGHIYGSQNYQYPSTYSKQQNSTAKLSSNGKSEKLAPAPEGDVSTIVVDEVKVLKNPNPTLKADRNAPGSNGSYGRSSVRSGNYQNQTSWSHYPYYSSEMFSDKQQKFTSNHNSTAPNDKTKGQSRNQNTRQYPHLMGLQTPTSPSVYSANGIYRYDGSYGPSLWYGSHMYSSGLYGGWNSLYDGKYRTRGRCNNGYYAYGNGSLDGFNELKRGPRSGMYTNQLGLGATTEVPAKEQDLLSANGSHPAMKDQYNRADFAETYSDAKFFIIKSYSEDDVHKSVKYNVWASTPNGNKKLDAAYQEAKEKSSETPVFLLFSVNASGQFVGLAEMVGRVDFNKTVDHWQQDKWTGCFPVKWHIVKDVPNSLLKHIILENNENKPVTNSRDTHEVKLEQGLQVLKVFKDHVCKTSILDDFGFYDNREKMMQYRKAKQQQSLKKVIDVKVPNATDADTSLVGTGSTELTNVEADVLNKELSLDKAVEKNEEKGNDVAPQDLKSSAEKSASPNGC

SEQ ID NO: 39352 - DNA, 1670 bp, Zea mays subsp. mays
  misc_feature (1)..(1670): Ceres Seq. ID no. 12366280
gcacgagaccattacctagaacatcctaatcgaaaaccctgtgcagtggtccatattctgggcggcgatccgcaggcgggctacacacacatacatggcggcggagggcgccggaggccggggacgagccatgcggtacccgcctctgtcggcactcgtggtctccgccatcgcagccttctccgccgtgatcgtcctcgccgtcgtccactcggcgtacgacgacgccatgtcgcggacgcggacgctgctgggccacaacctggagccgacgccgtggcacccgttcccgcacgacaagggccggccgccggcgcgcgcggcgctgcggtgcgcgccctccatcgcctgcctgccgccgctatcaccgtcgtcgtcggtcgtcgccgccgcaaggtaacaagaagaagaagcagaagcagtgccctgcctacttcgctgccatccaccgggacctggctccgtggcgcgggcagggccggggcgtgacgcgcgcgctcctggacgaggcgcggcggcgcgcgtccatgcgcgtcaccatcacgggcggcgggcggcggctgcacgtggacctctactacgcctgcgtgcagagccgcgccctgttcacggtgtggagcctgctgcagctgatgcggcggtaccccgggcgcgtgcccgacgtggacctcatgttcgactgcatggaccgccccgccatcaaccggaccgagcacggggacggcgctctgccgccgccgccgctcttccgctactgcaccaccagggaccacttcgacatccccttccctgactggtccttctggggctggccggacacgaacatcgagccatggaaccacgagttcaagaacatcagggcgggcgccagggcaacgagatgggcggacagggtgccgacggcgtactggaagggcaacccggacgtggcgtcgccgctgcgggaggcgctgctgggctgcaacgacacggccctgtggcgcgccgagatcatgcgccagaactgggacgacgaggccaggtccggctaccagcactcgaggctctcggcgcagtgcacgcaccgctacaagatctacgccgagggattcgcgtggtcggtcagcctcaagtacatcctctcctgcggctccatggcgctgctcatcgagccgcgctaccaggacttcttcagccgcgggctggagccccgggtgaactactggccggtcgccgccctgggcatgtgcgagtccatccgggacgccgtcgactggggcaacgccaacccggacgaggccgagcgcgtcggcaggcgcgggcagaggctcgtgcaggacctccgcatgcacgccgtctacgactacatgctgcacctgctcaccgagtatgcgcgcctcctcatagaccaggaccacggcttgagcccgccgccccacgcgcaggaggcatgcgaggcatccctgctctgcctcgcagacgacaagcagcggaggttcctccacgcatccaaggcagaccccgcgccgggcgacccgtgcgtgctcccgccgccgtgatccctccccctccctctctctctaggatttctttctttctttatttatttatttattagactcaacagacagatcagaacgagttgggaggatttcaatgatggttctaaagcttctgacaaaagcatgttc

SEQ ID NO: 39353 - protein, 336 aa, Zea mays subsp. mays
  peptide (1)..(336): Ceres Seq. ID no. 12366281
  misc_feature (1)..(334): Pfam Name: DUF821 Pfam Description: Arabidopsis thaliana protein of unknown function
  misc_feature (1)..(334): NCBI GI NO: 15222341 NR Description: hypothetical protein; protein id: At1g07220.1
  misc_feature (1)..(336): NCBI GI NO: 15237842 NR Description: putative protein; protein id: At5g23850.1
  misc_feature (1)..(336): NCBI GI NO: 38346998 NR Description: OSJNBb0039L24.21
  misc_feature (1)..(336): NCBI GI NO: 15229061 NR Description: putative protein; protein id: At3g48980.1
  misc_feature (1)..(336): NCBI GI NO: 7486461 NR Description: hypothetical protein At2g45830
  misc_feature (1)..(336): NCBI GI NO: 21742339 NR Description: OSJNBb0020O11.18
  misc_feature (1)..(336): NCBI GI NO: 15222413 NR Description: hypothetical protein; protein id: At1g63420.1
  misc_feature (1)..(336): NCBI GI NO: 15233070 NR Description: putative protein; protein id: At3g61270.1
  misc_feature (1)..(336): NCBI GI NO: 38637028 NR Description: unknown protein
  misc_feature (1)..(336): NCBI GI NO: 30690136 NR Description: expressed protein [Arabidopsis thaliana]
MRVTITGGGRRLHVDLYYACVQSRALFTVWSLLQLMRRYPGRVPDVDLMFDCMDRPAINRTEHGDGALPPPPLFRYCTTRDHFDIPFPDWSFWGWPDTNIEPWNHEFKNIRAGARATRWADRVPTAYWKGNPDVASPLREALLGCNDTALWRAEIMRQNWDDEARSGYQHSRLSAQCTHRYKIYAEGFAWSVSLKYILSCGSMALLIEPRYQDFFSRGLEPRVNYWPVAALGMCESIRDAVDWGNANPDEAERVGRRGQRLVQDLRMHAVYDYMLHLLTEYARLLIDQDHGLSPPPHAQEACEASLLCLADDKQRRFLHASKADPAPGDPCVLPPP

SEQ ID NO: 39354 - protein, 301 aa, Zea mays subsp. mays
  peptide (1)..(301): Ceres Seq. ID no. 12366282
  misc_feature (1)..(299): Pfam Name: DUF821 Pfam Description: Arabidopsis thaliana protein of unknown function
  misc_feature (1)..(299): NCBI GI NO: 15222341 NR Description: hypothetical protein; protein id: At1g07220.1
  misc_feature (1)..(301): NCBI GI NO: 15237842 NR Description: putative protein; protein id: At5g23850.1
  misc_feature (1)..(301): NCBI GI NO: 38346998 NR Description: OSJNBb0039L24.21
  misc_feature (1)..(301): NCBI GI NO: 15229061 NR Description: putative protein; protein id: At3g48980.1
  misc_feature (1)..(301): NCBI GI NO: 7486461 NR Description: hypothetical protein At2g45830
  misc_feature (1)..(301): NCBI GI NO: 21742339 NR Description: OSJNBb0020O11.18
  misc_feature (1)..(301): NCBI GI NO: 15222413 NR Description: hypothetical protein; protein id: At1g63420.1
  misc_feature (1)..(301): NCBI GI NO: 15233070 NR Description: putative protein; protein id: At3g61270.1
  misc_feature (1)..(301): NCBI GI NO: 38637028 NR Description: unknown protein
  misc_feature (1)..(301): NCBI GI NO: 30690136 NR Description: expressed protein [Arabidopsis thaliana]
MRRYPGRVPDVDLMFDCMDRPAINRTEHGDGALPPPPLFRYCTTRDHFDIPFPDWSFWGWPDTNIEPWNHEFKNIRAGARATRWADRVPTAYWKGNPDVASPLREALLGCNDTALWRAEIMRQNWDDEARSGYQHSRLSAQCTHRYKIYAEGFAWSVSLKYILSCGSMALLIEPRYQDFFSRGLEPRVNYWPVAALGMCESIRDAVDWGNANPDEAERVGRRGQRLVQDLRMHAVYDYMLHLLTEYARLLIDQDHGLSPPPHAQEACEASLLCLADDKQRRFLHASKADPAPGDPCVLPPP

SEQ ID NO: 39355 - protein, 288 aa, Zea mays subsp. mays
  peptide (1)..(288): Ceres Seq. ID no. 12366283
  misc_feature (1)..(286): Pfam Name: DUF821 Pfam Description: Arabidopsis thaliana protein of unknown function
  misc_feature (1)..(286): NCBI GI NO: 15222341 NR Description: hypothetical protein; protein id: At1g07220.1
  misc_feature (1)..(288): NCBI GI NO: 15237842 NR Description: putative protein; protein id: At5g23850.1
  misc_feature (1)..(288): NCBI GI NO: 38346998 NR Description: OSJNBb0039L24.21
  misc_feature (1)..(288): NCBI GI NO: 15229061 NR Description: putative protein; protein id: At3g48980.1
  misc_feature (1)..(288): NCBI GI NO: 7486461 NR Description: hypothetical protein At2g45830
  misc_feature (1)..(288): NCBI GI NO: 21742339 NR Description: OSJNBb0020O11.18
  misc_feature (1)..(288): NCBI GI NO: 15222413 NR Description: hypothetical protein; protein id: At1g63420.1
  misc_feature (1)..(288): NCBI GI NO: 15233070 NR Description: putative protein; protein id: At3g61270.1
  misc_feature (1)..(288): NCBI GI NO: 38637028 NR Description: unknown protein
  misc_feature (1)..(288): NCBI GI NO: 30690136 NR Description: expressed protein [Arabidopsis thaliana]
MFDCMDRPAINRTEHGDGALPPPPLFRYCTTRDHFDIPFPDWSFWGWPDTNIEPWNHEFKNIRAGARATRWADRVPTAYWKGNPDVASPLREALLGCNDTALWRAEIMRQNWDDEARSGYQHSRLSAQCTHRYKIYAEGFAWSVSLKYILSCGSMALLIEPRYQDFFSRGLEPRVNYWPVAALGMCESIRDAVDWGNANPDEAERVGRRGQRLVQDLRMHAVYDYMLHLLTEYARLLIDQDHGLSPPPHAQEACEASLLCLADDKQRRFLHASKADPAPGDPCVLPPP

SEQ ID NO: 39356 - DNA, 1861 bp, Zea mays subsp. mays
  misc_feature (1)..(1861): Ceres Seq. ID no. 15176874
acgaaggcaacgcgtgctgagggctgaggcagaaaaacgcggggaaacaagagggaaacgccgtgagaggtcgccgataggtgcgcgggtcgcggtcgtcgcctcctctgcctccctggcacttcggctcggctcggcaaacgcaacaacacggagcgggcgtggggagcggagcggagcggtgagcgaggatcgagggcaacgtggcgaggccacacgcccgagggggagaggcgactttgcttccagttccaggaaagagtgggctataaaaaggcgctcgagatccagatctgggccgatgcgaccgccctcgctgctctccctcaccctcgacgccgcgctcctccgcatcgccaatatcgccgacctctcccacctcccagaccacctcctcatcgacctcttccgtagaaccctcagtgctggtaagctgacagagaaagttctcaagttgtttctagcaaccggctgtgaggatatcatattggctgttcggttgctcaacattaagcagccactcgtaccagtccttcccacaaggtgctctgagagattctagatctgctgccgcccacatcgttttgattacctgagaagatgcctttggaaattcaagatagtgaggttgacatagtgattgcggcactccagcccaacctgaccactttctatgaggcatggcgaccatttttctcccgtttccacatcattgtcgtcaaagatccagacatggcagaggatcttcaaatccctgcaggttttgatctcaaggtttacaccaagtcagatattaatgggttgcttggtgcctcctcatccataaacttatctggtcactcatgccgttactttgggtatcttgtctcacgcaagaagtatgtgatttcagttgatgacaattgcctcccagcgaaggacactgctgggtcgactgttgatgttgttgcacagcacatggccaatctgaaaacacctgctacacctttctttttcaacacactctatgatccatacaggaaaggtgctgactttgtccgtggttacccattcagcctgcgtgagggggttgagtgcatgctctcgtgtggtttgtggcttcataatgctgactacgacccgatgactcatgttgtgaagagaaatcaacggaacacaacatatgtggatgctgtgatgacggttccgcttggtgccatgctgcctgtgagcgggataaatgttgcattcaaccgcgatgtgctggggcctgctatgttcccaggcctgcgtctaagaaacgaagggaagcacagatgggatacccttgaagacatatggaatggcttatgtgctaaagtagtctgcgacagcttgggatatggtgtgaagaccagactgccttatgtgatgagaagtgatgcagaagcaggtaaagctctggagagcttgaaagagtgggaaggggtaaaagtcatggacgatgttctcccattcttccagtcgctcaagctatcgaggactgcagttactgttgacgattgtgttaaggagcttgctggaattgtccgtgagaaactaggacctaagaatgcaatcttcaccaaagcagccgatgccatggtggaatggaacaatctctggaaagtgcatggtgctcagaatgcatagtttgggaatttgcatgtttcctacagagcatctaatagttgtttggagtgcgcgttttacagttctaaattttccctgtggaactcatgaagctgaaataaacaacagtcctttatgccgtgaatttggcatgaatagctgagcatctcattgtatacgcttaagaattatgtaatgtaatgcatcaaaagaacatgtgatgttttcttgc

SEQ ID NO: 39357 - protein, 349 aa, Zea mays subsp. mays
  peptide (1)..(349): Ceres Seq. ID no. 15176875
  misc_feature (1)..(349): Pfam Name: Pfam Description:  Reversibly glycosylated polypeptide
  misc_feature (1)..(349): NCBI GI NO: 19387283 NR Description: putative amylogenin
  misc_feature (1)..(349): NCBI GI NO: 4158230 NR Description: amylogenin [Triticum aestivum]
  misc_feature (1)..(349): NCBI GI NO: 4158219 NR Description: amylogenin [Oryza sativa (indica cultivar-group)]
  misc_feature (1)..(349): NCBI GI NO: 3646375 NR Description: RGP2 protein
  misc_feature (4)..(341): NCBI GI NO: 15237362 NR Description: amylogenin; reversibly glycosylatable polypeptide
  misc_feature (1)..(341): NCBI GI NO: 2317729 NR Description: reversibly glycosylated polypeptide-1
  misc_feature (1)..(341): NCBI GI NO: 15232865 NR Description: reversibly glycosylated polypeptide-1
  misc_feature (1)..(341): NCBI GI NO: 34582497 NR Description: Alpha-1,4-glucan-protein synthase
  misc_feature (1)..(341): NCBI GI NO: 15242351 NR Description: reversibly glycosylated polypeptide-3
  misc_feature (88)..(327): NCBI GI NO: 7488888 NR Description: type IIIa membrane protein cp-wap11 - cowpea
MPLEIQDSEVDIVIAALQPNLTTFYEAWRPFFSRFHIIVVKDPDMAEDLQIPAGFDLKVYTKSDINGLLGASSSINLSGHSCRYFGYLVSRKKYVISVDDNCLPAKDTAGSTVDVVAQHMANLKTPATPFFFNTLYDPYRKGADFVRGYPFSLREGVECMLSCGLWLHNADYDPMTHVVKRNQRNTTYVDAVMTVPLGAMLPVSGINVAFNRDVLGPAMFPGLRLRNEGKHRWDTLEDIWNGLCAKVVCDSLGYGVKTRLPYVMRSDAEAGKALESLKEWEGVKVMDDVLPFFQSLKLSRTAVTVDDCVKELAGIVREKLGPKNAIFTKAADAMVEWNNLWKVHGAQNA

SEQ ID NO: 39358 - protein, 305 aa, Zea mays subsp. mays
  peptide (1)..(305): Ceres Seq. ID no. 15176876
  misc_feature (1)..(305): Pfam Name: Pfam Description:  Reversibly glycosylated polypeptide
  misc_feature (1)..(305): NCBI GI NO: 19387283 NR Description: putative amylogenin
  misc_feature (1)..(305): NCBI GI NO: 4158230 NR Description: amylogenin [Triticum aestivum]
  misc_feature (1)..(305): NCBI GI NO: 4158219 NR Description: amylogenin [Oryza sativa (indica cultivar-group)]
  misc_feature (1)..(305): NCBI GI NO: 3646375 NR Description: RGP2 protein
  misc_feature (1)..(297): NCBI GI NO: 15237362 NR Description: amylogenin; reversibly glycosylatable polypeptide
  misc_feature (1)..(297): NCBI GI NO: 2317729 NR Description: reversibly glycosylated polypeptide-1
  misc_feature (1)..(297): NCBI GI NO: 15232865 NR Description: reversibly glycosylated polypeptide-1
  misc_feature (1)..(297): NCBI GI NO: 34582497 NR Description: Alpha-1,4-glucan-protein synthase
  misc_feature (1)..(297): NCBI GI NO: 15242351 NR Description: reversibly glycosylated polypeptide-3
  misc_feature (44)..(283): NCBI GI NO: 7488888 NR Description: type IIIa membrane protein cp-wap11 - cowpea
MAEDLQIPAGFDLKVYTKSDINGLLGASSSINLSGHSCRYFGYLVSRKKYVISVDDNCLPAKDTAGSTVDVVAQHMANLKTPATPFFFNTLYDPYRKGADFVRGYPFSLREGVECMLSCGLWLHNADYDPMTHVVKRNQRNTTYVDAVMTVPLGAMLPVSGINVAFNRDVLGPAMFPGLRLRNEGKHRWDTLEDIWNGLCAKVVCDSLGYGVKTRLPYVMRSDAEAGKALESLKEWEGVKVMDDVLPFFQSLKLSRTAVTVDDCVKELAGIVREKLGPKNAIFTKAADAMVEWNNLWKVHGAQNA

SEQ ID NO: 39359 - protein, 230 aa, Zea mays subsp. mays
  peptide (1)..(230): Ceres Seq. ID no. 15176877
  misc_feature (1)..(230): Pfam Name: Pfam Description:  Reversibly glycosylated polypeptide
  misc_feature (1)..(230): NCBI GI NO: 19387283 NR Description: putative amylogenin
  misc_feature (1)..(230): NCBI GI NO: 4158230 NR Description: amylogenin [Triticum aestivum]
  misc_feature (1)..(230): NCBI GI NO: 4158219 NR Description: amylogenin [Oryza sativa (indica cultivar-group)]
  misc_feature (1)..(230): NCBI GI NO: 3646375 NR Description: RGP2 protein
  misc_feature (1)..(222): NCBI GI NO: 15237362 NR Description: amylogenin; reversibly glycosylatable polypeptide
  misc_feature (1)..(222): NCBI GI NO: 2317729 NR Description: reversibly glycosylated polypeptide-1
  misc_feature (1)..(222): NCBI GI NO: 15232865 NR Description: reversibly glycosylated polypeptide-1
  misc_feature (1)..(222): NCBI GI NO: 34582497 NR Description: Alpha-1,4-glucan-protein synthase
  misc_feature (1)..(222): NCBI GI NO: 15242351 NR Description: reversibly glycosylated polypeptide-3
  misc_feature (1)..(208): NCBI GI NO: 7488888 NR Description: type IIIa membrane protein cp-wap11 - cowpea
MANLKTPATPFFFNTLYDPYRKGADFVRGYPFSLREGVECMLSCGLWLHNADYDPMTHVVKRNQRNTTYVDAVMTVPLGAMLPVSGINVAFNRDVLGPAMFPGLRLRNEGKHRWDTLEDIWNGLCAKVVCDSLGYGVKTRLPYVMRSDAEAGKALESLKEWEGVKVMDDVLPFFQSLKLSRTAVTVDDCVKELAGIVREKLGPKNAIFTKAADAMVEWNNLWKVHGAQNA

SEQ ID NO: 39360 - DNA, 1596 bp, Zea mays subsp. mays
  misc_feature (1)..(1596): Ceres Seq. ID no. 12375384
gcacgagaccattacctagaacatcctaatcgaaaaattttgcacccagcaacgtacagctagctagcaggcaccaggcagcacatagcctccgattattcagctggaggtcggtctgtgtgtgcgtgcatggggcatcactcctgctgcaaccagcagaaggtgaagagggggctctggtcccctgaggaggacgagaagctcatcaggtacatcaccacccatggctacgggtgctggagcgaggtccccgagaaggccggcctacaacgctgcgggaagagctgccggctgcggtggatcaactacctcaggccggacatccgccgaggccggttcacggcggaggaggagaagctcatcatcagcctgcacgccattgttggcaacaggtgggcccacattgccagccacttgcccgggcggacggacaacgagatcaagaactactggaactcgtggatcaagaagaagatccgaaagccggcgatgagcacgacgacgacgagctcggccgtgacggcggcgagccctccgtgcagcacggcggcgtcggacgcggcgcttggtcgtcacctgcagacgccgttcagcgcggcggagcaccggctcgacgccatcctcagccagagccttgccttgccgccgccgaagctgggctccggcggcggcggcggcggcggccaagagtccccgccgctgcccccgcactgccccttcttcatgttcgacacgagcgtcagcgtcagcccgccgtcgcccgcggccgcagcacaccacctgcagcacccgttcctcaccttcacggcggcggcggcgatggacgacaacgcgccgatgggcttccatctgccgcccttggtggacggcatgggaatgggcatgccagcaggccatggactgcggcgctctaggccatgaccaccgcgttgccggcggcaacaacaatggtcaggcggaggcggcggcggccggcatggcgaacggctgctgctacgggcagctgcaaaagcagcaggaggaggagcagcagccgtcgctggggcaggaggaccagtgggacgacgagtcggcgcggcacctgctgatgtgggacgatgaccaagaactaacaccgtccaacctggaagccatggaaagtacagctcactccctcctttttatgggaccaaatgaccatacatgacgaaaaagctagcttattattggtgtgcatgcgcatctatccccctctcttcttgatctgatctgctacctctagctctctcacccgatctgctgatctgtgtccatacatgcaataatgaggttgttgtccaaggcgcataatttatttttgctggatttttcatttttctcatattgatttaacctttattttttttggtttttggtttgggctttgtggagtgaattgaagactaaaaggctaagagtgtgcgtgttaaatggggttttattttttgtaaagaggatttgcatgctcttgcatggcgctgcgcttggagtgtaatttgattgatgtatctaagtgaatttaaaataaggaagatgacactaaaagagatcgaaagggagtcacgcaccccttttcct

SEQ ID NO: 39361 - protein, 263 aa, Zea mays subsp. mays
  peptide (1)..(263): Ceres Seq. ID no. 12375385
  misc_feature (14)..(61): Pfam Name: Pfam Description:  Myb-like DNA-binding domain
  misc_feature (1)..(251): NCBI GI NO: 28812131 NR Description: putative myb-related protein
  misc_feature (1)..(128): NCBI GI NO: 2129932 NR Description: myb-related protein 1 - tomato
  misc_feature (1)..(141): NCBI GI NO: 15222565 NR Description: putative MYB family transcription factor
  misc_feature (1)..(129): NCBI GI NO: 34910458 NR Description: putative transcription factor
  misc_feature (1)..(136): NCBI GI NO: 33320067 NR Description: transcription factor Myb [Capsicum annuum]
  misc_feature (1)..(116): NCBI GI NO: 11994360 NR Description: transcription factor-like protein
  misc_feature (1)..(222): NCBI GI NO: 34902542 NR Description: putative transcription factor (myb)
  misc_feature (1)..(131): NCBI GI NO: 2280530 NR Description: ATMYB4 [Arabidopsis thaliana]
  misc_feature (1)..(131): NCBI GI NO: 30690317 NR Description: myb transcription factor (ATMYB4)
  misc_feature (1)..(167): NCBI GI NO: 22329445 NR Description: myb family transcription factor
MGHHSCCNQQKVKRGLWSPEEDEKLIRYITTHGYGCWSEVPEKAGLQRCGKSCRLRWINYLRPDIRRGRFTAEEEKLIISLHAIVGNRWAHIASHLPGRTDNEIKNYWNSWIKKKIRKPAMSTTTTSSAVTAASPPCSTAASDAALGRHLQTPFSAAEHRLDAILSQSLALPPPKLGSGGGGGGGQESPPLPPHCPFFMFDTSVSVSPPSPAAAAHHLQHPFLTFTAAAAMDDNAPMGFHLPPLVDGMGMGMPAGHGLRRSRP

SEQ ID NO: 39362 - protein, 143 aa, Zea mays subsp. mays
  peptide (1)..(143): Ceres Seq. ID no. 12375386
  misc_feature (1)..(131): NCBI GI NO: 28812131 NR Description: putative myb-related protein
  misc_feature (1)..(21): NCBI GI NO: 15222565 NR Description: putative MYB family transcription factor
  misc_feature (1)..(16): NCBI GI NO: 33320067 NR Description: transcription factor Myb [Capsicum annuum]
  misc_feature (1)..(102): NCBI GI NO: 34902542 NR Description: putative transcription factor (myb)
  misc_feature (1)..(11): NCBI GI NO: 2280530 NR Description: ATMYB4 [Arabidopsis thaliana]
  misc_feature (1)..(11): NCBI GI NO: 30690317 NR Description: myb transcription factor (ATMYB4)
  misc_feature (1)..(47): NCBI GI NO: 22329445 NR Description: myb family transcription factor
  misc_feature (1)..(47): NCBI GI NO: 25294104 NR Description: hypothetical protein
  misc_feature (1)..(124): NCBI GI NO: 28927688 NR Description: putative Myb-like DNA-binding protein
  misc_feature (1)..(11): NCBI GI NO: 7446174 NR Description: transcription factor MYB4 - Arabidopsis thaliana
MSTTTTSSAVTAASPPCSTAASDAALGRHLQTPFSAAEHRLDAILSQSLALPPPKLGSGGGGGGGQESPPLPPHCPFFMFDTSVSVSPPSPAAAAHHLQHPFLTFTAAAAMDDNAPMGFHLPPLVDGMGMGMPAGHGLRRSRP

SEQ ID NO: 39363 - DNA, 1615 bp, Zea mays subsp. mays
  misc_feature (1)..(1615): Ceres Seq. ID no. 12358993
acctcttctcgcgcacgtggtctgtgcccgtacgcggcggcgctgccgctcaccagaccggccgccgccacgtctgcttccgcgcctccccgcctcctcaccgtccgcccccttttacctgcctgatcattttattataaatgtggggcgagagaactcatcataagcactggcatcaaggtcatggtacctcggggaattccaacaacaaaaagcatgataagcggcagccaaaatttataccagacaattatagctccgtcgatgaggttactactgctctgcgagaagctggcctcgaatcgtcaaatctaatcctcggtattgatttcaccaaaagcaatgagtggtcaggcaggcattcctttagaagaaaatctctgcatgccattaatggcaccccaaatccatatgaacaagctatctctataatcgggcgaacgctgtcaccttttgacgatgataacttgataccatgttttggatttggcgatgcttctacacatgatcattctgtgttcagtttctacccagagaaccgaccctgtcgtggctttgaggaggttcttgtaaggtatcgacagattgtaccacatttgaacctttcaggaccaacttcttttgcacctcttatttatgcagcgatttctgttgttgaaaacagtaattggcagtaccatgtcctcgtgatcatagctgatggacgtgactgccgcgaatataaatgatggaagattaagtccacaggaacaagcaactatacaagcaattgtcgatgctagctactatcctctttcaatagtaatggttggggtgggtgatggaccatgggatgcgatgcagcattttgatgactgtatccctgaaagagcttttgacaattttcagtttgtgaacttcactggtattatgtcaacaagtaaggatatgtcaaagaaggaggctgcatttgcccttgcagctcttatggaaataccttctcagtataaagcaacgcaaggcctccgacctccagaaaagcaagcacaaaggattggctctcctaggattcttcctcctccaaataaagttcttgaaaatgataatgccgccgccgctgcttcgcaccctcctcaaactgcaagctcgaaatcaactggtattggcaaaagtgctgctgacgagcaggtatgccccatatgtctaaccaatccaaaggacatggcttttcagtgtggtcatctgacatgtaaggaatgtggcccaacactatcaacgtgcccattgtgccgcgctctaatcaccatgcgtgtgaggctctactcctaagtcggttggtgtctggagggatgggaccaaacagaaaggagcaagaactttggggcgcaaggactgcgctacgatcttgagatatggtccatatggatgtcatgataacgatgcatgtacagaaaccttgtccgtgcctattcagtaatgtcgttgatgagtatcttccatcaatcacatgtaaaatttctaatgttatcttgtattagtagcaggggattgcttgttgagtggaataccaccagttgttcagcaacagatagtaaactccatgtgcatttggaagtcacttttgtgatttgtgttc

SEQ ID NO: 39364 - protein, 202 aa, Zea mays subsp. mays
  peptide (1)..(202): Ceres Seq. ID no. 12358994
  misc_feature (3)..(202): NCBI GI NO: 34905794 NR Description: P0401G10.23
  misc_feature (11)..(202): NCBI GI NO: 22328041 NR Description: putative protein; protein id: At5g63970
  misc_feature (11)..(201): NCBI GI NO: 15232157 NR Description: unknown protein; protein id: At3g01650.1
  misc_feature (11)..(174): NCBI GI NO: 8777310 NR Description: gb|AAF01562
  misc_feature (5)..(201): NCBI GI NO: 15241400 NR Description: putative protein; protein id: At5g14420
  misc_feature (5)..(201): NCBI GI NO: 18408863 NR Description: F12A21
  misc_feature (5)..(201): NCBI GI NO: 30697566 NR Description: copine-related [Arabidopsis thaliana]
  misc_feature (10)..(202): NCBI GI NO: 18412353 NR Description: expressed protein; protein id: At1g79380
  misc_feature (11)..(180): NCBI GI NO: 20804894 NR Description: P0497A05.19
  misc_feature (5)..(175): NCBI GI NO: 18481708 NR Description: hypothetical protein [Sorghum bicolor]
MDVTAANINDGRLSPQEQATIQAIVDASYYPLSIVMVGVGDGPWDAMQHFDDCIPERAFDNFQFVNFTGIMSTSKDMSKKEAAFALAALMEIPSQYKATQGLRPPEKQAQRIGSPRILPPPNKVLENDNAAAAASHPPQTASSKSTGIGKSAADEQVCPICLTNPKDMAFQCGHLTCKECGPTLSTCPLCRALITMRVRLYS

SEQ ID NO: 39365 - protein, 195 aa, Zea mays subsp. mays
  peptide (1)..(195): Ceres Seq. ID no. 12358995
  misc_feature (1)..(189): NCBI GI NO: 34905794 NR Description: P0401G10.23
  misc_feature (20)..(192): NCBI GI NO: 22328041 NR Description: putative protein; protein id: At5g63970
  misc_feature (21)..(192): NCBI GI NO: 15232157 NR Description: unknown protein; protein id: At3g01650.1
  misc_feature (20)..(192): NCBI GI NO: 8777310 NR Description: gb|AAF01562
  misc_feature (18)..(192): NCBI GI NO: 15241400 NR Description: putative protein; protein id: At5g14420
  misc_feature (18)..(192): NCBI GI NO: 18408863 NR Description: F12A21
  misc_feature (18)..(192): NCBI GI NO: 30697566 NR Description: copine-related [Arabidopsis thaliana]
  misc_feature (21)..(192): NCBI GI NO: 18412353 NR Description: expressed protein; protein id: At1g79380
  misc_feature (18)..(192): NCBI GI NO: 20804894 NR Description: P0497A05.19
  misc_feature (6)..(192): NCBI GI NO: 18481708 NR Description: hypothetical protein [Sorghum bicolor]
MWGERTHHKHWHQGHGTSGNSNNKKHDKRQPKFIPDNYSSVDEVTTALREAGLESSNLILGIDFTKSNEWSGRHSFRRKSLHAINGTPNPYEQAISIIGRTLSPFDDDNLIPCFGFGDASTHDHSVFSFYPENRPCRGFEEVLVRYRQIVPHLNLSGPTSFAPLIYAAISVVENSNWQYHVLVIIADGRDCREYK

SEQ ID NO: 39366 - protein, 167 aa, Zea mays subsp. mays
  peptide (1)..(167): Ceres Seq. ID no. 12358996
  misc_feature (1)..(167): NCBI GI NO: 34905794 NR Description: P0401G10.23
  misc_feature (1)..(167): NCBI GI NO: 22328041 NR Description: putative protein; protein id: At5g63970
  misc_feature (1)..(166): NCBI GI NO: 15232157 NR Description: unknown protein; protein id: At3g01650.1
  misc_feature (1)..(139): NCBI GI NO: 8777310 NR Description: gb|AAF01562
  misc_feature (1)..(166): NCBI GI NO: 15241400 NR Description: putative protein; protein id: At5g14420
  misc_feature (1)..(166): NCBI GI NO: 18408863 NR Description: F12A21
  misc_feature (1)..(166): NCBI GI NO: 30697566 NR Description: copine-related [Arabidopsis thaliana]
  misc_feature (1)..(167): NCBI GI NO: 18412353 NR Description: expressed protein; protein id: At1g79380
  misc_feature (1)..(145): NCBI GI NO: 20804894 NR Description: P0497A05.19
  misc_feature (1)..(140): NCBI GI NO: 18481708 NR Description: hypothetical protein [Sorghum bicolor]
MVGVGDGPWDAMQHFDDCIPERAFDNFQFVNFTGIMSTSKDMSKKEAAFALAALMEIPSQYKATQGLRPPEKQAQRIGSPRILPPPNKVLENDNAAAAASHPPQTASSKSTGIGKSAADEQVCPICLTNPKDMAFQCGHLTCKECGPTLSTCPLCRALITMRVRLYS

SEQ ID NO: 39367 - DNA, 2973 bp, Zea mays subsp. mays
  misc_feature (1)..(2973): Ceres Seq. ID no. 12375065
gcacgagaccattacctagaacatcctaatcgaaaaagagacgacgacgacgacgacgacgacgacgacgcgagaagtcgaggcgccgctgcttgctaggaccgagcttcaggaagtctccaacggccccggcgccggcacggcctgccccgcgccgccacagggattgattgtgatcagatctattctgtagtggtcagcggctgagggtgaaccgaagatgagcgttgtgggattcgatctcggcaatgagagctgcattgtggcagtcgcgcggcagcgcggcatcgacgtggtcctcaacgatgagtccaaacgcgagacacccgccatcgtctgcttcggggacaagcagcggttcatcggtacggcgggcgccgcgtcctcaaccatgaaccccaaaaactccatttctcagatcaagcgcctgctcggccgcaagttctccgaccccgagctccagagtgatctcgcgtccttcccgttccgtgtcacggagggccccgatggatttcccttggtacatgtgcggttcctgggcgaggagcggacgtttacccccacccagctgcttgccatggtgctgtccaatctgaagggcattgctgaggggaaccttaagactgcggttgttgattgctgcattggcatccctgtgtacttcagtgatttgcagcgcagggctgttcttgatgctgctactattgcaggcctcacgccgttgcagctatttcatgagacaactgccacggcattggcttatggcatttataagactgacctcccggagcatgaccagctaaacgttgcatttgttgatgtcggccatgctagcttgcaggtcagcattgtcggttacaagaagggacagctcaagatgctttcgcatgcatatgaccgttctcttggtgggagggacttcgatgaggccctcttcaagcacttcgcggcgaagttcaaagaagaatataagattgatgtttaccagaatgcccgtgcatgccttaggttgcgtgtggcgtgtgagaagcttaagaagatgctgagcgccaacccagaggccccactgaacattgagtgcttgatggatgagaaagatgtgagagggtttattaagagagaggagtttgaacacatcagtgcacctgtgctggtacgtgtcaaaggacccttggagaaggccttggctgaagctggcttgacaactgaaaatgtgcactttgttgaggttgtcggatctggttctcgtgttccagccataatcaagataatcactgatttttttgggaaggagccgagacgaaccatgaatgcaagcgagtgtgttgcgcggggctgtgctctccagtgtgctattctcagccccactttcaaagtgcgggaattccaggttaatgatgggtttcctttctcaattgcattgtcatggaaacaagactcgcagaacagtgcaccccaacagacccttgtatttccaaaggggaatgtaattcccagcattaaagctctaaccttctataaatccagtacatttgaagttgatgttttgtatgtggacacatgcgactcgcaaattccacagaagataagcacttacacaattggacctttccaaccctccaaaggtgagagggccaaactgaaagttaaagtgcgtctcaacatccacgggattgtcacagttgattcagctatgatgctggaggaggatgtggcagttccagtctcatctgctaatgaagctccaaaggatactacaaagatggacacagatgatgcaccaagtgatcctgtctctggaactgatgtgaatgtgcatgagcctgatactactgaggctgctcctgcagctgaaaatggaacacaaaatcccgaggaaaaatctgttccaatggaaactgatgcaaaggttgagccatcaaaaaggaaagttaagagaacttctgttccggtccatgcgttggtctatggtgccttggctgcagctgacctgcagaaggctgtagagaaagagtatgagatggctcttcaggacagagtaatggaagaaaccaaagagaagaaaaatgctgtggaagcttatgtctatgacatgcgtaacaagctctacgacaggtacaacgattttgtgacacctgaggagaaggaagggttgattggaaagcttcaggaggttgaagattggctatatgaagatggtgaggatgagacaaagggagtctatatttctaaactggaagatcttaagaagattggtgacccaattgaggcacggtacaaggagtcgacagaaaggggttcctctgtagatcaactggtctactgcatcaacagtttcagagaggctgctttgtccagtgaccaaaagtttggccatatcgacatatctgagaaacagaaggtcatcaatgagtgctctgaagtagagaactggttgagagagaggaagcagcagcaggacgccctacctaagcacaccgatcctgtgctgctcgtatcagatctgaagaagaaagctgaagcacttgacaggttctgcaaaccgatcatgactaaaccaaagccagctccgaagccacagactccgccaccacatactccacctccacagcctgaagcccaagcatctgaccctcaaacaccagaacaacaacaaagcgggactggtgcagctggtgagccgggtagtgagggaggtgtgcagcaggcctccggtgagcaaatggacatggacaggcccgatgattctgcggatgttgcggcataattgtggttgtggttgtcatctgtcttatgatcgatcaaaattttctgtttgtctggtaggtggatgagttaaggcaacagcatattctcccaagcgatttcgttttagggtttggaacattgagattgaggtaatgcgtcttgtccagcgttgttttggtctggactgtgaatcagaatagaaacgttgcatgatcgaattgcgcc

SEQ ID NO: 39368 - protein, 848 aa, Zea mays subsp. mays
  peptide (1)..(848): Ceres Seq. ID no. 12375066
  misc_feature (3)..(688): Pfam Name: Pfam Description:  Hsp70 protein
  misc_feature (1)..(813): NCBI GI NO: 17473863 NR Description: putative heat-shock protein [Arabidopsis thaliana]
  misc_feature (1)..(808): NCBI GI NO: 15220026 NR Description: putative heat-shock protein; protein id:At1g79930
  misc_feature (1)..(808): NCBI GI NO: 7450157 NR Description: heat shock protein 91 - Arabidopsis thaliana
  misc_feature (1)..(635): NCBI GI NO: 30699465 NR Description: heat shock protein hsp70, putative
  misc_feature (1)..(838): NCBI GI NO: 40254361 NR Description: osmotic stress protein
  misc_feature (1)..(838): NCBI GI NO: 1098541 NR Description: osmotic stress protein 94
  misc_feature (1)..(838): NCBI GI NO: 39645395 NR Description: Unknown (protein for MGC:76295)
  misc_feature (1)..(519): NCBI GI NO: 12230134 NR Description: HEAT SHOCK PROTEIN HOMOLOG PSS1
  misc_feature (545)..(691): NCBI GI NO: 12230134 NR Description: HEAT SHOCK PROTEIN HOMOLOG PSS1
  misc_feature (1)..(519): NCBI GI NO: 7441858 NR Description: heat shock protein 70 - fission yeast
MSVVGFDLGNESCIVAVARQRGIDVVLNDESKRETPAIVCFGDKQRFIGTAGAASSTMNPKNSISQIKRLLGRKFSDPELQSDLASFPFRVTEGPDGFPLVHVRFLGEERTFTPTQLLAMVLSNLKGIAEGNLKTAVVDCCIGIPVYFSDLQRRAVLDAATIAGLTPLQLFHETTATALAYGIYKTDLPEHDQLNVAFVDVGHASLQVSIVGYKKGQLKMLSHAYDRSLGGRDFDEALFKHFAAKFKEEYKIDVYQNARACLRLRVACEKLKKMLSANPEAPLNIECLMDEKDVRGFIKREEFEHISAPVLVRVKGPLEKALAEAGLTTENVHFVEVVGSGSRVPAIIKIITDFFGKEPRRTMNASECVARGCALQCAILSPTFKVREFQVNDGFPFSIALSWKQDSQNSAPQQTLVFPKGNVIPSIKALTFYKSSTFEVDVLYVDTCDSQIPQKISTYTIGPFQPSKGERAKLKVKVRLNIHGIVTVDSAMMLEEDVAVPVSSANEAPKDTTKMDTDDAPSDPVSGTDVNVHEPDTTEAAPAAENGTQNPEEKSVPMETDAKVEPSKRKVKRTSVPVHALVYGALAAADLQKAVEKEYEMALQDRVMEETKEKKNAVEAYVYDMRNKLYDRYNDFVTPEEKEGLIGKLQEVEDWLYEDGEDETKGVYISKLEDLKKIGDPIEARYKESTERGSSVDQLVYCINSFREAALSSDQKFGHIDISEKQKVINECSEVENWLRERKQQQDALPKHTDPVLLVSDLKKKAEALDRFCKPIMTKPKPAPKPQTPPPHTPPPQPEAQASDPQTPEQQQSGTGAAGEPGSEGGVQQASGEQMDMDRPDDSADVAA

SEQ ID NO: 39369 - protein, 791 aa, Zea mays subsp. mays
  peptide (1)..(791): Ceres Seq. ID no. 12375067
  misc_feature (1)..(631): Pfam Name: Pfam Description:  Hsp70 protein
  misc_feature (1)..(756): NCBI GI NO: 17473863 NR Description: putative heat-shock protein [Arabidopsis thaliana]
  misc_feature (1)..(751): NCBI GI NO: 15220026 NR Description: putative heat-shock protein; protein id:At1g79930
  misc_feature (1)..(751): NCBI GI NO: 7450157 NR Description: heat shock protein 91 - Arabidopsis thaliana
  misc_feature (1)..(578): NCBI GI NO: 30699465 NR Description: heat shock protein hsp70, putative
  misc_feature (1)..(781): NCBI GI NO: 40254361 NR Description: osmotic stress protein
  misc_feature (1)..(781): NCBI GI NO: 1098541 NR Description: osmotic stress protein 94
  misc_feature (1)..(781): NCBI GI NO: 39645395 NR Description: Unknown (protein for MGC:76295)
  misc_feature (1)..(462): NCBI GI NO: 12230134 NR Description: HEAT SHOCK PROTEIN HOMOLOG PSS1
  misc_feature (488)..(634): NCBI GI NO: 12230134 NR Description: HEAT SHOCK PROTEIN HOMOLOG PSS1
  misc_feature (1)..(462): NCBI GI NO: 7441858 NR Description: heat shock protein 70 - fission yeast
MNPKNSISQIKRLLGRKFSDPELQSDLASFPFRVTEGPDGFPLVHVRFLGEERTFTPTQLLAMVLSNLKGIAEGNLKTAVVDCCIGIPVYFSDLQRRAVLDAATIAGLTPLQLFHETTATALAYGIYKTDLPEHDQLNVAFVDVGHASLQVSIVGYKKGQLKMLSHAYDRSLGGRDFDEALFKHFAAKFKEEYKIDVYQNARACLRLRVACEKLKKMLSANPEAPLNIECLMDEKDVRGFIKREEFEHISAPVLVRVKGPLEKALAEAGLTTENVHFVEVVGSGSRVPAIIKIITDFFGKEPRRTMNASECVARGCALQCAILSPTFKVREFQVNDGFPFSIALSWKQDSQNSAPQQTLVFPKGNVIPSIKALTFYKSSTFEVDVLYVDTCDSQIPQKISTYTIGPFQPSKGERAKLKVKVRLNIHGIVTVDSAMMLEEDVAVPVSSANEAPKDTTKMDTDDAPSDPVSGTDVNVHEPDTTEAAPAAENGTQNPEEKSVPMETDAKVEPSKRKVKRTSVPVHALVYGALAAADLQKAVEKEYEMALQDRVMEETKEKKNAVEAYVYDMRNKLYDRYNDFVTPEEKEGLIGKLQEVEDWLYEDGEDETKGVYISKLEDLKKIGDPIEARYKESTERGSSVDQLVYCINSFREAALSSDQKFGHIDISEKQKVINECSEVENWLRERKQQQDALPKHTDPVLLVSDLKKKAEALDRFCKPIMTKPKPAPKPQTPPPHTPPPQPEAQASDPQTPEQQQSGTGAAGEPGSEGGVQQASGEQMDMDRPDDSADVAA

SEQ ID NO: 39370 - protein, 729 aa, Zea mays subsp. mays
  peptide (1)..(729): Ceres Seq. ID no. 12375068
  misc_feature (1)..(569): Pfam Name: Pfam Description:  Hsp70 protein
  misc_feature (1)..(694): NCBI GI NO: 17473863 NR Description: putative heat-shock protein [Arabidopsis thaliana]
  misc_feature (1)..(689): NCBI GI NO: 15220026 NR Description: putative heat-shock protein; protein id:At1g79930
  misc_feature (1)..(689): NCBI GI NO: 7450157 NR Description: heat shock protein 91 - Arabidopsis thaliana
  misc_feature (1)..(516): NCBI GI NO: 30699465 NR Description: heat shock protein hsp70, putative
  misc_feature (1)..(719): NCBI GI NO: 40254361 NR Description: osmotic stress protein
  misc_feature (1)..(719): NCBI GI NO: 1098541 NR Description: osmotic stress protein 94
  misc_feature (1)..(719): NCBI GI NO: 39645395 NR Description: Unknown (protein for MGC:76295)
  misc_feature (1)..(400): NCBI GI NO: 12230134 NR Description: HEAT SHOCK PROTEIN HOMOLOG PSS1
  misc_feature (426)..(572): NCBI GI NO: 12230134 NR Description: HEAT SHOCK PROTEIN HOMOLOG PSS1
  misc_feature (1)..(400): NCBI GI NO: 7441858 NR Description: heat shock protein 70 - fission yeast
MVLSNLKGIAEGNLKTAVVDCCIGIPVYFSDLQRRAVLDAATIAGLTPLQLFHETTATALAYGIYKTDLPEHDQLNVAFVDVGHASLQVSIVGYKKGQLKMLSHAYDRSLGGRDFDEALFKHFAAKFKEEYKIDVYQNARACLRLRVACEKLKKMLSANPEAPLNIECLMDEKDVRGFIKREEFEHISAPVLVRVKGPLEKALAEAGLTTENVHFVEVVGSGSRVPAIIKIITDFFGKEPRRTMNASECVARGCALQCAILSPTFKVREFQVNDGFPFSIALSWKQDSQNSAPQQTLVFPKGNVIPSIKALTFYKSSTFEVDVLYVDTCDSQIPQKISTYTIGPFQPSKGERAKLKVKVRLNIHGIVTVDSAMMLEEDVAVPVSSANEAPKDTTKMDTDDAPSDPVSGTDVNVHEPDTTEAAPAAENGTQNPEEKSVPMETDAKVEPSKRKVKRTSVPVHALVYGALAAADLQKAVEKEYEMALQDRVMEETKEKKNAVEAYVYDMRNKLYDRYNDFVTPEEKEGLIGKLQEVEDWLYEDGEDETKGVYISKLEDLKKIGDPIEARYKESTERGSSVDQLVYCINSFREAALSSDQKFGHIDISEKQKVINECSEVENWLRERKQQQDALPKHTDPVLLVSDLKKKAEALDRFCKPIMTKPKPAPKPQTPPPHTPPPQPEAQASDPQTPEQQQSGTGAAGEPGSEGGVQQASGEQMDMDRPDDSADVAA

SEQ ID NO: 39371 - DNA, 1678 bp, Zea mays subsp. mays
  misc_feature (1)..(1678): Ceres Seq. ID no. 12363462
gcacgagaccattacctagaacatcctaattgaaaaacagtcctcaccaccagaccaaatcgcagtcgcgctcgagctcaagccccgccgccgacgccgtcatctgcgccccagaaccccgtatttccctccgccgccttccgatctctcgctcctccccatgtcggagaaaaagcgccgcgccggtgcgagcgcggccggcgccgcatccagctccaagaagccgcgtgcttcctcggccgcgtcgtacgccgagtccctccgctcgaagctccgccccgacgcctccatcctggccaccctccgctccctcgcttctgcctccgcttccaaatccaaggccgacgccaggtccctcgcggaccacgacccgtgcgcggaccccgcctcctcgtacatcgtggtggccgaccaggactccacctccgtcacctcccgcatcaaccgcctcgtccttgccgccgcgcgcagcatcctctccggccggggcttctccttcgcggtgccctcgcgcgccgcctctaaccaggtctacctcccggacctcgaccgcatcgtgctcgtccgccgcgagtccgcgcgccccttcgccaacgtcgccaccgcgcggaaggccaccatcacggcgcgagtcctctccctcgtccacgccgtcctcggcaggggcatccacgtcaccaagcgtgacctcttctacaccgacgtcaagctcttcggcgaccagacccagtctgacgccgtcctcgacgacgtctcctgcatgctcggatgcaccaggtcctcgctccacgtcgtcgcctccgagaagggcgtcgtcgtcggccgccttgtcttcgccgacgacggggaccggatcgactgcacgcgcatgggcgtcggcggcaaggccattccgcccaacgtcgacagggtctcgggcatcgagagcgacgcgctcttcatcctcctggtggagaaggacgctgcattcatgcgactcgccgaggacaggttctacaaccgcttcccctgcatcattctgacggccaaggggcagccagatgtcgccacccggctgttcctgcggaggctcaaggttgagctgaagctgccagtgctcgcgctggtggattctgatccatacgggctcaagatcttgtcggtgtacatgtgtggttccaagaacatgtcgtatgacagtgccaatctgacgacgccggacatcaagtggctcggtgtccggccgagcgacctggacaagtacagagtgccggagcagtgccgtctccccatgaccgatcacgatatcaaggtggggaaagagctgctcgaggaggacttcgtgaagcagaatgagggctgggtgaaggagctggagacgatgctgcgcaccaagcaaaaggctgagatacaggccctcagttccttcgggttccagtacctcaccgaggtctacctgcctcttaagttgcaggagcaggattggatttgagaactctccaatgctagatatcagtaatttccctagccaagataatgccctccgctcagtattttcaaggaccaaattggcatgaatgaagacttcgccatctagttaatcacatgtatttttgaacaccagctgttgtattatttatttctgctggagaactgttctgtggaaaacattgctgccagatatatgtgctggaatttg

SEQ ID NO: 39372 - protein, 436 aa, Zea mays subsp. mays
  peptide (1)..(436): Ceres Seq. ID no. 12363463
  misc_feature (145)..(212): Pfam Name: Pfam Description:  Type IIB DNA topoisomerase
  misc_feature (1)..(436): NCBI GI NO: 27476077 NR Description: Hypothetical protein
  misc_feature (18)..(436): NCBI GI NO: 15241959 NR Description: meiosis specific - like protein
  misc_feature (87)..(436): NCBI GI NO: 6755624 NR Description: sporulation protein
  misc_feature (87)..(436): NCBI GI NO: 6912680 NR Description: SPO11 meiotic protein covalently bound to DSB-like
  misc_feature (87)..(436): NCBI GI NO: 9501147 NR Description: dJ481F12
  misc_feature (148)..(436): NCBI GI NO: 5453472 NR Description: meiotic DNA transesterase/topoisomerase homologvariant A
  misc_feature (148)..(436): NCBI GI NO: 9501146 NR Description: dJ481F12
  misc_feature (148)..(436): NCBI GI NO: 5453474 NR Description: meiotic DNA transesterase/topoisomerase homologvariant B
  misc_feature (160)..(436): NCBI GI NO: 5733397 NR Description: SPO11 protein [Mus musculus]
  misc_feature (117)..(436): NCBI GI NO: 30696943 NR Description: expressed protein [Arabidopsis thaliana]
MSEKKRRAGASAAGAASSSKKPRASSAASYAESLRSKLRPDASILATLRSLASASASKSKADARSLADHDPCADPASSYIVVADQDSTSVTSRINRLVLAAARSILSGRGFSFAVPSRAASNQVYLPDLDRIVLVRRESARPFANVATARKATITARVLSLVHAVLGRGIHVTKRDLFYTDVKLFGDQTQSDAVLDDVSCMLGCTRSSLHVVASEKGVVVGRLVFADDGDRIDCTRMGVGGKAIPPNVDRVSGIESDALFILLVEKDAAFMRLAEDRFYNRFPCIILTAKGQPDVATRLFLRRLKVELKLPVLALVDSDPYGLKILSVYMCGSKNMSYDSANLTTPDIKWLGVRPSDLDKYRVPEQCRLPMTDHDIKVGKELLEEDFVKQNEGWVKELETMLRTKQKAEIQALSSFGFQYLTEVYLPLKLQEQDWI

SEQ ID NO: 39373 - protein, 236 aa, Zea mays subsp. mays
  peptide (1)..(236): Ceres Seq. ID no. 12363464
  misc_feature (60)..(132): Pfam Name: Pfam Description:  Toprim domain
  misc_feature (1)..(236): NCBI GI NO: 27476077 NR Description: Hypothetical protein
  misc_feature (1)..(236): NCBI GI NO: 15241959 NR Description: meiosis specific - like protein
  misc_feature (1)..(236): NCBI GI NO: 6755624 NR Description: sporulation protein
  misc_feature (1)..(236): NCBI GI NO: 6912680 NR Description: SPO11 meiotic protein covalently bound to DSB-like
  misc_feature (1)..(236): NCBI GI NO: 9501147 NR Description: dJ481F12
  misc_feature (1)..(236): NCBI GI NO: 5453472 NR Description: meiotic DNA transesterase/topoisomerase homologvariant A
  misc_feature (1)..(236): NCBI GI NO: 9501146 NR Description: dJ481F12
  misc_feature (1)..(236): NCBI GI NO: 5453474 NR Description: meiotic DNA transesterase/topoisomerase homologvariant B
  misc_feature (1)..(236): NCBI GI NO: 5733397 NR Description: SPO11 protein [Mus musculus]
  misc_feature (1)..(236): NCBI GI NO: 30696943 NR Description: expressed protein [Arabidopsis thaliana]
MLGCTRSSLHVVASEKGVVVGRLVFADDGDRIDCTRMGVGGKAIPPNVDRVSGIESDALFILLVEKDAAFMRLAEDRFYNRFPCIILTAKGQPDVATRLFLRRLKVELKLPVLALVDSDPYGLKILSVYMCGSKNMSYDSANLTTPDIKWLGVRPSDLDKYRVPEQCRLPMTDHDIKVGKELLEEDFVKQNEGWVKELETMLRTKQKAEIQALSSFGFQYLTEVYLPLKLQEQDWI

SEQ ID NO: 39374 - DNA, 2094 bp, Zea mays subsp. mays
  misc_feature (1)..(2094): Ceres Seq. ID no. 12417627
attgtgctcgctgcgctgtgtgtttctggataataaaaaacccgccagcccccgcatcggagggccgcgcaagtgggtcaactcgcaactgaagaccaaaggcgagagccggctgcccggattccggaagcgcccaagcccccaacgcgaccgtcgctgtcgccaccgcgctcggctcgcccgcgtccacagaagccgccagggccatacgccgatgaatcctgccgcgacggcggatcccagcagctccagcacctcggcggccacgctgcggaagcggatgatctctatagacacggctcgacgaggagccgacggcgcgtcgcctgagaccgcgcccaggccagatcgggcgggtagtgataaggcgccgcaggagcgggaggaggagggctcgatggcggcctccgcgcctgcggcggcagcagcgagggagagtgacctggaggcggtgggcgagccgatgagccccgcggggcggctgttccgcgagacgcacttcaactgctacatcgtggccgtgatcgggctgggcgcggcggtggacgtcgcggcggcgcgcgcggggctggaggtcacgctcgtccgccacccacgcttctccagcgtccaggtgaatgatggtgatgcgagaaagaacgccaagccgcggtgggtgcggaccacggttaacctggatgatcacatcatcgtcccctgcctggaacccgctgccacgtcgaccaagccggaccaggccgtggaggactacctgtcctggctgtccacggcgcccatggaccactcccgcccgctctgggagttccacgtcctggacttcccgacgtccgaggccaccgccaccgttgccatccgcatgcaccactccctcggcgacggcgtctcgctgctgtcgctgctcatcgcgtgcacccgcagcgccgcggacccggcgcggctgccggagctgccgcccgcgccgcgccgcgcgagccctgtctacgccaggcagcgccccccgctttccgcgggcctcgtggcgttctcgctgtggctgtggtcctacgtcttgctcgcgtggcacacactggtggacgtcgcgtgcttcgtggccacggcgtggttcctgcgcgaccagcgcacacccttcatggccgcgtccgagggcgtcgagttccgccgcaagcgcttcgtgcaccgcacgctcagcctcgacgacgtcaagttcgtcaagaatgtcatgaagtgtactgtcaacgatgtcctgattggagtgactaacgcagggttgtcgcggtattattttcgaaaaaccagtgataccaacaacgagaggaaaaaatcgcagaatattcgtgtccgatcagctctccttgttaacattaggagaacacctggtttacatgcattggcggaaatgatggattctatcaagaacaatagggcaaaatgggggaacctgattggttacatgatactgcctttccacatagccatgcacgatgatcctcttgaatacatccgccaagggaaaaggacagctcaaaggaagaaggcttcattagaagcggttttcacgtactggagtgggaacctaatagtcaaactatttggcatgaaggctgcagcagctctctgctatggtatgttcacaaatacgaccatgtcattctcaagcatggtcggacctgctgagaaggtggagttctacggccatccaatcatctacatcgctccctctgtctacgggcatccacatgctctgactatacattaccaaagctatacgaactccatcaagcttgtcctcgcagtggatgatgctcagtttccagactctcatcagcttttggacgacttcgccgagtccctcaggctcatccgtcaggcagcttcaacaagatgacagacacaaacaagagcatttttttcagtagaatgtagactgttggcgagaactcgcatacaaatgctggacaataacttatcaggaaattgatggcctggttacctgactggggactcttgaactttcaagaaatcattagaggcaaattgtaaagtgtaaagactagtatgtaatatcaatattgttcaaccaattgcggtggaatt

SEQ ID NO: 39375 - protein, 627 aa, Zea mays subsp. mays
  peptide (1)..(627): Ceres Seq. ID no. 12417628
  misc_feature (153)..(447): Pfam Name: Pfam Description:  Condensation domain
  misc_feature (153)..(627): NCBI GI NO: 34909900 NR Description: P0665A11.10
  misc_feature (218)..(625): NCBI GI NO: 34911182 NR Description: P0019E03.6
  misc_feature (104)..(409): NCBI GI NO: 34909902 NR Description: P0665A11.11
  misc_feature (429)..(627): NCBI GI NO: 34909902 NR Description: P0665A11.11
  misc_feature (143)..(627): NCBI GI NO: 9759186 NR Description: emb|CAB66399
  misc_feature (143)..(627): NCBI GI NO: 26451548 NR Description: unknown protein [Arabidopsis thaliana]
  misc_feature (143)..(627): NCBI GI NO: 30696326 NR Description: expressed protein [Arabidopsis thaliana]
  misc_feature (145)..(627): NCBI GI NO: 15229103 NR Description: putative protein; protein id: At3g49200.1
  misc_feature (142)..(627): NCBI GI NO: 15229104 NR Description: putative protein; protein id: At3g49210.1
  misc_feature (153)..(627): NCBI GI NO: 15229102 NR Description: putative protein; protein id: At3g49190.1
LCSLRCVFLDNKKPASPRIGGPRKWVNSQLKTKGESRLPGFRKRPSPQRDRRCRHRARLARVHRSRQGHTPMNPAATADPSSSSTSAATLRKRMISIDTARRGADGASPETAPRPDRAGSDKAPQEREEEGSMAASAPAAAAARESDLEAVGEPMSPAGRLFRETHFNCYIVAVIGLGAAVDVAAARAGLEVTLVRHPRFSSVQVNDGDARKNAKPRWVRTTVNLDDHIIVPCLEPAATSTKPDQAVEDYLSWLSTAPMDHSRPLWEFHVLDFPTSEATATVAIRMHHSLGDGVSLLSLLIACTRSAADPARLPELPPAPRRASPVYARQRPPLSAGLVAFSLWLWSYVLLAWHTLVDVACFVATAWFLRDQRTPFMAASEGVEFRRKRFVHRTLSLDDVKFVKNVMKCTVNDVLIGVTNAGLSRYYFRKTSDTNNERKKSQNIRVRSALLVNIRRTPGLHALAEMMDSIKNNRAKWGNLIGYMILPFHIAMHDDPLEYIRQGKRTAQRKKASLEAVFTYWSGNLIVKLFGMKAAAALCYGMFTNTTMSFSSMVGPAEKVEFYGHPIIYIAPSVYGHPHALTIHYQSYTNSIKLVLAVDDAQFPDSHQLLDDFAESLRLIRQAASTR

SEQ ID NO: 39376 - protein, 556 aa, Zea mays subsp. mays
  peptide (1)..(556): Ceres Seq. ID no. 12417629
  misc_feature (82)..(376): Pfam Name: Pfam Description:  Condensation domain
  misc_feature (82)..(556): NCBI GI NO: 34909900 NR Description: P0665A11.10
  misc_feature (147)..(554): NCBI GI NO: 34911182 NR Description: P0019E03.6
  misc_feature (33)..(338): NCBI GI NO: 34909902 NR Description: P0665A11.11
  misc_feature (358)..(556): NCBI GI NO: 34909902 NR Description: P0665A11.11
  misc_feature (72)..(556): NCBI GI NO: 9759186 NR Description: emb|CAB66399
  misc_feature (72)..(556): NCBI GI NO: 26451548 NR Description: unknown protein [Arabidopsis thaliana]
  misc_feature (72)..(556): NCBI GI NO: 30696326 NR Description: expressed protein [Arabidopsis thaliana]
  misc_feature (74)..(556): NCBI GI NO: 15229103 NR Description: putative protein; protein id: At3g49200.1
  misc_feature (71)..(556): NCBI GI NO: 15229104 NR Description: putative protein; protein id: At3g49210.1
  misc_feature (82)..(556): NCBI GI NO: 15229102 NR Description: putative protein; protein id: At3g49190.1
MNPAATADPSSSSTSAATLRKRMISIDTARRGADGASPETAPRPDRAGSDKAPQEREEEGSMAASAPAAAAARESDLEAVGEPMSPAGRLFRETHFNCYIVAVIGLGAAVDVAAARAGLEVTLVRHPRFSSVQVNDGDARKNAKPRWVRTTVNLDDHIIVPCLEPAATSTKPDQAVEDYLSWLSTAPMDHSRPLWEFHVLDFPTSEATATVAIRMHHSLGDGVSLLSLLIACTRSAADPARLPELPPAPRRASPVYARQRPPLSAGLVAFSLWLWSYVLLAWHTLVDVACFVATAWFLRDQRTPFMAASEGVEFRRKRFVHRTLSLDDVKFVKNVMKCTVNDVLIGVTNAGLSRYYFRKTSDTNNERKKSQNIRVRSALLVNIRRTPGLHALAEMMDSIKNNRAKWGNLIGYMILPFHIAMHDDPLEYIRQGKRTAQRKKASLEAVFTYWSGNLIVKLFGMKAAAALCYGMFTNTTMSFSSMVGPAEKVEFYGHPIIYIAPSVYGHPHALTIHYQSYTNSIKLVLAVDDAQFPDSHQLLDDFAESLRLIRQAASTR

SEQ ID NO: 39377 - protein, 534 aa, Zea mays subsp. mays
  peptide (1)..(534): Ceres Seq. ID no. 12417630
  misc_feature (60)..(354): Pfam Name: Pfam Description:  Condensation domain
  misc_feature (60)..(534): NCBI GI NO: 34909900 NR Description: P0665A11.10
  misc_feature (125)..(532): NCBI GI NO: 34911182 NR Description: P0019E03.6
  misc_feature (11)..(316): NCBI GI NO: 34909902 NR Description: P0665A11.11
  misc_feature (336)..(534): NCBI GI NO: 34909902 NR Description: P0665A11.11
  misc_feature (50)..(534): NCBI GI NO: 9759186 NR Description: emb|CAB66399
  misc_feature (50)..(534): NCBI GI NO: 26451548 NR Description: unknown protein [Arabidopsis thaliana]
  misc_feature (50)..(534): NCBI GI NO: 30696326 NR Description: expressed protein [Arabidopsis thaliana]
  misc_feature (52)..(534): NCBI GI NO: 15229103 NR Description: putative protein; protein id: At3g49200.1
  misc_feature (49)..(534): NCBI GI NO: 15229104 NR Description: putative protein; protein id: At3g49210.1
  misc_feature (60)..(534): NCBI GI NO: 15229102 NR Description: putative protein; protein id: At3g49190.1
MISIDTARRGADGASPETAPRPDRAGSDKAPQEREEEGSMAASAPAAAAARESDLEAVGEPMSPAGRLFRETHFNCYIVAVIGLGAAVDVAAARAGLEVTLVRHPRFSSVQVNDGDARKNAKPRWVRTTVNLDDHIIVPCLEPAATSTKPDQAVEDYLSWLSTAPMDHSRPLWEFHVLDFPTSEATATVAIRMHHSLGDGVSLLSLLIACTRSAADPARLPELPPAPRRASPVYARQRPPLSAGLVAFSLWLWSYVLLAWHTLVDVACFVATAWFLRDQRTPFMAASEGVEFRRKRFVHRTLSLDDVKFVKNVMKCTVNDVLIGVTNAGLSRYYFRKTSDTNNERKKSQNIRVRSALLVNIRRTPGLHALAEMMDSIKNNRAKWGNLIGYMILPFHIAMHDDPLEYIRQGKRTAQRKKASLEAVFTYWSGNLIVKLFGMKAAAALCYGMFTNTTMSFSSMVGPAEKVEFYGHPIIYIAPSVYGHPHALTIHYQSYTNSIKLVLAVDDAQFPDSHQLLDDFAESLRLIRQAASTR

SEQ ID NO: 39378 - DNA, 1582 bp, Zea mays subsp. mays
  misc_feature (1)..(1582): Ceres Seq. ID no. 13499244
  misc_feature (468)..(468): n is a, c, t, g, unknown, or other
  misc_feature (469)..(469): n is a, c, t, g, unknown, or other
actattatagccaacgtctctgcgcgtgcggtgccggagcggcggagcctcccctccctcccccatcctacctcaccatgatggcaatgccggacgcggatcgcaacgccatgtcggcgccgctgctcccgcggcccgcgtgcctgacggcgtccttctcctcctcctcctcctccttcgcgtccttctcctcctccaactcctccagctccgacccctcacccccgtccgccttcccgccggcggggccgtgcaaggcgctggcggtgctgcgggaccacgcgggctccgtctccagcctctccctctgcggggagttcctgctcagcgcgtccacggccggcgacgtcgtggcgtggcagcagcccgacctccggcgcttcgcgcgcttcggccacggcgagagcggcggctccgtcaaggcgctggcggccgcgggcggccgcgtcttctccgcgcaccaggacnnccgcgtccgcgtctggcgcgtctcccgcggccgccgctccgagaacgccttcaagctcgtcgccgcgctgcccaccgccagggactacctgggccgggtgttccgccaggacagctacgtgcagaccaccgccaccacggcggcgcgccgcgcccaccaccgccgcctctggatcgagcacgccaacagcatctcctgcctcgccgtcgccgtgcacgacgccgcgctcctctactcgggctcctgggaccgcacgctcaaggtctggcgcgtcgccgacctcaggtgcctcgagtccatccgcgcccacgacgacgccgtcaacgccgtcgccgcagacgccggcatcgtctactccgcctccgccgacggccgcgtcaaggcctgggagaaggggaaggcgtcgcatttcctccagggcgtcctcgtcgcccgcgacggcgtctcgtggaacgcgctcaccgtcgccgccgacgaccgccggctctacgccgcgggctccgacggccacgtcgccgcctgggaccgcctcggcggcaggaccgccgcgcgctggaccctcgcgtgcgacgtcagggcgcacgacgccgccgtgctgtgcctctgcgtcgccagggacctgctctgcaccggctccgccgacaagaccatcggcctgtggcgccgtcagagcgccggcgagctggccaaggtgggcgtcgtcagaggccacgagggccccgtcaaatgcatccaggcgtcctggtgcaggctcaccaatggctgcatggtctacagcgggagccttgacaagaccatcagagtttggtgggtgcccggtgccttgcagcatgccaatgacaaagatcagcagcagcagcagcaaaaagatggcttcaaggatcacaagcacaaggcttctttgttcttgagatgaaacttgtgtctgctccaaatttcgaaatggattgattgagattgctcaggtctagtctgtattttggattggttgatttatattacaaggataaatgggtaacacacaaaagtagccatagagtggatgtgcttctgtaaatggctgtatactatgttctgattcttctttgatataggttttgactacatggagag

SEQ ID NO: 39379 - protein, 460 aa, Zea mays subsp. mays
  peptide (1)..(460): Ceres Seq. ID no. 13499245
  misc_feature (385)..(426): Pfam Name: Pfam Description:  WD domain, G-beta repeat
  misc_feature (27)..(460): NCBI GI NO: 34906600 NR Description: hypothetical protein~similar to Arabidopsisthaliana
  misc_feature (53)..(449): NCBI GI NO: 15231088 NR Description: transducin / WD-40 repeat protein family
  misc_feature (44)..(425): NCBI GI NO: 15221675 NR Description: transducin / WD-40 repeat protein family
  misc_feature (88)..(451): NCBI GI NO: 15225317 NR Description: transducin / WD-40 repeat protein family
  misc_feature (18)..(427): NCBI GI NO: 15229740 NR Description: transducin / WD-40 repeat protein family
  misc_feature (89)..(428): NCBI GI NO: 15220271 NR Description: transducin / WD-40 repeat protein family
  misc_feature (95)..(427): NCBI GI NO: 15230244 NR Description: transducin / WD-40 repeat protein family
  misc_feature (76)..(427): NCBI GI NO: 15240616 NR Description: transducin / WD-40 repeat protein family
  misc_feature (46)..(427): NCBI GI NO: 18395507 NR Description: transducin / WD-40 repeat protein family
  misc_feature (89)..(427): NCBI GI NO: 15222143 NR Description: transducin / WD-40 repeat protein family
  misc_feature (156)..(156): Xaa is any aa, unknown or other
YYSQRLCACGAGAAEPPLPPPSYLTMMAMPDADRNAMSAPLLPRPACLTASFSSSSSSFASFSSSNSSSSDPSPPSAFPPAGPCKALAVLRDHAGSVSSLSLCGEFLLSASTAGDVVAWQQPDLRRFARFGHGESGGSVKALAAAGGRVFSAHQDXRVRVWRVSRGRRSENAFKLVAALPTARDYLGRVFRQDSYVQTTATTAARRAHHRRLWIEHANSISCLAVAVHDAALLYSGSWDRTLKVWRVADLRCLESIRAHDDAVNAVAADAGIVYSASADGRVKAWEKGKASHFLQGVLVARDGVSWNALTVAADDRRLYAAGSDGHVAAWDRLGGRTAARWTLACDVRAHDAAVLCLCVARDLLCTGSADKTIGLWRRQSAGELAKVGVVRGHEGPVKCIQASWCRLTNGCMVYSGSLDKTIRVWWVPGALQHANDKDQQQQQQKDGFKDHKHKASLFLR

SEQ ID NO: 39380 - protein, 435 aa, Zea mays subsp. mays
  peptide (1)..(435): Ceres Seq. ID no. 13499246
  misc_feature (360)..(401): Pfam Name: Pfam Description:  WD domain, G-beta repeat
  misc_feature (2)..(435): NCBI GI NO: 34906600 NR Description: hypothetical protein~similar to Arabidopsisthaliana
  misc_feature (28)..(424): NCBI GI NO: 15231088 NR Description: transducin / WD-40 repeat protein family
  misc_feature (19)..(400): NCBI GI NO: 15221675 NR Description: transducin / WD-40 repeat protein family
  misc_feature (63)..(426): NCBI GI NO: 15225317 NR Description: transducin / WD-40 repeat protein family
  misc_feature (1)..(402): NCBI GI NO: 15229740 NR Description: transducin / WD-40 repeat protein family
  misc_feature (64)..(403): NCBI GI NO: 15220271 NR Description: transducin / WD-40 repeat protein family
  misc_feature (70)..(402): NCBI GI NO: 15230244 NR Description: transducin / WD-40 repeat protein family
  misc_feature (51)..(402): NCBI GI NO: 15240616 NR Description: transducin / WD-40 repeat protein family
  misc_feature (21)..(402): NCBI GI NO: 18395507 NR Description: transducin / WD-40 repeat protein family
  misc_feature (64)..(402): NCBI GI NO: 15222143 NR Description: transducin / WD-40 repeat protein family
  misc_feature (131)..(131): Xaa is any aa, unknown or other
MMAMPDADRNAMSAPLLPRPACLTASFSSSSSSFASFSSSNSSSSDPSPPSAFPPAGPCKALAVLRDHAGSVSSLSLCGEFLLSASTAGDVVAWQQPDLRRFARFGHGESGGSVKALAAAGGRVFSAHQDXRVRVWRVSRGRRSENAFKLVAALPTARDYLGRVFRQDSYVQTTATTAARRAHHRRLWIEHANSISCLAVAVHDAALLYSGSWDRTLKVWRVADLRCLESIRAHDDAVNAVAADAGIVYSASADGRVKAWEKGKASHFLQGVLVARDGVSWNALTVAADDRRLYAAGSDGHVAAWDRLGGRTAARWTLACDVRAHDAAVLCLCVARDLLCTGSADKTIGLWRRQSAGELAKVGVVRGHEGPVKCIQASWCRLTNGCMVYSGSLDKTIRVWWVPGALQHANDKDQQQQQQKDGFKDHKHKASLFLR

SEQ ID NO: 39381 - protein, 434 aa, Zea mays subsp. mays
  peptide (1)..(434): Ceres Seq. ID no. 13499247
  misc_feature (359)..(400): Pfam Name: Pfam Description:  WD domain, G-beta repeat
  misc_feature (1)..(434): NCBI GI NO: 34906600 NR Description: hypothetical protein~similar to Arabidopsisthaliana
  misc_feature (27)..(423): NCBI GI NO: 15231088 NR Description: transducin / WD-40 repeat protein family
  misc_feature (18)..(399): NCBI GI NO: 15221675 NR Description: transducin / WD-40 repeat protein family
  misc_feature (62)..(425): NCBI GI NO: 15225317 NR Description: transducin / WD-40 repeat protein family
  misc_feature (1)..(401): NCBI GI NO: 15229740 NR Description: transducin / WD-40 repeat protein family
  misc_feature (63)..(402): NCBI GI NO: 15220271 NR Description: transducin / WD-40 repeat protein family
  misc_feature (69)..(401): NCBI GI NO: 15230244 NR Description: transducin / WD-40 repeat protein family
  misc_feature (50)..(401): NCBI GI NO: 15240616 NR Description: transducin / WD-40 repeat protein family
  misc_feature (20)..(401): NCBI GI NO: 18395507 NR Description: transducin / WD-40 repeat protein family
  misc_feature (63)..(401): NCBI GI NO: 15222143 NR Description: transducin / WD-40 repeat protein family
  misc_feature (130)..(130): Xaa is any aa, unknown or other
MAMPDADRNAMSAPLLPRPACLTASFSSSSSSFASFSSSNSSSSDPSPPSAFPPAGPCKALAVLRDHAGSVSSLSLCGEFLLSASTAGDVVAWQQPDLRRFARFGHGESGGSVKALAAAGGRVFSAHQDXRVRVWRVSRGRRSENAFKLVAALPTARDYLGRVFRQDSYVQTTATTAARRAHHRRLWIEHANSISCLAVAVHDAALLYSGSWDRTLKVWRVADLRCLESIRAHDDAVNAVAADAGIVYSASADGRVKAWEKGKASHFLQGVLVARDGVSWNALTVAADDRRLYAAGSDGHVAAWDRLGGRTAARWTLACDVRAHDAAVLCLCVARDLLCTGSADKTIGLWRRQSAGELAKVGVVRGHEGPVKCIQASWCRLTNGCMVYSGSLDKTIRVWWVPGALQHANDKDQQQQQQKDGFKDHKHKASLFLR

SEQ ID NO: 39382 - DNA, 1416 bp, Zea mays subsp. mays
  misc_feature (1)..(1416): Ceres Seq. ID no. 12390128
agcattttaacatcgtttgaagtaggaacctcacccagattcattgaaccgccagctctgccatcttatccttgccacgtgaagtgacgttcttggcgaccccatcaatctcctcgatttggatgtccacgagcttattgagctgttgctcctgcgtcctgagatcctctggctgctgctcaacagtttgttcatcctcatccccaatctcatgtgtccaatacacagcaaaagatgcctccttattgaaactggttggcatctgcaacagacgcttcctgttagttccagaggcactgccaaggatctcccccttcatgaggtcatatatgcaggccctgaagttgtccatgctcttatgatcctgagagtcgaggcttaggaagatcagaatttcccagcaccggaggaactgtttcttctttatcttcagcttctaacgaacagtctccatcaggtcagccggtggaaccattctcaaactttgggccctttttgacaggttggtctccttcagagacgagacaatagcaccaagtgcaggtttgatcggatcaaacatgagcaaacggaggcagtcaacggatgatctcacatactgcaggtcaagaagcggaaggcgcgggtgcctctcgacgtcgccgacgccgtgatggagccagtacggcggtccggccggctcgccaacctcccggataagcccgtgtaccgcgagaaggttcccgattttgggatgaagattaggaggacgtacggatcggtgagaagagatctgaccaaccgggtgtacgcgaccgacgatgcgaggagctacgccatctctaaggcggaggatctggagcaagagctggactccagcttccccatcttcatcaagcccatgacccagtcccatgtcaccgggggcttctggctgggccttccgattcatttctgccggaagtatctgcccaagcgtgacgagatgatcaccctggtggatgaggatgatgacgagtccgacacgctgtacctcgcaatgaagcgggggctcagtgctggatggagagggtttgccgtccagcagaagctggtggatggagattgcctggtcttccagctgattgagcaaacaaagttcaaggtctacataactagagcaagttcctactacgaaagcgaggactgatgaaactagtagcttgtaatctggtgattggagctcagttatggaggtggctgcgttggacaagcttgcatctgggaatcgctggggtgtcttgaaactttttggtggcagaaagttagctgatgtatgaaacccagtatctcctaccaattgttgctgatttgtgtacttcttgggcttaccacttgcacggttcagaaacctgcactatgtaagggggttgttggtggcagctaacctcgttttgt

SEQ ID NO: 39383 - protein, 171 aa, Zea mays subsp. mays; identical to SEQ ID NO: 32442
  peptide (1)..(171): Ceres Seq. ID no. 12390129
  misc_feature (73)..(164): Pfam Name: Pfam Description:  B3 DNA binding domain
  misc_feature (1)..(164): NCBI GI NO: 9294620 NR Description: gene_id:MVI11.9~unknown protein
  misc_feature (1)..(164): NCBI GI NO: 15217278 NR Description: Unknown protein [Oryza sativa]
  misc_feature (31)..(169): NCBI GI NO: 30694114 NR Description: expressed protein [Arabidopsis thaliana]
  misc_feature (1)..(164): NCBI GI NO: 15237157 NR Description: unknown protein; protein id: At5g58280.1
  misc_feature (55)..(151): NCBI GI NO: 34904376 NR Description: unnamed protein product
  misc_feature (31)..(88): NCBI GI NO: 10177273 NR Description: gene_id:MJB21.7~unknown protein

SEQ ID NO: 39384 - protein, 144 aa, Zea mays subsp. mays; identical to SEQ ID NO: 32443
  peptide (1)..(144): Ceres Seq. ID no. 12390130
  misc_feature (46)..(137): Pfam Name: Pfam Description:  B3 DNA binding domain
  misc_feature (1)..(137): NCBI GI NO: 9294620 NR Description: gene_id:MVI11.9~unknown protein
  misc_feature (1)..(137): NCBI GI NO: 15217278 NR Description: Unknown protein [Oryza sativa]
  misc_feature (4)..(142): NCBI GI NO: 30694114 NR Description: expressed protein [Arabidopsis thaliana]
  misc_feature (1)..(137): NCBI GI NO: 15237157 NR Description: unknown protein; protein id: At5g58280.1
  misc_feature (28)..(124): NCBI GI NO: 34904376 NR Description: unnamed protein product
  misc_feature (4)..(61): NCBI GI NO: 10177273 NR Description: gene_id:MJB21.7~unknown protein

SEQ ID NO: 39385 - protein, 95 aa, Zea mays subsp. mays
  peptide (1)..(95): Ceres Seq. ID no. 12390131
  misc_feature (1)..(88): Pfam Name: Pfam Description:  B3 DNA binding domain
  misc_feature (1)..(88): NCBI GI NO: 9294620 NR Description: gene_id:MVI11.9~unknown protein
  misc_feature (1)..(88): NCBI GI NO: 15217278 NR Description: Unknown protein [Oryza sativa]
  misc_feature (1)..(93): NCBI GI NO: 30694114 NR Description: expressed protein [Arabidopsis thaliana]
  misc_feature (1)..(88): NCBI GI NO: 15237157 NR Description: unknown protein; protein id: At5g58280.1
  misc_feature (1)..(75): NCBI GI NO: 34904376 NR Description: unnamed protein product
  misc_feature (1)..(12): NCBI GI NO: 10177273 NR Description: gene_id:MJB21.7~unknown protein
MTQSHVTGGFWLGLPIHFCRKYLPKRDEMITLVDEDDDESDTLYLAMKRGLSAGWRGFAVQQKLVDGDCLVFQLIEQTKFKVYITRASSYYESED

SEQ ID NO: 39386 - DNA, 1955 bp, Zea mays subsp. mays
  misc_feature (1)..(1955): Ceres Seq. ID no. 12363415
ggcgaatccctgactttcttctccacgccgtgctctgcttcgagtgaggcctggttcagattttacaggggttcggttcgatctggtgtccgacggaggcggcggcggcggctcctctgctgttcgattgagggagaggggccatggaaaacccggcgccgccgaccaacccggcctccgccacgccgtcgccgtcgcggcagctgccggacttccagcagtcggttcgtctcaagtacgtgaagctggggtaccattacctcatcacccacggcatgtacctgctgctcaccccgctgatggtgctcgtggccgtgtacctctccacgctctccccgcgcgacgtcgccgacctgtgggcccacctccgcctcaacctcatctccgtgctggcctgctccacgctcctcgtcttcctcggcacggcctacttcctcacccgcccgcggcccgtgtacctggtcgacttcgcctgctacaagcccgggccggagcgtcggtgcacgcgcgacaccttcatgcgctgctccaggctcaccggctgcttcactgacgccagcctcgagttccagcgcaagatcctggagcgctcggggctgggcgaggacacgtaccttccccccgccgtcacgcgggtgccgcccaacccgtccatggacgaggcgcgcgcggaggcgcgggaggtcatgttcggcgccgtcgacgagctgctcgccaagacgggggtcaagcccaaggacatcgggatcctcgtggtgaactgcagcctgttcaacccgacgccgtcgctgtcggccatggtggtcaaccactacaagctgcgcgggaacgtggtgagctacaacctcggcgggatggggtgcagcgccgggctgctgtccgtggacctcgccaaggacctgctgcagacgcacccggggtcgtacgcgctggtcatcagcacggagaacatcacgctcaactggtactcggggaacgaccgctccaagctggtgtccaactgcctgttccggatgggcggcgccgcggtgctgctctcgaatcggcggtccgaccggcggcgggccaagtacgagctggtgcacacggtgcgcacgcacaagggcgcggacgaccggtgcttcggctgcgtgacgcaggaggaggacggcgagggcgtcgtgggcgtgtcgctgtcgagggacctgatggcggtggcgggcgacgcgctcaagacgaacataacaacgctgggcccgctggtgctgccgctgtcggagcagctgctgttcatggcgacgctggtcgccaagaagctgctcaagatgaagaaggtgaagccgtacatcccggatttcaaactggcgttcgagcacttctgcatccacgccggcggccgtgccgtgctggacgagctggagagcaacctggcgctcacggattggcacatggagccgtcgcggatgatgctgcaccggttcgggaacacgtccagcagctcgctctggtacgagctggcctacagcgaggccaaggggaggatccggcgccgccaccgggtgtggcagatcgcgttcgggtcagggttcaagtgcaacagcgccgtgtggagggcgctccggtcggtgaacccggcggaggagacgaacccgtggatggacgagatcgacaggtttcccgtggatgttcccaaggtctctaaggtttcaagcgactgaaatgcattgctagttgcgtgaatgatggagcttgcaattgtttggatagaagatctggttggaatttttcatagttcattactatatagttgtaggagataggaaaggcgatcgacttctctaatcttgaattatacatctgttaatgttgtttctgtatggcactcggtccctggcctatctatatagttgactgctcggtgttctgacagttctactatatctgttcattctccaactgttgatcactgttcttcc

SEQ ID NO: 39387 - protein, 517 aa, Zea mays subsp. mays
  peptide (1)..(517): Ceres Seq. ID no. 12363416
  misc_feature (342)..(486): Pfam Name: Pfam Description:  Chalcone and stilbene synthases
  misc_feature (1)..(514): NCBI GI NO: 9714501 NR Description: putative fatty acid elongase [Zea mays]
  misc_feature (16)..(514): NCBI GI NO: 15225767 NR Description: putative beta-ketoacyl-CoA synthase
  misc_feature (1)..(509): NCBI GI NO: 29417540 NR Description: beta-ketoacyl-CoA-synthase [Marchantia polymorpha]
  misc_feature (7)..(508): NCBI GI NO: 11066477 NR Description: fatty acid elongase 1-like protein
  misc_feature (7)..(516): NCBI GI NO: 14334714 NR Description: putative beta-ketoacyl-CoA synthase
  misc_feature (7)..(516): NCBI GI NO: 15239981 NR Description: beta-ketoacyl-CoA synthase; protein id:At5g43760
  misc_feature (3)..(516): NCBI GI NO: 1045614 NR Description: beta-ketoacyl-CoA synthase
  misc_feature (18)..(516): NCBI GI NO: 15219676 NR Description: putative beta-ketoacyl-CoA synthase
  misc_feature (18)..(516): NCBI GI NO: 18377979 NR Description: putative beta-ketoacyl-CoA synthase
  misc_feature (16)..(509): NCBI GI NO: 19908404 NR Description: putative fatty acid elongase [Tropaeolum majus]
MENPAPPTNPASATPSPSRQLPDFQQSVRLKYVKLGYHYLITHGMYLLLTPLMVLVAVYLSTLSPRDVADLWAHLRLNLISVLACSTLLVFLGTAYFLTRPRPVYLVDFACYKPGPERRCTRDTFMRCSRLTGCFTDASLEFQRKILERSGLGEDTYLPPAVTRVPPNPSMDEARAEAREVMFGAVDELLAKTGVKPKDIGILVVNCSLFNPTPSLSAMVVNHYKLRGNVVSYNLGGMGCSAGLLSVDLAKDLLQTHPGSYALVISTENITLNWYSGNDRSKLVSNCLFRMGGAAVLLSNRRSDRRRAKYELVHTVRTHKGADDRCFGCVTQEEDGEGVVGVSLSRDLMAVAGDALKTNITTLGPLVLPLSEQLLFMATLVAKKLLKMKKVKPYIPDFKLAFEHFCIHAGGRAVLDELESNLALTDWHMEPSRMMLHRFGNTSSSSLWYELAYSEAKGRIRRRHRVWQIAFGSGFKCNSAVWRALRSVNPAEETNPWMDEIDRFPVDVPKVSKVSSD

SEQ ID NO: 39388 - protein, 473 aa, Zea mays subsp. mays
  peptide (1)..(473): Ceres Seq. ID no. 12363417
  misc_feature (298)..(442): Pfam Name: Pfam Description:  Chalcone and stilbene synthases
  misc_feature (1)..(470): NCBI GI NO: 9714501 NR Description: putative fatty acid elongase [Zea mays]
  misc_feature (1)..(470): NCBI GI NO: 15225767 NR Description: putative beta-ketoacyl-CoA synthase
  misc_feature (1)..(465): NCBI GI NO: 29417540 NR Description: beta-ketoacyl-CoA-synthase [Marchantia polymorpha]
  misc_feature (1)..(464): NCBI GI NO: 11066477 NR Description: fatty acid elongase 1-like protein
  misc_feature (1)..(472): NCBI GI NO: 14334714 NR Description: putative beta-ketoacyl-CoA synthase
  misc_feature (1)..(472): NCBI GI NO: 15239981 NR Description: beta-ketoacyl-CoA synthase; protein id:At5g43760
  misc_feature (1)..(472): NCBI GI NO: 1045614 NR Description: beta-ketoacyl-CoA synthase
  misc_feature (1)..(472): NCBI GI NO: 15219676 NR Description: putative beta-ketoacyl-CoA synthase
  misc_feature (1)..(472): NCBI GI NO: 18377979 NR Description: putative beta-ketoacyl-CoA synthase
  misc_feature (1)..(465): NCBI GI NO: 19908404 NR Description: putative fatty acid elongase [Tropaeolum majus]
MYLLLTPLMVLVAVYLSTLSPRDVADLWAHLRLNLISVLACSTLLVFLGTAYFLTRPRPVYLVDFACYKPGPERRCTRDTFMRCSRLTGCFTDASLEFQRKILERSGLGEDTYLPPAVTRVPPNPSMDEARAEAREVMFGAVDELLAKTGVKPKDIGILVVNCSLFNPTPSLSAMVVNHYKLRGNVVSYNLGGMGCSAGLLSVDLAKDLLQTHPGSYALVISTENITLNWYSGNDRSKLVSNCLFRMGGAAVLLSNRRSDRRRAKYELVHTVRTHKGADDRCFGCVTQEEDGEGVVGVSLSRDLMAVAGDALKTNITTLGPLVLPLSEQLLFMATLVAKKLLKMKKVKPYIPDFKLAFEHFCIHAGGRAVLDELESNLALTDWHMEPSRMMLHRFGNTSSSSLWYELAYSEAKGRIRRRHRVWQIAFGSGFKCNSAVWRALRSVNPAEETNPWMDEIDRFPVDVPKVSKVSSD

SEQ ID NO: 39389 - protein, 465 aa, Zea mays subsp. mays
  peptide (1)..(465): Ceres Seq. ID no. 12363418
  misc_feature (290)..(434): Pfam Name: Pfam Description:  Chalcone and stilbene synthases
  misc_feature (1)..(462): NCBI GI NO: 9714501 NR Description: putative fatty acid elongase [Zea mays]
  misc_feature (1)..(462): NCBI GI NO: 15225767 NR Description: putative beta-ketoacyl-CoA synthase
  misc_feature (1)..(457): NCBI GI NO: 29417540 NR Description: beta-ketoacyl-CoA-synthase [Marchantia polymorpha]
  misc_feature (1)..(456): NCBI GI NO: 11066477 NR Description: fatty acid elongase 1-like protein
  misc_feature (1)..(464): NCBI GI NO: 14334714 NR Description: putative beta-ketoacyl-CoA synthase
  misc_feature (1)..(464): NCBI GI NO: 15239981 NR Description: beta-ketoacyl-CoA synthase; protein id:At5g43760
  misc_feature (1)..(464): NCBI GI NO: 1045614 NR Description: beta-ketoacyl-CoA synthase
  misc_feature (1)..(464): NCBI GI NO: 15219676 NR Description: putative beta-ketoacyl-CoA synthase
  misc_feature (1)..(464): NCBI GI NO: 18377979 NR Description: putative beta-ketoacyl-CoA synthase
  misc_feature (1)..(457): NCBI GI NO: 19908404 NR Description: putative fatty acid elongase [Tropaeolum majus]
MVLVAVYLSTLSPRDVADLWAHLRLNLISVLACSTLLVFLGTAYFLTRPRPVYLVDFACYKPGPERRCTRDTFMRCSRLTGCFTDASLEFQRKILERSGLGEDTYLPPAVTRVPPNPSMDEARAEAREVMFGAVDELLAKTGVKPKDIGILVVNCSLFNPTPSLSAMVVNHYKLRGNVVSYNLGGMGCSAGLLSVDLAKDLLQTHPGSYALVISTENITLNWYSGNDRSKLVSNCLFRMGGAAVLLSNRRSDRRRAKYELVHTVRTHKGADDRCFGCVTQEEDGEGVVGVSLSRDLMAVAGDALKTNITTLGPLVLPLSEQLLFMATLVAKKLLKMKKVKPYIPDFKLAFEHFCIHAGGRAVLDELESNLALTDWHMEPSRMMLHRFGNTSSSSLWYELAYSEAKGRIRRRHRVWQIAFGSGFKCNSAVWRALRSVNPAEETNPWMDEIDRFPVDVPKVSKVSSD

SEQ ID NO: 39390 - DNA, 1561 bp, Zea mays subsp. mays; identical to SEQ ID NO: 26759
  misc_feature (1)..(1561): Ceres Seq. ID no. 13494774

SEQ ID NO: 39391 - protein, 382 aa, Zea mays subsp. mays; identical to SEQ ID NO: 26760
  peptide (1)..(382): Ceres Seq. ID no. 13494775
  misc_feature (40)..(368): Pfam Name: Pfam Description:  GDSL-like Lipase/Acylhydrolase
  misc_feature (14)..(381): NCBI GI NO: 34903958 NR Description: OSJNBa0038J17.24
  misc_feature (1)..(379): NCBI GI NO: 34903956 NR Description: OSJNBa0038J17.23
  misc_feature (4)..(379): NCBI GI NO: 34903994 NR Description: unnamed protein product
  misc_feature (32)..(379): NCBI GI NO: 34903986 NR Description: unnamed protein product
  misc_feature (36)..(373): NCBI GI NO: 15242538 NR Description: GDSL-motif lipase/hydrolase protein
  misc_feature (36)..(373): NCBI GI NO: 21553708 NR Description: GDSL-motif lipase/hydrolase-like protein
  misc_feature (32)..(382): NCBI GI NO: 34903970 NR Description: OSJNBa0038J17.30
  misc_feature (2)..(382): NCBI GI NO: 34911800 NR Description: lipase-like protein
  misc_feature (1)..(377): NCBI GI NO: 10764858 NR Description: F1K23.17 [Arabidopsis thaliana]
  misc_feature (28)..(381): NCBI GI NO: 10764858 NR Description: F1K23.17 [Arabidopsis thaliana]

SEQ ID NO: 39392 - protein, 376 aa, Zea mays subsp. mays; identical to SEQ ID NO: 26761
  peptide (1)..(376): Ceres Seq. ID no. 13494776
  misc_feature (34)..(362): Pfam Name: Pfam Description:  GDSL-like Lipase/Acylhydrolase
  misc_feature (8)..(375): NCBI GI NO: 34903958 NR Description: OSJNBa0038J17.24
  misc_feature (1)..(373): NCBI GI NO: 34903956 NR Description: OSJNBa0038J17.23
  misc_feature (1)..(373): NCBI GI NO: 34903994 NR Description: unnamed protein product
  misc_feature (26)..(373): NCBI GI NO: 34903986 NR Description: unnamed protein product
  misc_feature (30)..(367): NCBI GI NO: 15242538 NR Description: GDSL-motif lipase/hydrolase protein
  misc_feature (30)..(367): NCBI GI NO: 21553708 NR Description: GDSL-motif lipase/hydrolase-like protein
  misc_feature (26)..(376): NCBI GI NO: 34903970 NR Description: OSJNBa0038J17.30
  misc_feature (1)..(376): NCBI GI NO: 34911800 NR Description: lipase-like protein
  misc_feature (1)..(371): NCBI GI NO: 10764858 NR Description: F1K23.17 [Arabidopsis thaliana]
  misc_feature (22)..(375): NCBI GI NO: 10764858 NR Description: F1K23.17 [Arabidopsis thaliana]

SEQ ID NO: 39393 - protein, 238 aa, Zea mays subsp. mays; identical to SEQ ID NO: 26762
  peptide (1)..(238): Ceres Seq. ID no. 13494777
  misc_feature (1)..(224): Pfam Name: Pfam Description:  GDSL-like Lipase/Acylhydrolase
  misc_feature (1)..(237): NCBI GI NO: 34903958 NR Description: OSJNBa0038J17.24
  misc_feature (1)..(235): NCBI GI NO: 34903956 NR Description: OSJNBa0038J17.23
  misc_feature (1)..(235): NCBI GI NO: 34903994 NR Description: unnamed protein product
  misc_feature (1)..(235): NCBI GI NO: 34903986 NR Description: unnamed protein product
  misc_feature (1)..(229): NCBI GI NO: 15242538 NR Description: GDSL-motif lipase/hydrolase protein
  misc_feature (1)..(229): NCBI GI NO: 21553708 NR Description: GDSL-motif lipase/hydrolase-like protein
  misc_feature (1)..(238): NCBI GI NO: 34903970 NR Description: OSJNBa0038J17.30
  misc_feature (1)..(238): NCBI GI NO: 34911800 NR Description: lipase-like protein
  misc_feature (1)..(233): NCBI GI NO: 10764858 NR Description: F1K23.17 [Arabidopsis thaliana]
  misc_feature (1)..(237): NCBI GI NO: 10764858 NR Description: F1K23.17 [Arabidopsis thaliana]

SEQ ID NO: 39394 - DNA, 1035 bp, Zea mays subsp. mays
  misc_feature (1)..(1035): Ceres Seq. ID no. 12364643
tacctacaacatcctaatcaaaagagagagaaagttctcgagctagacgagcgccgtgcgaggagagaagcgagatgagcggtgaggcggcggccgtgggcggaggcgaaggagaggcgaatggcatcccgccgaacgtcaccatctatatcaacaacctcaacgagaagatcaagctcgaagaacttaagaagtccctaacagccgttttttcccagtttgggaaaattcttgatgtgcttgctttcaagactttgaagcataaaggtcaagcttgggttgtcttcgaagatgtcgcatcagctactgaggctctgaagaggatgcagggctttcccttctatgacaaaactatgagaattcaatatgccaagaccaaatcagatattatagcaaaggctgatggcacctttgtacctcgagaaagaagaaagaggactgatgaaaaatctgaaaagaagcagaagcgcgagcatcaccatgatgctggtgctagtcaaattggcatgggtgtaactgcttaccctggtgtttatggggctccacagctcacccagatacctatagcaggaggacaaagggtcatgatgccagagattatcgtaccaaacaacatcttgtttgtccaaaacttgccacacgagacgacgcccatgatgctccagatgctcttctgccagtaccctggcttcaaggaggttcggatgatcgaggcgaagcctgggattgctttcgtggagtatggagacgagacccaggtcactgctgccatgaacaaccttcaaagcttcaaaattacaaaagaaaaccagatggtcatcacatatgcgaagaagtaatgagctcccgagcaatgtttacctgatgtgtgagatgttgtattccgagttttacacaactggtaaatttccttcatgtgttaggtagacagcatcctgaacaacctgttaattgtacccactgggctgcagctatgtgcacttcaggaacggagatgaaatgcaaactgttattatttggtctgctcttgtattc

SEQ ID NO: 39395 - protein, 254 aa, Zea mays subsp. mays
  peptide (1)..(254): Ceres Seq. ID no. 12364644
  misc_feature (24)..(96): Pfam Name: a.k.a. RRM, RBD, or RNP domain Pfam Description: RNA recognition motif.
  misc_feature (1)..(254): NCBI GI NO: 34897622 NR Description: putative small nuclear ribonucleoprotein U1A
  misc_feature (1)..(254): NCBI GI NO: 2119045 NR Description: small nuclear ribonucleoprotein U1A - potato
  misc_feature (12)..(254): NCBI GI NO: 15226631 NR Description: small nuclear ribonucleoprotein U1A
  misc_feature (18)..(254): NCBI GI NO: 15227729 NR Description: small nuclear ribonucleoprotein U2B, putative
  misc_feature (18)..(254): NCBI GI NO: 21593001 NR Description: putative small nuclear ribonucleoprotein U2B
  misc_feature (18)..(254): NCBI GI NO: 421960 NR Description: small nuclear ribonucleoprotein U2B'' - potato
  misc_feature (18)..(254): NCBI GI NO: 25294325 NR Description: hypothetical protein
  misc_feature (18)..(254): NCBI GI NO: 30679897 NR Description: small nuclear ribonucleoprotein U2B
  misc_feature (18)..(254): NCBI GI NO: 30679892 NR Description: small nuclear ribonucleoprotein U2B
  misc_feature (18)..(254): NCBI GI NO: 19347861 NR Description: putative spliceosomal protein (U2B)
MSGEAAAVGGGEGEANGIPPNVTIYINNLNEKIKLEELKKSLTAVFSQFGKILDVLAFKTLKHKGQAWVVFEDVASATEALKRMQGFPFYDKTMRIQYAKTKSDIIAKADGTFVPRERRKRTDEKSEKKQKREHHHDAGASQIGMGVTAYPGVYGAPQLTQIPIAGGQRVMMPEIIVPNNILFVQNLPHETTPMMLQMLFCQYPGFKEVRMIEAKPGIAFVEYGDETQVTAAMNNLQSFKITKENQMVITYAKK

SEQ ID NO: 39396 - protein, 171 aa, Zea mays subsp. mays
  peptide (1)..(171): Ceres Seq. ID no. 12364645
  misc_feature (1)..(171): NCBI GI NO: 34897622 NR Description: putative small nuclear ribonucleoprotein U1A
  misc_feature (1)..(171): NCBI GI NO: 2119045 NR Description: small nuclear ribonucleoprotein U1A - potato
  misc_feature (1)..(171): NCBI GI NO: 15226631 NR Description: small nuclear ribonucleoprotein U1A
  misc_feature (1)..(171): NCBI GI NO: 15227729 NR Description: small nuclear ribonucleoprotein U2B, putative
  misc_feature (1)..(171): NCBI GI NO: 21593001 NR Description: putative small nuclear ribonucleoprotein U2B
  misc_feature (1)..(171): NCBI GI NO: 421960 NR Description: small nuclear ribonucleoprotein U2B'' - potato
  misc_feature (1)..(171): NCBI GI NO: 25294325 NR Description: hypothetical protein
  misc_feature (1)..(171): NCBI GI NO: 30679897 NR Description: small nuclear ribonucleoprotein U2B
  misc_feature (1)..(171): NCBI GI NO: 30679892 NR Description: small nuclear ribonucleoprotein U2B
  misc_feature (1)..(171): NCBI GI NO: 19347861 NR Description: putative spliceosomal protein (U2B)
MQGFPFYDKTMRIQYAKTKSDIIAKADGTFVPRERRKRTDEKSEKKQKREHHHDAGASQIGMGVTAYPGVYGAPQLTQIPIAGGQRVMMPEIIVPNNILFVQNLPHETTPMMLQMLFCQYPGFKEVRMIEAKPGIAFVEYGDETQVTAAMNNLQSFKITKENQMVITYAKK

SEQ ID NO: 39397 - protein, 161 aa, Zea mays subsp. mays
  peptide (1)..(161): Ceres Seq. ID no. 12364646
  misc_feature (1)..(161): NCBI GI NO: 34897622 NR Description: putative small nuclear ribonucleoprotein U1A
  misc_feature (1)..(161): NCBI GI NO: 2119045 NR Description: small nuclear ribonucleoprotein U1A - potato
  misc_feature (1)..(161): NCBI GI NO: 15226631 NR Description: small nuclear ribonucleoprotein U1A
  misc_feature (1)..(161): NCBI GI NO: 15227729 NR Description: small nuclear ribonucleoprotein U2B, putative
  misc_feature (1)..(161): NCBI GI NO: 21593001 NR Description: putative small nuclear ribonucleoprotein U2B
  misc_feature (1)..(161): NCBI GI NO: 421960 NR Description: small nuclear ribonucleoprotein U2B'' - potato
  misc_feature (1)..(161): NCBI GI NO: 25294325 NR Description: hypothetical protein
  misc_feature (1)..(161): NCBI GI NO: 30679897 NR Description: small nuclear ribonucleoprotein U2B
  misc_feature (1)..(161): NCBI GI NO: 30679892 NR Description: small nuclear ribonucleoprotein U2B
  misc_feature (1)..(161): NCBI GI NO: 19347861 NR Description: putative spliceosomal protein (U2B)
MRIQYAKTKSDIIAKADGTFVPRERRKRTDEKSEKKQKREHHHDAGASQIGMGVTAYPGVYGAPQLTQIPIAGGQRVMMPEIIVPNNILFVQNLPHETTPMMLQMLFCQYPGFKEVRMIEAKPGIAFVEYGDETQVTAAMNNLQSFKITKENQMVITYAKK

SEQ ID NO: 39398 - DNA, 2408 bp, Zea mays subsp. mays
  misc_feature (1)..(2408): Ceres Seq. ID no. 12375257
gcacgagaccattacctagaacatcctaatcgaaaagatcgatgacgcaccggaacagtgcaggtgcagcgaaagaggagcgcgccgtcgctgtcgacggccgtgccgagcgccagcagacaagcggcgacgctacaaaacaacgcgccaaccaaccgccccactgctgaccctttccaacctccaagctccctgccttctgccggccggtcggcagcggtggtagcggccaccaccccagggtatggccgcccgctccctcctcctctacgcgctgctgctcctggccctcgccaccgccgcaccgtcccacggcctcactcaagcggatgttgcgaagcgattgaaggaggtgctgtcggagaggaaccgagggcatgagatgctcgattcgtggaatggggatggggacccgtgttctccgtctacctgggaaggcttctcttgcgaacccaaggatggtgcccaggtcgtcgtcaagttgaacttttcttcgaagaaattgcaagggccgattcctgcagagattgctaacttgacggagctaaatgaaatacatctgcagtataataacttcactggatctattccggcatccttttctgctctcagacacctgctgaagctgtcggtgatttgcaaccccttgttgaacaataagcagcctgatggattttctagcggtgtaaatttcagctatggaggatgtgccgcccaagagtactatagctcaccagctgaagagtaccaaagcccacctgcagttgccagtcagaaagtatatgttattggtggtgtcgccggaggatctttggcatgtactgttgcactcggatcgttctttgtttgttttaacaaacgtgaacggcgttctccaaaaaaggactgctcttctacaacaaatcctgtttttcaagaatgcagcatccataacactacaaatcctgcagtacaacagttctccctcaaagcaatccagactgcaataagcaactacaaaactacgataggagagggtgggtttggagcagtttatcgaggtgcattagcaaatgggcaagaagttgcagtaaaagtccgctcaagttcatcgacacagggaacacgtgagtttaacaatgagctaagacttctttctgctgtgtggcatgagaatttagtcccacttatcggctattgctgtgaaaaagatcaacagatattggtctatccgttcatgtccaatggctcactacaagatcgtctttacggtgaggcatcaaaaaggaaagttcttgattggcccacaagactatctgtttgcattggtgctgctagagggctagtatatctgcacaattttgccgggcgttgtatcatacacagagatattaaatcgagcaacatacttctggatcacagcatgtgtggcaaggtagccgactttgggttttccaagtatgcaccacaggaaggtgacagcaatccatcaatggaagtgaggggaactgctgggtatttggaccctgaatactattccactcaggtgttatcaaccagaagcgacgtcttcagtttcggagtagtcctgttagaaattgtgacaggaagagaacctcttgatgtcaaaaggcctcgtcatgaatggagcttagttgagtgggcaaaaccatacatcagggagtacaagatcgaggagatggtggaccctggcataaaagggcagtattgctcagaggccatgtggagagtgctcgaggtcgcatctgtgtgcaccgagcccttctcaaccttcaggccgaccatggaggacgtcctgagggagctggaggacgctctgatcatcgagaacaacgcgtccgagtacatgaggtccatcgagagcacagggactctggggtccaaccgctatctgtccatcgacaggaagatgttcgcgtcagggtcagcgcgaatcgagtcgacgaaggggaatctgcaagcaatgccctcgcttccgcggtaactagacgccgcattgtgatttcgtagcgggcgtcgtcagggtgtgatccatgctcaaggcacatctaaccacgctgaggcctgactgagcacctgagatgggcatagacatgaagggatagtctgtactctgtaccatgtacagagcccattcagtggtgagagcacagatcagcgatacctacactgggaaatgccttctgaagccaatgtgctagttttgcctgttgaatttcccaaaagcaggcgaatgtgcgggcacaaactattctttggaccattataaacacgtaaaatgtgtcgagggaatccctcaagaaatcgaatattcagatctgtaccgtcacttcattatgtgaactattgctcgcttgttgtaattgtcattcttgcctaataaaccgatcaacagatgaattttcttc

SEQ ID NO: 39399 - protein, 579 aa, Zea mays subsp. mays
  peptide (1)..(579): Ceres Seq. ID no. 12375258
  misc_feature (251)..(451): Pfam Name: Pfam Description:  Protein kinase domain
  misc_feature (29)..(567): NCBI GI NO: 21698787 NR Description: nodulation receptor kinase [Medicago truncatula]
  misc_feature (7)..(567): NCBI GI NO: 21622628 NR Description: receptor-like kinase SYMRK [Lotus japonicus]
  misc_feature (29)..(567): NCBI GI NO: 21698783 NR Description: nodulation receptor kinase [Medicago truncatula]
  misc_feature (29)..(567): NCBI GI NO: 21717596 NR Description: SYMRK; MtSYMRK [Medicago truncatula]
  misc_feature (29)..(566): NCBI GI NO: 21698802 NR Description: nodulation receptor kinase [Melilotus alba]
  misc_feature (29)..(567): NCBI GI NO: 21698790 NR Description: nodulation receptor kinase [Medicago truncatula]
  misc_feature (29)..(567): NCBI GI NO: 21698781 NR Description: nodulation receptor kinase [Medicago sativa]
  misc_feature (26)..(567): NCBI GI NO: 21698794 NR Description: nodulation receptor kinase [Pisum sativum]
  misc_feature (26)..(567): NCBI GI NO: 21717594 NR Description: SYM19; PsSYM19 [Pisum sativum]
  misc_feature (26)..(567): NCBI GI NO: 21698779 NR Description: nodulation receptor kinase [Pisum sativum]
MAARSLLLYALLLLALATAAPSHGLTQADVAKRLKEVLSERNRGHEMLDSWNGDGDPCSPSTWEGFSCEPKDGAQVVVKLNFSSKKLQGPIPAEIANLTELNEIHLQYNNFTGSIPASFSALRHLLKLSVICNPLLNNKQPDGFSSGVNFSYGGCAAQEYYSSPAEEYQSPPAVASQKVYVIGGVAGGSLACTVALGSFFVCFNKRERRSPKKDCSSTTNPVFQECSIHNTTNPAVQQFSLKAIQTAISNYKTTIGEGGFGAVYRGALANGQEVAVKVRSSSSTQGTREFNNELRLLSAVWHENLVPLIGYCCEKDQQILVYPFMSNGSLQDRLYGEASKRKVLDWPTRLSVCIGAARGLVYLHNFAGRCIIHRDIKSSNILLDHSMCGKVADFGFSKYAPQEGDSNPSMEVRGTAGYLDPEYYSTQVLSTRSDVFSFGVVLLEIVTGREPLDVKRPRHEWSLVEWAKPYIREYKIEEMVDPGIKGQYCSEAMWRVLEVASVCTEPFSTFRPTMEDVLRELEDALIIENNASEYMRSIESTGTLGSNRYLSIDRKMFASGSARIESTKGNLQAMPSLPR

SEQ ID NO: 39400 - protein, 533 aa, Zea mays subsp. mays
  peptide (1)..(533): Ceres Seq. ID no. 12375259
  misc_feature (205)..(405): Pfam Name: Pfam Description:  Protein kinase domain
  misc_feature (1)..(521): NCBI GI NO: 21698787 NR Description: nodulation receptor kinase [Medicago truncatula]
  misc_feature (1)..(521): NCBI GI NO: 21622628 NR Description: receptor-like kinase SYMRK [Lotus japonicus]
  misc_feature (1)..(521): NCBI GI NO: 21698783 NR Description: nodulation receptor kinase [Medicago truncatula]
  misc_feature (1)..(521): NCBI GI NO: 21717596 NR Description: SYMRK; MtSYMRK [Medicago truncatula]
  misc_feature (1)..(520): NCBI GI NO: 21698802 NR Description: nodulation receptor kinase [Melilotus alba]
  misc_feature (1)..(521): NCBI GI NO: 21698790 NR Description: nodulation receptor kinase [Medicago truncatula]
  misc_feature (1)..(521): NCBI GI NO: 21698781 NR Description: nodulation receptor kinase [Medicago sativa]
  misc_feature (1)..(521): NCBI GI NO: 21698794 NR Description: nodulation receptor kinase [Pisum sativum]
  misc_feature (1)..(521): NCBI GI NO: 21717594 NR Description: SYM19; PsSYM19 [Pisum sativum]
  misc_feature (1)..(521): NCBI GI NO: 21698779 NR Description: nodulation receptor kinase [Pisum sativum]
MLDSWNGDGDPCSPSTWEGFSCEPKDGAQVVVKLNFSSKKLQGPIPAEIANLTELNEIHLQYNNFTGSIPASFSALRHLLKLSVICNPLLNNKQPDGFSSGVNFSYGGCAAQEYYSSPAEEYQSPPAVASQKVYVIGGVAGGSLACTVALGSFFVCFNKRERRSPKKDCSSTTNPVFQECSIHNTTNPAVQQFSLKAIQTAISNYKTTIGEGGFGAVYRGALANGQEVAVKVRSSSSTQGTREFNNELRLLSAVWHENLVPLIGYCCEKDQQILVYPFMSNGSLQDRLYGEASKRKVLDWPTRLSVCIGAARGLVYLHNFAGRCIIHRDIKSSNILLDHSMCGKVADFGFSKYAPQEGDSNPSMEVRGTAGYLDPEYYSTQVLSTRSDVFSFGVVLLEIVTGREPLDVKRPRHEWSLVEWAKPYIREYKIEEMVDPGIKGQYCSEAMWRVLEVASVCTEPFSTFRPTMEDVLRELEDALIIENNASEYMRSIESTGTLGSNRYLSIDRKMFASGSARIESTKGNLQAMPSLPR

SEQ ID NO: 39401 - DNA, 1315 bp, Zea mays subsp. mays
  misc_feature (1)..(1315): Ceres Seq. ID no. 12417755
gcacgagaccattacctagaacatcctaatcgaaaaacctcccgtcgtcactccaccgccgtccccttgagcgctcgccccaacctggggacgctcgccccagccgatctgatccgtctcaactccattaaaaaaatctctcctttccccctccctatccaggaaaaggagaaggtaccacctcggtcgatcttccctccatttactcctccgggcgaggtcccgattcgatcgaaggcggcggagagagatgaggaagcgtgagcgagagaacccgtgcgggatctgcgggcactaccacaagtacgaggagggggaggtgtgcggcgtctgcggtcaccgcccacctgcagcgtcaccagtaggggccaggcagcaagactcggcgttcccgtccgagatcctcaaggagttcctcttcctcggcagctacgacaacgcctcccgctcggagctcctcaagaccatcggcgtctcgcacatcctcaatactgtacctttgtgccaaaacctttaccggaattcattcacttatcactgccttcaagaggacaagactctgcagtttgatgatgcaaaccagtttctagagcaatgtgagagggagaaagcacgagtcctagtccattgcatgtctgggaaaagtagatcggcagcttttgtaatagccttcttgatgaagtcgagaggttggagattggcacaatcttttcagtgggtgaaagagcggagaccacaagtgcaactgtctgatgcagcacagcagcagctgattgagtatgaaaagaagctttttggttctaatgatggcagcataccagctcaaccttttgctccagtggattcgctcccttctcttggatttggttttccaaaaccaccaggcgacatccaagcgcctacctttaatcagcaggctccagcatctatctttgagcgcgttaccccgaacagcttccctagtaatttcatattcggagccgaaagaactagtgatagtgatgcgaaacttccagatagcaacaatttcggcgtggtaaactcgtctgggagtgatagcatgatggacagctcctaggatggttttgccttcaccaaggctatctccagcagcttaatcctcaattcctcatctctcgtttcaaatttcacttccactcttgtacaactatagcctgatatacaaaagaaatgactcagtcgcaaatttagtcaggtttctcgggatgtttttttatttctgagaaggaaacgcatttttgtaatagtatgttgtaatatttgccagtattactaaattgctgctgtgcatttc

SEQ ID NO: 39402 - protein, 275 aa, Zea mays subsp. mays
  peptide (1)..(275): Ceres Seq. ID no. 12417756
  misc_feature (1)..(244): NCBI GI NO: 28393745 NR Description: putative protein phosphatase
  misc_feature (1)..(275): NCBI GI NO: 15228155 NR Description: putative protein phosphatase; protein id:At2g04550
  misc_feature (42)..(238): NCBI GI NO: 30851156 NR Description: Unknown (protein for MGC:55423) [Danio rerio]
  misc_feature (36)..(197): NCBI GI NO: 16950652 NR Description: dual specificity phosphatase 4 isoform 2
  misc_feature (38)..(181): NCBI GI NO: 9294518 NR Description: dual-specificity protein phosphatase-like protein
  misc_feature (38)..(181): NCBI GI NO: 15229482 NR Description: dual-specificity protein phosphatase
  misc_feature (48)..(181): NCBI GI NO: 24666604 NR Description: Mitogen-activated protein kinase phosphatase 3CG14080-PA
  misc_feature (48)..(181): NCBI GI NO: 28317042 NR Description: RE08706p [Drosophila melanogaster]
  misc_feature (36)..(237): NCBI GI NO: 1083719 NR Description: dual specificity phosphatase (EC 3
  misc_feature (36)..(237): NCBI GI NO: 25742822 NR Description: MAP kinase phosphatase [Rattus norvegicus]
MRKRERENPCGICGHYHKYEEGEVCGVCGHRPPAASPVGARQQDSAFPSEILKEFLFLGSYDNASRSELLKTIGVSHILNTVPLCQNLYRNSFTYHCLQEDKTLQFDDANQFLEQCEREKARVLVHCMSGKSRSAAFVIAFLMKSRGWRLAQSFQWVKERRPQVQLSDAAQQQLIEYEKKLFGSNDGSIPAQPFAPVDSLPSLGFGFPKPPGDIQAPTFNQQAPASIFERVTPNSFPSNFIFGAERTSDSDAKLPDSNNFGVVNSSGSDSMMDSS

SEQ ID NO: 39403 - protein, 148 aa, Zea mays subsp. mays
  peptide (1)..(148): Ceres Seq. ID no. 12417757
  misc_feature (1)..(117): NCBI GI NO: 28393745 NR Description: putative protein phosphatase
  misc_feature (1)..(148): NCBI GI NO: 15228155 NR Description: putative protein phosphatase; protein id:At2g04550
  misc_feature (1)..(111): NCBI GI NO: 30851156 NR Description: Unknown (protein for MGC:55423) [Danio rerio]
  misc_feature (1)..(70): NCBI GI NO: 16950652 NR Description: dual specificity phosphatase 4 isoform 2
  misc_feature (1)..(54): NCBI GI NO: 9294518 NR Description: dual-specificity protein phosphatase-like protein
  misc_feature (1)..(54): NCBI GI NO: 15229482 NR Description: dual-specificity protein phosphatase
  misc_feature (1)..(54): NCBI GI NO: 24666604 NR Description: Mitogen-activated protein kinase phosphatase 3CG14080-PA
  misc_feature (1)..(54): NCBI GI NO: 28317042 NR Description: RE08706p [Drosophila melanogaster]
  misc_feature (1)..(110): NCBI GI NO: 1083719 NR Description: dual specificity phosphatase (EC 3
  misc_feature (1)..(110): NCBI GI NO: 25742822 NR Description: MAP kinase phosphatase [Rattus norvegicus]
MSGKSRSAAFVIAFLMKSRGWRLAQSFQWVKERRPQVQLSDAAQQQLIEYEKKLFGSNDGSIPAQPFAPVDSLPSLGFGFPKPPGDIQAPTFNQQAPASIFERVTPNSFPSNFIFGAERTSDSDAKLPDSNNFGVVNSSGSDSMMDSS

SEQ ID NO: 39404 - DNA, 2634 bp, Zea mays subsp. mays
  misc_feature (1)..(2634): Ceres Seq. ID no. 12361141
gcacgagaccattacctagaacatcctaatcgaaaaagcctacacgcccccgcctcctgccctctgtccacatcctcgcctctccccactagttcgctcgcgtgatggtggtgcgggagcagcggaacaagggttcgtcgtcggccaccctgtgacaccccgcccacgcccccgcggcggaacctgcaaacccggaggccggagctccgacttcgtcggccatcgaccgcgtctgatcggcgctgggacctgccgtccggacgaaatcggtcagcatgacggggcccaatgagaaggcggcggcgggaggcgggggtggcgagaggcgcaagtacccgatccacgtggaggactacgagctgtacgaggagatcgggcagggcgtcagcgccatcgtgtaccgcgcactctgcaagccactcgacgagatcgtcgccgtcaaggtggtcgacttcgagcgcaccaacagcgacctgaacaacatcgttcgtgaagctcagacaatgattttgatagaccatcctaacgttgtcaaggcgcattgttcatttgcaaaagaccaaacgttatgggtggttatgccgtatatggctggggggtcctgtcttcacataatgaaatcagtgcatcctactggattcgaggaacccatcatcgcgactatacttcgtgaagtcctgaaaggtttagagtatcttcaccatcatggctctatacatcgagatgtgaaggcaggaaatattctagtcgattctcggggtggaattaaacttggggactttggagtctctgcttgcctttttgattctggtgatagacagagggccaggaatacttttgtgggaacaccttgctggatggcgcccgaggttatggagcaactacatggatatgatttcagagcagacatatggtcctttggaattactgcacttgaaacttgctcatggtcatgctcctttctctaagtaccctcccatgaaggtcttgctcatgacacttcagaatgctcctccaggtcttgactatgaaagagataagaaattcacgaggaacttcaagcaaatggttgctatgtgtttggtaaaagacccttcaaagaggccttcggcaaaaaagttgttgaagcaaccatttttcaagcaagctcgttccactgattttattgcacgaaagcttttagaaggattgcctggccttggtgttagatatcaagctttgaaggaaaaggatcaacatttaatggctcaaaagaaaatgtctgatggaaagaaagaagaaatctcgcaggatgaatacaaaaggggtatcagcagctggacctttgacatggatgacctgagatctcaagcttcattgggcacagaatgtgaagacagtaccttatgcaaagattcagatatatctttctatgacttggacagtttacaggatcaagcaccagaagggccacacttgttgagagatttctcaacgaagtatgatgctgacattgaaaatgatatgacaaccaaagataagtcagccgtttcatctcctgatcagcctgctagcttagtgaggaatgcttctatgcgtgggatgcccataaacggttctttcaggaaagacaactctacagaaagcttcgatttggaatgtcaagagaaacatctggacattgttccgactagctcatcccctgaaaggaagttttcttttagttcttgctcatcaaatgggctccttttgtccaaagagagctctaaacagcaaactagcatccacaaccttgacaagtgtaatggagggcatttgcatgtatcagatgaaacatcttctgaagctgctcctaagacacataaatcagcagaggaccatgatgatagatccaaacctccacttataagaggtcgatttagagttatacctgggcatgttgactcaaaggctcaaccacctggcctacagaagtgtcacagcatgcagacaatttctcgccttccatcattaagtataccctcttccgcagaagttgcatcaaccattattggtggctccttctacatgcagctatatagtattctacagacaaatatgcttcagagggaccaaatacttaacgcgatgaagcaggtgagtggttgtgctatggcttcaccaggcgtaccttctatggcttcaccgtgtatcccttccacaagtcgctcgacatctccatcaggtgtaccatcagttgacagatccatgctggaagctgcacaagaaagggagaaagagctgctgaatgaggtcttggagctgcaatggcggttattgtgcacacaagatgaggttcagaagcttaaagcaaaggcagcgcagatctgatgctgaagctgttaagggagcattaagggcgcgtcatgataagatgatctgttcatgcggttttcaaatggctatttagcataggagagagatacaaaattaaggattggtgtatatttaaaaaggtgctagtgatgctcgagtgtccaatcctgtctaagcaggacattaatttcgtacaatctgtgtgtttgtgtttatgggtggcatggcgctgtgtttttgttggagcgcaattcccaggttgggacttgggaaagatagcttaacatgcctatgggtttt

SEQ ID NO: 39405 - protein, 487 aa, Zea mays subsp. mays
  peptide (1)..(487): Ceres Seq. ID no. 12361142
  misc_feature (17)..(85): Pfam Name: Pfam Description:  Protein kinase domain
  misc_feature (17)..(476): NCBI GI NO: 30685021 NR Description: protein kinase family [Arabidopsis thaliana]
  misc_feature (17)..(476): NCBI GI NO: 17529280 NR Description: putative protein kinase [Arabidopsis thaliana]
  misc_feature (17)..(226): NCBI GI NO: 11358725 NR Description: protein kinase-like protein - Arabidopsis thaliana
  misc_feature (17)..(487): NCBI GI NO: 22328895 NR Description: putative protein; protein id: At4g24100
  misc_feature (17)..(158): NCBI GI NO: 7485682 NR Description: hypothetical protein F17O7
  misc_feature (19)..(316): NCBI GI NO: 15223145 NR Description: Ste-20 related kinase SPAK, putative
  misc_feature (17)..(219): NCBI GI NO: 17998578 NR Description: putative Ste-20 related kinase, 3'-partial
  misc_feature (17)..(331): NCBI GI NO: 7487178 NR Description: hypothetical protein T19F6
  misc_feature (17)..(353): NCBI GI NO: 7486904 NR Description: hypothetical protein T12H20
  misc_feature (17)..(223): NCBI GI NO: 25407517 NR Description: hypothetical protein AT4g10730
MDMISEQTYGPLELLHLKLAHGHAPFSKYPPMKVLLMTLQNAPPGLDYERDKKFTRNFKQMVAMCLVKDPSKRPSAKKLLKQPFFKQARSTDFIARKLLEGLPGLGVRYQALKEKDQHLMAQKKMSDGKKEEISQDEYKRGISSWTFDMDDLRSQASLGTECEDSTLCKDSDISFYDLDSLQDQAPEGPHLLRDFSTKYDADIENDMTTKDKSAVSSPDQPASLVRNASMRGMPINGSFRKDNSTESFDLECQEKHLDIVPTSSSPERKFSFSSCSSNGLLLSKESSKQQTSIHNLDKCNGGHLHVSDETSSEAAPKTHKSAEDHDDRSKPPLIRGRFRVIPGHVDSKAQPPGLQKCHSMQTISRLPSLSIPSSAEVASTIIGGSFYMQLYSILQTNMLQRDQILNAMKQVSGCAMASPGVPSMASPCIPSTSRSTSPSGVPSVDRSMLEAAQEREKELLNEVLELQWRLLCTQDEVQKLKAKAAQI

SEQ ID NO: 39406 - protein, 485 aa, Zea mays subsp. mays
  peptide (1)..(485): Ceres Seq. ID no. 12361143
  misc_feature (15)..(83): Pfam Name: Pfam Description:  Protein kinase domain
  misc_feature (15)..(474): NCBI GI NO: 30685021 NR Description: protein kinase family [Arabidopsis thaliana]
  misc_feature (15)..(474): NCBI GI NO: 17529280 NR Description: putative protein kinase [Arabidopsis thaliana]
  misc_feature (15)..(224): NCBI GI NO: 11358725 NR Description: protein kinase-like protein - Arabidopsis thaliana
  misc_feature (15)..(485): NCBI GI NO: 22328895 NR Description: putative protein; protein id: At4g24100
  misc_feature (15)..(156): NCBI GI NO: 7485682 NR Description: hypothetical protein F17O7
  misc_feature (17)..(314): NCBI GI NO: 15223145 NR Description: Ste-20 related kinase SPAK, putative
  misc_feature (15)..(217): NCBI GI NO: 17998578 NR Description: putative Ste-20 related kinase, 3'-partial
  misc_feature (15)..(329): NCBI GI NO: 7487178 NR Description: hypothetical protein T19F6
  misc_feature (15)..(351): NCBI GI NO: 7486904 NR Description: hypothetical protein T12H20
  misc_feature (15)..(221): NCBI GI NO: 25407517 NR Description: hypothetical protein AT4g10730
MISEQTYGPLELLHLKLAHGHAPFSKYPPMKVLLMTLQNAPPGLDYERDKKFTRNFKQMVAMCLVKDPSKRPSAKKLLKQPFFKQARSTDFIARKLLEGLPGLGVRYQALKEKDQHLMAQKKMSDGKKEEISQDEYKRGISSWTFDMDDLRSQASLGTECEDSTLCKDSDISFYDLDSLQDQAPEGPHLLRDFSTKYDADIENDMTTKDKSAVSSPDQPASLVRNASMRGMPINGSFRKDNSTESFDLECQEKHLDIVPTSSSPERKFSFSSCSSNGLLLSKESSKQQTSIHNLDKCNGGHLHVSDETSSEAAPKTHKSAEDHDDRSKPPLIRGRFRVIPGHVDSKAQPPGLQKCHSMQTISRLPSLSIPSSAEVASTIIGGSFYMQLYSILQTNMLQRDQILNAMKQVSGCAMASPGVPSMASPCIPSTSRSTSPSGVPSVDRSMLEAAQEREKELLNEVLELQWRLLCTQDEVQKLKAKAAQI

SEQ ID NO: 39407 - protein, 456 aa, Zea mays subsp. mays
  peptide (1)..(456): Ceres Seq. ID no. 12361144
  misc_feature (1)..(54): Pfam Name: Pfam Description:  Protein kinase domain
  misc_feature (1)..(445): NCBI GI NO: 30685021 NR Description: protein kinase family [Arabidopsis thaliana]
  misc_feature (1)..(445): NCBI GI NO: 17529280 NR Description: putative protein kinase [Arabidopsis thaliana]
  misc_feature (1)..(195): NCBI GI NO: 11358725 NR Description: protein kinase-like protein - Arabidopsis thaliana
  misc_feature (1)..(456): NCBI GI NO: 22328895 NR Description: putative protein; protein id: At4g24100
  misc_feature (1)..(127): NCBI GI NO: 7485682 NR Description: hypothetical protein F17O7
  misc_feature (1)..(285): NCBI GI NO: 15223145 NR Description: Ste-20 related kinase SPAK, putative
  misc_feature (1)..(188): NCBI GI NO: 17998578 NR Description: putative Ste-20 related kinase, 3'-partial
  misc_feature (1)..(300): NCBI GI NO: 7487178 NR Description: hypothetical protein T19F6
  misc_feature (1)..(322): NCBI GI NO: 7486904 NR Description: hypothetical protein T12H20
  misc_feature (1)..(192): NCBI GI NO: 25407517 NR Description: hypothetical protein AT4g10730
MKVLLMTLQNAPPGLDYERDKKFTRNFKQMVAMCLVKDPSKRPSAKKLLKQPFFKQARSTDFIARKLLEGLPGLGVRYQALKEKDQHLMAQKKMSDGKKEEISQDEYKRGISSWTFDMDDLRSQASLGTECEDSTLCKDSDISFYDLDSLQDQAPEGPHLLRDFSTKYDADIENDMTTKDKSAVSSPDQPASLVRNASMRGMPINGSFRKDNSTESFDLECQEKHLDIVPTSSSPERKFSFSSCSSNGLLLSKESSKQQTSIHNLDKCNGGHLHVSDETSSEAAPKTHKSAEDHDDRSKPPLIRGRFRVIPGHVDSKAQPPGLQKCHSMQTISRLPSLSIPSSAEVASTIIGGSFYMQLYSILQTNMLQRDQILNAMKQVSGCAMASPGVPSMASPCIPSTSRSTSPSGVPSVDRSMLEAAQEREKELLNEVLELQWRLLCTQDEVQKLKAKAAQI

SEQ ID NO: 39408 - DNA, 1503 bp, Zea mays subsp. mays
  misc_feature (1)..(1503): Ceres Seq. ID no. 12361279
gcacgagaccattacctagaacatcctaatcaaaaaagcagcgtccgctccaaaacgcaacggtcgaatctcctcgaattcgaattgcagccggtgccacccacctcacatggcggcggcggaagagatgatggcggtgctggacaaggagacgctggcgctgatgggtctgggcaacgccgccgccgcggtggttgtcgagtgcgagaagttcaaggagaacgcgaggccgctcaagcgcgggcgcgacgtgtccaaactcaaccacgcgctcaaggcacacgccgatcccgcccagcgcgccactcttctcgaagcccgaaagaagatgattgaggcaatctacgagtaccaaggcgaggatccgctccaaccgtggctggactgcatcaagtgggtgcaggagtattttccgaccggcggcgagtgctcagggttggtggtgttgtacgagcagtgcgtgcggaccttattggatgacgagcgctacaaggacgacctccgcttcctcaaagtgtggctggaatacgcggggaactgtgctgatgctgaggtaatatacaggttcctggaggccaaccagattgggcagggccatgcgatctactacatgtcttacgcatcgttgatggagtcaaagaacaagttgaggaaagctaatgagatctttgtccttggtatagctagaaaagcgaagcctctggagaagttggaagctgtatacagggcatttcttcgaagatcaatcaaaaagagggaacaagagcaggatgatacagtagatgatgatctgccaaaacgcagtttcgggaataacttgaaacgagatgaaaacagaaatcagcaagcagggaactcccacctggggagaccaagggcactgcagaggccgctttcagtttacaaagatgaaagtccattaccaaatcagggccttgacagagtgaggagcaaagaaaataacacaagttggcgcaccctcggaacacgagcagaacggaacaaggaaaataacatgatgcctgctaaatggacgtctcacaagattccacagaagttaggagcaagaggagcggttcaatcaacccgagccagttgttccattgaagtcttcgtcgaggaagactgcacacatgaacctgctcggccggtgccaaagagcccaaatccttctgttctgaagctcaggcaaacaacaagcaaaagccttaagaaggagactgaattgctcaaggagaacccgctgcgcaacttccccctgagcaggcttaggtaatcagcatcttgctggttctgagaaacatctcgtacgttatgatttggtcgtatgtatggttgctgtgaggtgttgtgcccaaaaaaaaggctttattagcctctaaagcttagacgagcaatgtatgcctatggcattacccaagtgctgtaaggttctgcattatattgacacggcgtgcttattattgatagacctgcagatctcgtgcgtgcctatgtgaatcg

SEQ ID NO: 39409 - protein, 388 aa, Zea mays subsp. mays
  peptide (1)..(388): Ceres Seq. ID no. 12361280
  misc_feature (3)..(383): NCBI GI NO: 18403316 NR Description: expressed protein; protein id: At2g33560
  misc_feature (3)..(383): NCBI GI NO: 21593781 NR Description: unknown [Arabidopsis thaliana]
  misc_feature (2)..(193): NCBI GI NO: 5441887 NR Description: Similar to Arabidopsis thaliana BAC genomicsequence
  misc_feature (3)..(94): NCBI GI NO: 25370767 NR Description: hypothetical protein At2g33560
  misc_feature (261)..(341): NCBI GI NO: 25370767 NR Description: hypothetical protein At2g33560
  misc_feature (141)..(215): NCBI GI NO: 25370767 NR Description: hypothetical protein At2g33560
  misc_feature (33)..(316): NCBI GI NO: 26396196 NR Description: Mitotic spindle checkpoint component mad3
  misc_feature (31)..(258): NCBI GI NO: 22128593 NR Description: spindle checkpoint protein BubR1 [Xenopus laevis]
  misc_feature (31)..(253): NCBI GI NO: 29725501 NR Description: spindle checkpoint protein BubR1 [Gallus gallus]
  misc_feature (31)..(312): NCBI GI NO: 21619502 NR Description: budding uninhibited by benzimidazoles 1 homolog
MAAAEEMMAVLDKETLALMGLGNAAAAVVVECEKFKENARPLKRGRDVSKLNHALKAHADPAQRATLLEARKKMIEAIYEYQGEDPLQPWLDCIKWVQEYFPTGGECSGLVVLYEQCVRTLLDDERYKDDLRFLKVWLEYAGNCADAEVIYRFLEANQIGQGHAIYYMSYASLMESKNKLRKANEIFVLGIARKAKPLEKLEAVYRAFLRRSIKKREQEQDDTVDDDLPKRSFGNNLKRDENRNQQAGNSHLGRPRALQRPLSVYKDESPLPNQGLDRVRSKENNTSWRTLGTRAERNKENNMMPAKWTSHKIPQKLGARGAVQSTRASCSIEVFVEEDCTHEPARPVPKSPNPSVLKLRQTTSKSLKKETELLKENPLRNFPLSRLR

SEQ ID NO: 39410 - protein, 382 aa, Zea mays subsp. mays
  peptide (1)..(382): Ceres Seq. ID no. 12361281
  misc_feature (1)..(377): NCBI GI NO: 18403316 NR Description: expressed protein; protein id: At2g33560
  misc_feature (1)..(377): NCBI GI NO: 21593781 NR Description: unknown [Arabidopsis thaliana]
  misc_feature (1)..(187): NCBI GI NO: 5441887 NR Description: Similar to Arabidopsis thaliana BAC genomicsequence
  misc_feature (1)..(88): NCBI GI NO: 25370767 NR Description: hypothetical protein At2g33560
  misc_feature (255)..(335): NCBI GI NO: 25370767 NR Description: hypothetical protein At2g33560
  misc_feature (135)..(209): NCBI GI NO: 25370767 NR Description: hypothetical protein At2g33560
  misc_feature (27)..(310): NCBI GI NO: 26396196 NR Description: Mitotic spindle checkpoint component mad3
  misc_feature (25)..(252): NCBI GI NO: 22128593 NR Description: spindle checkpoint protein BubR1 [Xenopus laevis]
  misc_feature (25)..(247): NCBI GI NO: 29725501 NR Description: spindle checkpoint protein BubR1 [Gallus gallus]
  misc_feature (25)..(306): NCBI GI NO: 21619502 NR Description: budding uninhibited by benzimidazoles 1 homolog
MMAVLDKETLALMGLGNAAAAVVVECEKFKENARPLKRGRDVSKLNHALKAHADPAQRATLLEARKKMIEAIYEYQGEDPLQPWLDCIKWVQEYFPTGGECSGLVVLYEQCVRTLLDDERYKDDLRFLKVWLEYAGNCADAEVIYRFLEANQIGQGHAIYYMSYASLMESKNKLRKANEIFVLGIARKAKPLEKLEAVYRAFLRRSIKKREQEQDDTVDDDLPKRSFGNNLKRDENRNQQAGNSHLGRPRALQRPLSVYKDESPLPNQGLDRVRSKENNTSWRTLGTRAERNKENNMMPAKWTSHKIPQKLGARGAVQSTRASCSIEVFVEEDCTHEPARPVPKSPNPSVLKLRQTTSKSLKKETELLKENPLRNFPLSRLR

SEQ ID NO: 39411 - protein, 381 aa, Zea mays subsp. mays
  peptide (1)..(381): Ceres Seq. ID no. 12361282
  misc_feature (1)..(376): NCBI GI NO: 18403316 NR Description: expressed protein; protein id: At2g33560
  misc_feature (1)..(376): NCBI GI NO: 21593781 NR Description: unknown [Arabidopsis thaliana]
  misc_feature (1)..(186): NCBI GI NO: 5441887 NR Description: Similar to Arabidopsis thaliana BAC genomicsequence
  misc_feature (1)..(87): NCBI GI NO: 25370767 NR Description: hypothetical protein At2g33560
  misc_feature (254)..(334): NCBI GI NO: 25370767 NR Description: hypothetical protein At2g33560
  misc_feature (134)..(208): NCBI GI NO: 25370767 NR Description: hypothetical protein At2g33560
  misc_feature (26)..(309): NCBI GI NO: 26396196 NR Description: Mitotic spindle checkpoint component mad3
  misc_feature (24)..(251): NCBI GI NO: 22128593 NR Description: spindle checkpoint protein BubR1 [Xenopus laevis]
  misc_feature (24)..(246): NCBI GI NO: 29725501 NR Description: spindle checkpoint protein BubR1 [Gallus gallus]
  misc_feature (24)..(305): NCBI GI NO: 21619502 NR Description: budding uninhibited by benzimidazoles 1 homolog
MAVLDKETLALMGLGNAAAAVVVECEKFKENARPLKRGRDVSKLNHALKAHADPAQRATLLEARKKMIEAIYEYQGEDPLQPWLDCIKWVQEYFPTGGECSGLVVLYEQCVRTLLDDERYKDDLRFLKVWLEYAGNCADAEVIYRFLEANQIGQGHAIYYMSYASLMESKNKLRKANEIFVLGIARKAKPLEKLEAVYRAFLRRSIKKREQEQDDTVDDDLPKRSFGNNLKRDENRNQQAGNSHLGRPRALQRPLSVYKDESPLPNQGLDRVRSKENNTSWRTLGTRAERNKENNMMPAKWTSHKIPQKLGARGAVQSTRASCSIEVFVEEDCTHEPARPVPKSPNPSVLKLRQTTSKSLKKETELLKENPLRNFPLSRLR

SEQ ID NO: 39412 - DNA, 980 bp, Zea mays subsp. mays; identical to SEQ ID NO: 35280
  misc_feature (1)..(980): Ceres Seq. ID no. 13637386
  misc_feature (910)..(910): n is a, c, t, g, unknown, or other
  misc_feature (769)..(769): n is a, c, t, g, unknown, or other
  misc_feature (966)..(966): n is a, c, t, g, unknown, or other

SEQ ID NO: 39413 - protein, 326 aa, Zea mays subsp. mays; identical to SEQ ID NO: 35281
  peptide (1)..(326): Ceres Seq. ID no. 13637387
  misc_feature (54)..(230): Pfam Name: Pfam Description:  Nucleoplasmin
  misc_feature (31)..(324): NCBI GI NO: 7716948 NR Description: histone deacetylase 2 isoform b [Zea mays]
  misc_feature (31)..(324): NCBI GI NO: 7489751 NR Description: histone deacetylase (EC 3
  misc_feature (31)..(324): NCBI GI NO: 7716950 NR Description: histone deacetylase 2 isoform c [Zea mays]
  misc_feature (31)..(324): NCBI GI NO: 7804960 NR Description: putative histone deacetylase HD2 [Oryza sativa]
  misc_feature (31)..(323): NCBI GI NO: 22597156 NR Description: nucleolar histone deacetylase HD2-P39
  misc_feature (31)..(324): NCBI GI NO: 7804963 NR Description: putative histone deacetylase HD2c
  misc_feature (31)..(324): NCBI GI NO: 11282318 NR Description: histone deacetylase-like protein
  misc_feature (31)..(318): NCBI GI NO: 25352191 NR Description: probable histone deacetylase (EC 3.5.1.-)
  misc_feature (31)..(318): NCBI GI NO: 30688577 NR Description: histone deacetylase-related protein
  misc_feature (31)..(310): NCBI GI NO: 14550106 NR Description: HD2 type histone deacetylase HDA106 [Zea mays]
  misc_feature (256)..(256): Xaa is any aa, unknown or other
  misc_feature (303)..(303): Xaa is any aa, unknown or other
  misc_feature (322)..(322): Xaa is any aa, unknown or other

SEQ ID NO: 39414 - protein, 296 aa, Zea mays subsp. mays; identical to SEQ ID NO: 35282
  peptide (1)..(296): Ceres Seq. ID no. 13637388
  misc_feature (24)..(200): Pfam Name: Pfam Description:  Nucleoplasmin
  misc_feature (1)..(294): NCBI GI NO: 7716948 NR Description: histone deacetylase 2 isoform b [Zea mays]
  misc_feature (1)..(294): NCBI GI NO: 7489751 NR Description: histone deacetylase (EC 3
  misc_feature (1)..(294): NCBI GI NO: 7716950 NR Description: histone deacetylase 2 isoform c [Zea mays]
  misc_feature (1)..(294): NCBI GI NO: 7804960 NR Description: putative histone deacetylase HD2 [Oryza sativa]
  misc_feature (1)..(293): NCBI GI NO: 22597156 NR Description: nucleolar histone deacetylase HD2-P39
  misc_feature (1)..(294): NCBI GI NO: 7804963 NR Description: putative histone deacetylase HD2c
  misc_feature (1)..(294): NCBI GI NO: 11282318 NR Description: histone deacetylase-like protein
  misc_feature (1)..(288): NCBI GI NO: 25352191 NR Description: probable histone deacetylase (EC 3.5.1.-)
  misc_feature (1)..(288): NCBI GI NO: 30688577 NR Description: histone deacetylase-related protein
  misc_feature (1)..(280): NCBI GI NO: 14550106 NR Description: HD2 type histone deacetylase HDA106 [Zea mays]
  misc_feature (226)..(226): Xaa is any aa, unknown or other
  misc_feature (273)..(273): Xaa is any aa, unknown or other
  misc_feature (292)..(292): Xaa is any aa, unknown or other

SEQ ID NO: 39415 - protein, 255 aa, Zea mays subsp. mays; identical to SEQ ID NO: 35283
  peptide (1)..(255): Ceres Seq. ID no. 13637389
  misc_feature (1)..(159): Pfam Name: Pfam Description:  Nucleoplasmin
  misc_feature (1)..(253): NCBI GI NO: 7716948 NR Description: histone deacetylase 2 isoform b [Zea mays]
  misc_feature (1)..(253): NCBI GI NO: 7489751 NR Description: histone deacetylase (EC 3
  misc_feature (1)..(253): NCBI GI NO: 7716950 NR Description: histone deacetylase 2 isoform c [Zea mays]
  misc_feature (1)..(253): NCBI GI NO: 7804960 NR Description: putative histone deacetylase HD2 [Oryza sativa]
  misc_feature (1)..(252): NCBI GI NO: 22597156 NR Description: nucleolar histone deacetylase HD2-P39
  misc_feature (1)..(253): NCBI GI NO: 7804963 NR Description: putative histone deacetylase HD2c
  misc_feature (1)..(253): NCBI GI NO: 11282318 NR Description: histone deacetylase-like protein
  misc_feature (1)..(247): NCBI GI NO: 25352191 NR Description: probable histone deacetylase (EC 3.5.1.-)
  misc_feature (1)..(247): NCBI GI NO: 30688577 NR Description: histone deacetylase-related protein
  misc_feature (1)..(239): NCBI GI NO: 14550106 NR Description: HD2 type histone deacetylase HDA106 [Zea mays]
  misc_feature (185)..(185): Xaa is any aa, unknown or other
  misc_feature (232)..(232): Xaa is any aa, unknown or other
  misc_feature (251)..(251): Xaa is any aa, unknown or other

SEQ ID NO: 39416 - DNA, 1553 bp, Zea mays subsp. mays; identical to SEQ ID NO: 27216
  misc_feature (1)..(1553): Ceres Seq. ID no. 12350501

SEQ ID NO: 39417 - protein, 336 aa, Zea mays subsp. mays; identical to SEQ ID NO: 27217
  peptide (1)..(336): Ceres Seq. ID no. 12350502
  misc_feature (153)..(277): Pfam Name: Pfam Description:  DnaJ C terminal region
  misc_feature (1)..(336): NCBI GI NO: 5802244 NR Description: seed maturation protein PM37 [Glycine max]
  misc_feature (1)..(336): NCBI GI NO: 4008159 NR Description: DnaJ homolog [Salix gilgiana]
  misc_feature (1)..(336): NCBI GI NO: 7441930 NR Description: dnaJ protein homolog - potato
  misc_feature (1)..(336): NCBI GI NO: 1169382 NR Description: DnaJ protein homolog 2
  misc_feature (1)..(336): NCBI GI NO: 461944 NR Description: DnaJ protein homolog (DNAJ-1)
  misc_feature (1)..(336): NCBI GI NO: 6782421 NR Description: DnaJ-like protein [Lycopersicon esculentum]
  misc_feature (1)..(336): NCBI GI NO: 10945669 NR Description: J1P [Daucus carota]
  misc_feature (1)..(336): NCBI GI NO: 29367357 NR Description: DNAJ-like protein
  misc_feature (1)..(336): NCBI GI NO: 1169384 NR Description: DNAJ PROTEIN HOMOLOG ANJ1
  misc_feature (1)..(336): NCBI GI NO: 4210948 NR Description: DnaJ protein [Hevea brasiliensis]

SEQ ID NO: 39418 - protein, 330 aa, Zea mays subsp. mays; identical to SEQ ID NO: 27218
  peptide (1)..(330): Ceres Seq. ID no. 12350503
  misc_feature (147)..(271): Pfam Name: Pfam Description:  DnaJ C terminal region
  misc_feature (1)..(330): NCBI GI NO: 5802244 NR Description: seed maturation protein PM37 [Glycine max]
  misc_feature (1)..(330): NCBI GI NO: 4008159 NR Description: DnaJ homolog [Salix gilgiana]
  misc_feature (1)..(330): NCBI GI NO: 7441930 NR Description: dnaJ protein homolog - potato
  misc_feature (1)..(330): NCBI GI NO: 1169382 NR Description: DnaJ protein homolog 2
  misc_feature (1)..(330): NCBI GI NO: 461944 NR Description: DnaJ protein homolog (DNAJ-1)
  misc_feature (1)..(330): NCBI GI NO: 6782421 NR Description: DnaJ-like protein [Lycopersicon esculentum]
  misc_feature (1)..(330): NCBI GI NO: 10945669 NR Description: J1P [Daucus carota]
  misc_feature (1)..(330): NCBI GI NO: 29367357 NR Description: DNAJ-like protein
  misc_feature (1)..(330): NCBI GI NO: 1169384 NR Description: DNAJ PROTEIN HOMOLOG ANJ1
  misc_feature (1)..(330): NCBI GI NO: 4210948 NR Description: DnaJ protein [Hevea brasiliensis]

SEQ ID NO: 39419 - protein, 235 aa, Zea mays subsp. mays; identical to SEQ ID NO: 27219
  peptide (1)..(235): Ceres Seq. ID no. 12350504
  misc_feature (52)..(176): Pfam Name: Pfam Description:  DnaJ C terminal region
  misc_feature (1)..(235): NCBI GI NO: 5802244 NR Description: seed maturation protein PM37 [Glycine max]
  misc_feature (1)..(235): NCBI GI NO: 4008159 NR Description: DnaJ homolog [Salix gilgiana]
  misc_feature (1)..(235): NCBI GI NO: 7441930 NR Description: dnaJ protein homolog - potato
  misc_feature (1)..(235): NCBI GI NO: 1169382 NR Description: DnaJ protein homolog 2
  misc_feature (1)..(235): NCBI GI NO: 461944 NR Description: DnaJ protein homolog (DNAJ-1)
  misc_feature (1)..(235): NCBI GI NO: 6782421 NR Description: DnaJ-like protein [Lycopersicon esculentum]
  misc_feature (1)..(235): NCBI GI NO: 10945669 NR Description: J1P [Daucus carota]
  misc_feature (1)..(235): NCBI GI NO: 29367357 NR Description: DNAJ-like protein
  misc_feature (1)..(235): NCBI GI NO: 1169384 NR Description: DNAJ PROTEIN HOMOLOG ANJ1
  misc_feature (1)..(235): NCBI GI NO: 4210948 NR Description: DnaJ protein [Hevea brasiliensis]

SEQ ID NO: 39420 - DNA, 1508 bp, Zea mays subsp. mays
  misc_feature (1)..(1508): Ceres Seq. ID no. 12362611
  misc_feature (539)..(539): n is a, c, t, g, unknown, or other
gcacgagaccattacctagaacatcctaatcaaaaaggccgctctctctgccacactcgggtgcctccaccaccaccagtagcagcagcagcaggatcaaaaggccaatgggggcgcacgccaccgcggccgcggccgccgtcctgctcgtcgccacctgcgttgcggcggtggcggcggcggcggcggcggcgctgctgcagcacgagcccggcaggatctcaggggacgcggtgggcgtgctggacgacgaccccgtggggaagctgaaggtgttcgtgtacgagatgccgcgcaagtacaacaggatgctgctggacaaggacagccggtgcctgcaccacatgttcgcggcggagatcttcatgcaccagttcctgctgtcgagcgcggtgcggacgctggacccggaggaggccgactggttctacacgcccgcgtacaccacctgcgacctcacgccgcagggcttcccgctgccgttccgggcgccgcggatcatgcgcagcgccatccgctacgtggccaccacgtggccnttctggaaccgcaccgacggcgccgaccacttcttcctcacgccgcacgacttcggcgcctgcttccactaccaggaggagcgcgccatggagcggggcatcctgccgctgctccgccgcgccacgctggtgcagacgttcggccagcgcaaccacgtgtgcctgcaggacggctccatcaccgtcccgccctacgccgacccgcgcaagatgcaggcgcacctcatcagccccggcacgccgcgctccatcttcgtctacttcaggggcctcttctacgacatgggcaacgaccccgagggcggctactacgccaggggcgctcgcgcgtcggtgtgggagaacttcaaggacaacccgctgttcgacatctcgacggagcacccgtcgacgtactacgaggacatgcagcgcgccatcttctgcctgtgcccgctggggtgggcgccctggagcccccggctggtggaggcggtggtgttcgggtgcatccccgtcatcatcgccgacgacatcgtgctgccgttcgcggacgccatcccctgggaggacatcagcgtgttcgtggcggagcgggacgtgccgcgcctcgactccatcctcacctccatcccgctgcccgacatcctgcggaggcagcgcctgctggcgcgggactccgtcaagcaggcgctgctgttccaccagcccgccaggcccggggacgccttccaccaggtgctcaacgggctggcgcggaagctgccgcacggcgagggcgtgttcctgcagcccggggagaaggcgctcgactgggacgccggactccagagcgacctcaagccctggtagtggactggactcgttgtacatctcttcgtgttcctttgtactctttcatttgacatgacatggatggatcacgcattagtttttgtaccacggcccgtttacatgcagcagcaatatactaatatatagtgtatttcc

SEQ ID NO: 39421 - protein, 420 aa, Zea mays subsp. mays
  peptide (1)..(420): Ceres Seq. ID no. 12362612
  misc_feature (56)..(360): Pfam Name: Pfam Description:  Exostosin family
  misc_feature (1)..(420): NCBI GI NO: 34907044 NR Description: hypothetical protein~similar to Arabidopsisthaliana chromosome 1
  misc_feature (9)..(420): NCBI GI NO: 18424516 NR Description: putative protein; protein id: At5g61840
  misc_feature (9)..(420): NCBI GI NO: 21592991 NR Description: unknown [Arabidopsis thaliana]
  misc_feature (15)..(420): NCBI GI NO: 15223522 NR Description: unknown protein; protein id: At1g27440.1
  misc_feature (11)..(420): NCBI GI NO: 18642697 NR Description: Unknown protein [Oryza sativa]
  misc_feature (80)..(420): NCBI GI NO: 23821292 NR Description: pectin-glucuronyltransferase
  misc_feature (80)..(420): NCBI GI NO: 10176877 NR Description: gb|AAC80624
  misc_feature (49)..(392): NCBI GI NO: 25407954 NR Description: hypothetical protein At2g28110
  misc_feature (1)..(392): NCBI GI NO: 15237173 NR Description: putative protein; protein id: At5g22940.1
  misc_feature (53)..(392): NCBI GI NO: 9758008 NR Description: contains similarity to limonenecyclase~gene_id:MED24
  misc_feature (144)..(144): Xaa is any aa, unknown or other
MGAHATAAAAAVLLVATCVAAVAAAAAAALLQHEPGRISGDAVGVLDDDPVGKLKVFVYEMPRKYNRMLLDKDSRCLHHMFAAEIFMHQFLLSSAVRTLDPEEADWFYTPAYTTCDLTPQGFPLPFRAPRIMRSAIRYVATTWXFWNRTDGADHFFLTPHDFGACFHYQEERAMERGILPLLRRATLVQTFGQRNHVCLQDGSITVPPYADPRKMQAHLISPGTPRSIFVYFRGLFYDMGNDPEGGYYARGARASVWENFKDNPLFDISTEHPSTYYEDMQRAIFCLCPLGWAPWSPRLVEAVVFGCIPVIIADDIVLPFADAIPWEDISVFVAERDVPRLDSILTSIPLPDILRRQRLLARDSVKQALLFHQPARPGDAFHQVLNGLARKLPHGEGVFLQPGEKALDWDAGLQSDLKPW

SEQ ID NO: 39422 - protein, 360 aa, Zea mays subsp. mays
  peptide (1)..(360): Ceres Seq. ID no. 12362613
  misc_feature (1)..(300): Pfam Name: Pfam Description:  Exostosin family
  misc_feature (1)..(360): NCBI GI NO: 34907044 NR Description: hypothetical protein~similar to Arabidopsisthaliana chromosome 1
  misc_feature (1)..(360): NCBI GI NO: 18424516 NR Description: putative protein; protein id: At5g61840
  misc_feature (1)..(360): NCBI GI NO: 21592991 NR Description: unknown [Arabidopsis thaliana]
  misc_feature (1)..(360): NCBI GI NO: 15223522 NR Description: unknown protein; protein id: At1g27440.1
  misc_feature (1)..(360): NCBI GI NO: 18642697 NR Description: Unknown protein [Oryza sativa]
  misc_feature (20)..(360): NCBI GI NO: 23821292 NR Description: pectin-glucuronyltransferase
  misc_feature (20)..(360): NCBI GI NO: 10176877 NR Description: gb|AAC80624
  misc_feature (1)..(332): NCBI GI NO: 25407954 NR Description: hypothetical protein At2g28110
  misc_feature (1)..(332): NCBI GI NO: 15237173 NR Description: putative protein; protein id: At5g22940.1
  misc_feature (1)..(332): NCBI GI NO: 9758008 NR Description: contains similarity to limonenecyclase~gene_id:MED24
  misc_feature (84)..(84): Xaa is any aa, unknown or other
MPRKYNRMLLDKDSRCLHHMFAAEIFMHQFLLSSAVRTLDPEEADWFYTPAYTTCDLTPQGFPLPFRAPRIMRSAIRYVATTWXFWNRTDGADHFFLTPHDFGACFHYQEERAMERGILPLLRRATLVQTFGQRNHVCLQDGSITVPPYADPRKMQAHLISPGTPRSIFVYFRGLFYDMGNDPEGGYYARGARASVWENFKDNPLFDISTEHPSTYYEDMQRAIFCLCPLGWAPWSPRLVEAVVFGCIPVIIADDIVLPFADAIPWEDISVFVAERDVPRLDSILTSIPLPDILRRQRLLARDSVKQALLFHQPARPGDAFHQVLNGLARKLPHGEGVFLQPGEKALDWDAGLQSDLKPW

SEQ ID NO: 39423 - protein, 353 aa, Zea mays subsp. mays
  peptide (1)..(353): Ceres Seq. ID no. 12362614
  misc_feature (1)..(293): Pfam Name: Pfam Description:  Exostosin family
  misc_feature (1)..(353): NCBI GI NO: 34907044 NR Description: hypothetical protein~similar to Arabidopsisthaliana chromosome 1
  misc_feature (1)..(353): NCBI GI NO: 18424516 NR Description: putative protein; protein id: At5g61840
  misc_feature (1)..(353): NCBI GI NO: 21592991 NR Description: unknown [Arabidopsis thaliana]
  misc_feature (1)..(353): NCBI GI NO: 15223522 NR Description: unknown protein; protein id: At1g27440.1
  misc_feature (1)..(353): NCBI GI NO: 18642697 NR Description: Unknown protein [Oryza sativa]
  misc_feature (13)..(353): NCBI GI NO: 23821292 NR Description: pectin-glucuronyltransferase
  misc_feature (13)..(353): NCBI GI NO: 10176877 NR Description: gb|AAC80624
  misc_feature (1)..(325): NCBI GI NO: 25407954 NR Description: hypothetical protein At2g28110
  misc_feature (1)..(325): NCBI GI NO: 15237173 NR Description: putative protein; protein id: At5g22940.1
  misc_feature (1)..(325): NCBI GI NO: 9758008 NR Description: contains similarity to limonenecyclase~gene_id:MED24
  misc_feature (77)..(77): Xaa is any aa, unknown or other
MLLDKDSRCLHHMFAAEIFMHQFLLSSAVRTLDPEEADWFYTPAYTTCDLTPQGFPLPFRAPRIMRSAIRYVATTWXFWNRTDGADHFFLTPHDFGACFHYQEERAMERGILPLLRRATLVQTFGQRNHVCLQDGSITVPPYADPRKMQAHLISPGTPRSIFVYFRGLFYDMGNDPEGGYYARGARASVWENFKDNPLFDISTEHPSTYYEDMQRAIFCLCPLGWAPWSPRLVEAVVFGCIPVIIADDIVLPFADAIPWEDISVFVAERDVPRLDSILTSIPLPDILRRQRLLARDSVKQALLFHQPARPGDAFHQVLNGLARKLPHGEGVFLQPGEKALDWDAGLQSDLKPW

SEQ ID NO: 39424 - DNA, 494 bp, Zea mays subsp. mays
  misc_feature (1)..(494): Ceres Seq. ID no. 11030852
atcaagatgcgtgagatcgctgaagcttaccttggcagcacgatcaagaatgctgttgtcacggtccctgcctacttcaacgactcacagaggcaggccacgaaggatgctggggtgattgctggcctcaatgtgctgcgtatcatcaatgagccaaccgctgctgctattgcctatggtcttgacaagaaggcaaccagcgtcggtgagaagaatgtcctcatctttgaccttggaggtggtaccttcgatgtctccctccttactattgaggaaggtatctttgaggtcaaggccacagctggcgacacccatcttgggggtgaggactttgacaacaggatggtcaaccactttgtccaggagttcaagaggaagaacaagaaggatatcactggcaacccgagggctctccggaggctgaggacctcttgtgagagggccaagagaactctgtcttccactgcccagaccaccattgagattgactcgct

SEQ ID NO: 39425 - protein, 164 aa, Zea mays subsp. mays
  peptide (1)..(164): Ceres Seq. ID no. 11030853
  misc_feature (1)..(163): Pfam Name: Pfam Description:  Hsp70 protein
  misc_feature (1)..(163): NCBI GI NO: 1076746 NR Description: dnaK-type molecular chaperone hsp70 - rice
  misc_feature (1)..(163): NCBI GI NO: 21664287 NR Description: heat shock protein 70
  misc_feature (1)..(163): NCBI GI NO: 26985219 NR Description: non-cell-autonomous heat shock cognate protein 70
  misc_feature (1)..(163): NCBI GI NO: 15232682 NR Description: heat-shock protein
  misc_feature (1)..(163): NCBI GI NO: 15241849 NR Description: dnaK-type molecular chaperone hsc70
  misc_feature (1)..(163): NCBI GI NO: 29124135 NR Description: heat shock protein cognate 70
  misc_feature (1)..(163): NCBI GI NO: 1072473 NR Description: dnaK-type molecular chaperone hsc70
  misc_feature (1)..(163): NCBI GI NO: 2655420 NR Description: heat shock cognate protein HSC70 [Brassica napus]
  misc_feature (1)..(163): NCBI GI NO: 123593 NR Description: HEAT SHOCK 70 KD PROTEIN
  misc_feature (1)..(163): NCBI GI NO: 224970 NR Description: heat shock protein hsp70
IKMREIAEAYLGSTIKNAVVTVPAYFNDSQRQATKDAGVIAGLNVLRIINEPTAAAIAYGLDKKATSVGEKNVLIFDLGGGTFDVSLLTIEEGIFEVKATAGDTHLGGEDFDNRMVNHFVQEFKRKNKKDITGNPRALRRLRTSCERAKRTLSSTAQTTIEIDS

SEQ ID NO: 39426 - protein, 162 aa, Zea mays subsp. mays
  peptide (1)..(162): Ceres Seq. ID no. 11030854
  misc_feature (1)..(161): Pfam Name: Pfam Description:  Hsp70 protein
  misc_feature (1)..(161): NCBI GI NO: 1076746 NR Description: dnaK-type molecular chaperone hsp70 - rice
  misc_feature (1)..(161): NCBI GI NO: 21664287 NR Description: heat shock protein 70
  misc_feature (1)..(161): NCBI GI NO: 26985219 NR Description: non-cell-autonomous heat shock cognate protein 70
  misc_feature (1)..(161): NCBI GI NO: 15232682 NR Description: heat-shock protein
  misc_feature (1)..(161): NCBI GI NO: 15241849 NR Description: dnaK-type molecular chaperone hsc70
  misc_feature (1)..(161): NCBI GI NO: 29124135 NR Description: heat shock protein cognate 70
  misc_feature (1)..(161): NCBI GI NO: 1072473 NR Description: dnaK-type molecular chaperone hsc70
  misc_feature (1)..(161): NCBI GI NO: 2655420 NR Description: heat shock cognate protein HSC70 [Brassica napus]
  misc_feature (1)..(161): NCBI GI NO: 123593 NR Description: HEAT SHOCK 70 KD PROTEIN
  misc_feature (1)..(161): NCBI GI NO: 861170 NR Description: heat shock protein 70 [Zea mays]
MREIAEAYLGSTIKNAVVTVPAYFNDSQRQATKDAGVIAGLNVLRIINEPTAAAIAYGLDKKATSVGEKNVLIFDLGGGTFDVSLLTIEEGIFEVKATAGDTHLGGEDFDNRMVNHFVQEFKRKNKKDITGNPRALRRLRTSCERAKRTLSSTAQTTIEIDS

SEQ ID NO: 39427 - protein, 97 aa, Zea mays subsp. mays
  peptide (1)..(97): Ceres Seq. ID no. 11030855
MCCVSSMSQPLLLLPMVLTRRQPASVRRMSSSLTLEVVPSMSPSLLLRKVSLRSRPQLATPILGVRTLTTGWSTTLSRSSRGRTRRISLATRGLSGG

SEQ ID NO: 39428 - DNA, 1275 bp, Zea mays subsp. mays; identical to SEQ ID NO: 28896
  misc_feature (1)..(1275): Ceres Seq. ID no. 12366288

SEQ ID NO: 39429 - protein, 337 aa, Zea mays subsp. mays; identical to SEQ ID NO: 28897
  peptide (1)..(337): Ceres Seq. ID no. 12366289
  misc_feature (187)..(329): Pfam Name: Pfam Description:  Dihydrodipicolinate reductase, C-terminus
  misc_feature (53)..(330): NCBI GI NO: 18411368 NR Description: putative protein; protein id: At3g59890
  misc_feature (31)..(330): NCBI GI NO: 18406430 NR Description: expressed protein; protein id: At2g44040
  misc_feature (53)..(312): NCBI GI NO: 11357603 NR Description: hypothetical protein F24G16
  misc_feature (31)..(313): NCBI GI NO: 7486478 NR Description: hypothetical protein At2g44040
  misc_feature (96)..(228): NCBI GI NO: 282117 NR Description: dipicolinate reductase homolog - Coxiella burnetii

SEQ ID NO: 39430 - protein, 329 aa, Zea mays subsp. mays; identical to SEQ ID NO: 28898
  peptide (1)..(329): Ceres Seq. ID no. 12366290
  misc_feature (179)..(321): Pfam Name: Pfam Description:  Dihydrodipicolinate reductase, C-terminus
  misc_feature (45)..(322): NCBI GI NO: 18411368 NR Description: putative protein; protein id: At3g59890
  misc_feature (23)..(322): NCBI GI NO: 18406430 NR Description: expressed protein; protein id: At2g44040
  misc_feature (45)..(304): NCBI GI NO: 11357603 NR Description: hypothetical protein F24G16
  misc_feature (23)..(305): NCBI GI NO: 7486478 NR Description: hypothetical protein At2g44040
  misc_feature (88)..(220): NCBI GI NO: 282117 NR Description: dipicolinate reductase homolog - Coxiella burnetii

SEQ ID NO: 39431 - protein, 326 aa, Zea mays subsp. mays; identical to SEQ ID NO: 28899
  peptide (1)..(326): Ceres Seq. ID no. 12366291
  misc_feature (176)..(318): Pfam Name: Pfam Description:  Dihydrodipicolinate reductase, C-terminus
  misc_feature (42)..(319): NCBI GI NO: 18411368 NR Description: putative protein; protein id: At3g59890
  misc_feature (20)..(319): NCBI GI NO: 18406430 NR Description: expressed protein; protein id: At2g44040
  misc_feature (42)..(301): NCBI GI NO: 11357603 NR Description: hypothetical protein F24G16
  misc_feature (20)..(302): NCBI GI NO: 7486478 NR Description: hypothetical protein At2g44040
  misc_feature (85)..(217): NCBI GI NO: 282117 NR Description: dipicolinate reductase homolog - Coxiella burnetii

SEQ ID NO: 39432 - DNA, 490 bp, Zea mays subsp. mays
  misc_feature (1)..(490): Ceres Seq. ID no. 5006152
atcacccgcgtccgccaccgccgccgcctttcgtaccgcggcccctaaacccctttcctcgttcccctccgtctctcagttaggcacaatgatgctagctaataagcttggtggtttgctcaagaatgctacgagttcaaagagttcaaatatgtctgtctaccaagcaatcagatgcatgtcatcatccaagctttttgttggagggctttcttatggaaccgatgatcacagtctcagagacgagtttgccaaatatggacaagttattgaagctaagattatccttgatcgtgagtctgggaggtccagaggttttggctttataacttacacgtcttctgaggaggcttcggctgccatcactgccatggatggaaagactctggatggacggaacatacgggttaatcatgctaacgagaggacaggtggcttcccgcagcagcggtggttatggtggtggcggctatggtggtggcaytacggc

SEQ ID NO: 39433 - protein, 163 aa, Zea mays subsp. mays
  peptide (1)..(163): Ceres Seq. ID no. 5006153
  misc_feature (65)..(136): Pfam Name: a.k.a. RRM, RBD, or RNP domain Pfam Description: RNA recognition motif.
  misc_feature (30)..(146): NCBI GI NO: 15822703 NR Description: RNA-binding protein precursor [Nicotiana tabacum]
  misc_feature (30)..(146): NCBI GI NO: 15239505 NR Description: glycine-rich RNA-binding protein
  misc_feature (30)..(146): NCBI GI NO: 15822705 NR Description: RNA-binding protein precursor [Solanum tuberosum]
  misc_feature (30)..(145): NCBI GI NO: 1084415 NR Description: RNA-binding protein - wood tobacco
  misc_feature (30)..(142): NCBI GI NO: 7439994 NR Description: glycine-rich RNA-binding protein - garden pea
  misc_feature (30)..(146): NCBI GI NO: 15221187 NR Description: glycine-rich RNA-binding protein
  misc_feature (30)..(146): NCBI GI NO: 7439995 NR Description: RNA binding protein 3 - wood tobacco
  misc_feature (30)..(146): NCBI GI NO: 7489099 NR Description: RNA-binding protein RGP-3 - wood tobacco
  misc_feature (30)..(128): NCBI GI NO: 19881711 NR Description: Putative RNA-binding protein [Oryza sativa]
  misc_feature (30)..(142): NCBI GI NO: 2826811 NR Description: AtGRP2 [Arabidopsis thaliana]
  misc_feature (161)..(161): Xaa is any aa, unknown or other
SPASATAAAFRTAAPKPLSSFPSVSQLGTMMLANKLGGLLKNATSSKSSNMSVYQAIRCMSSSKLFVGGLSYGTDDHSLRDEFAKYGQVIEAKIILDRESGRSRGFGFITYTSSEEASAAITAMDGKTLDGRNIRVNHANERTGGFPQQRWLWWWRLWWWXYG

SEQ ID NO: 39434 - protein, 134 aa, Zea mays subsp. mays
  peptide (1)..(134): Ceres Seq. ID no. 5006154
  misc_feature (36)..(107): Pfam Name: a.k.a. RRM, RBD, or RNP domain Pfam Description: RNA recognition motif.
  misc_feature (1)..(117): NCBI GI NO: 15822703 NR Description: RNA-binding protein precursor [Nicotiana tabacum]
  misc_feature (1)..(117): NCBI GI NO: 15239505 NR Description: glycine-rich RNA-binding protein
  misc_feature (1)..(117): NCBI GI NO: 15822705 NR Description: RNA-binding protein precursor [Solanum tuberosum]
  misc_feature (1)..(116): NCBI GI NO: 1084415 NR Description: RNA-binding protein - wood tobacco
  misc_feature (1)..(113): NCBI GI NO: 7439994 NR Description: glycine-rich RNA-binding protein - garden pea
  misc_feature (1)..(117): NCBI GI NO: 15221187 NR Description: glycine-rich RNA-binding protein
  misc_feature (1)..(117): NCBI GI NO: 7439995 NR Description: RNA binding protein 3 - wood tobacco
  misc_feature (1)..(117): NCBI GI NO: 7489099 NR Description: RNA-binding protein RGP-3 - wood tobacco
  misc_feature (1)..(99): NCBI GI NO: 19881711 NR Description: Putative RNA-binding protein [Oryza sativa]
  misc_feature (1)..(113): NCBI GI NO: 2826811 NR Description: AtGRP2 [Arabidopsis thaliana]
  misc_feature (132)..(132): Xaa is any aa, unknown or other
MMLANKLGGLLKNATSSKSSNMSVYQAIRCMSSSKLFVGGLSYGTDDHSLRDEFAKYGQVIEAKIILDRESGRSRGFGFITYTSSEEASAAITAMDGKTLDGRNIRVNHANERTGGFPQQRWLWWWRLWWWXYG

SEQ ID NO: 39435 - protein, 133 aa, Zea mays subsp. mays
  peptide (1)..(133): Ceres Seq. ID no. 5006155
  misc_feature (35)..(106): Pfam Name: a.k.a. RRM, RBD, or RNP domain Pfam Description: RNA recognition motif.
  misc_feature (1)..(116): NCBI GI NO: 15822703 NR Description: RNA-binding protein precursor [Nicotiana tabacum]
  misc_feature (1)..(116): NCBI GI NO: 15239505 NR Description: glycine-rich RNA-binding protein
  misc_feature (1)..(116): NCBI GI NO: 15822705 NR Description: RNA-binding protein precursor [Solanum tuberosum]
  misc_feature (1)..(115): NCBI GI NO: 1084415 NR Description: RNA-binding protein - wood tobacco
  misc_feature (1)..(112): NCBI GI NO: 7439994 NR Description: glycine-rich RNA-binding protein - garden pea
  misc_feature (1)..(116): NCBI GI NO: 15221187 NR Description: glycine-rich RNA-binding protein
  misc_feature (1)..(116): NCBI GI NO: 7439995 NR Description: RNA binding protein 3 - wood tobacco
  misc_feature (1)..(116): NCBI GI NO: 7489099 NR Description: RNA-binding protein RGP-3 - wood tobacco
  misc_feature (1)..(98): NCBI GI NO: 19881711 NR Description: Putative RNA-binding protein [Oryza sativa]
  misc_feature (1)..(112): NCBI GI NO: 2826811 NR Description: AtGRP2 [Arabidopsis thaliana]
  misc_feature (131)..(131): Xaa is any aa, unknown or other
MLANKLGGLLKNATSSKSSNMSVYQAIRCMSSSKLFVGGLSYGTDDHSLRDEFAKYGQVIEAKIILDRESGRSRGFGFITYTSSEEASAAITAMDGKTLDGRNIRVNHANERTGGFPQQRWLWWWRLWWWXYG

SEQ ID NO: 39436 - DNA, 933 bp, Zea mays subsp. mays
  misc_feature (1)..(933): Ceres Seq. ID no. 12417671
  misc_feature (453)..(453): n is a, c, t, g, unknown, or other
  misc_feature (456)..(456): n is a, c, t, g, unknown, or other
  misc_feature (478)..(478): n is a, c, t, g, unknown, or other
gcacgagaccattacctagaacatcctaatcgaaaaaagatccagcaaaccagagttctccaaagcgcgaagctccagctcaagctccaggcaaccgtcaccgtcagggaacgcgcgcgcagcaatggccttttactacggcgtgggcggacagtcgtcggcgtgggcggcgccgggcggcagcaggccatggaccaaggcggaggacaaggtgttcgagggcgcgctggtgatgttcccggagcacttgccgaaccggtgggcgctggtggcgtcccggctgtacgaccgcacgccgcaggaggcctgggaccactaccaggcgctggtgaccgacgtcgacctcatcgagcgcggcatggtggaggccccggactcctgggacgacgacgcggccgccgccggagggggacgctcgggccgcggccgcgggggcggcagcggcagcggcancgnagaggagcgccgccgcggggtnccgtggaccgaggacgagcacaggctgtttctggaggggcttgagaagtacgggcgcggcgactggcggaacatctcgcgctggtcggtgaagacgcggacgcccacgcaggtggccagccacgcgcagaagtacttcatccgccaggccagcgccgccagccgcggcgacaccaagcgcaagagcatccacgacatcaccaccccgtgatggctcctgctcgtggaggacaaagctagcaccgagagatccagacctggctactgctgctacctgcattttatctttacctttgcgagacgggaacaaaaaaaaacaaacagccgtccctgtggttgtagaaatgtaggcaaagctaagttagcctggctggaatctggggtccggtataactgtattaagcggcactacaatgactatcgaataaataagttttgcaagtttgtctggatttc

SEQ ID NO: 39437 - protein, 187 aa, Zea mays subsp. mays
  peptide (1)..(187): Ceres Seq. ID no. 12417672
  misc_feature (117)..(164): Pfam Name: Pfam Description:  Myb-like DNA-binding domain
  misc_feature (11)..(187): NCBI GI NO: 34908528 NR Description: putative I-box binding factor
  misc_feature (20)..(186): NCBI GI NO: 15238311 NR Description: I-box binding factor - like protein
  misc_feature (11)..(186): NCBI GI NO: 18874263 NR Description: MYB-like transcription factor DIVARICATA
  misc_feature (10)..(186): NCBI GI NO: 19911579 NR Description: syringolide-induced protein 1-3-1B [Glycine max]
  misc_feature (23)..(186): NCBI GI NO: 19911577 NR Description: syringolide-induced protein 1-3-1A [Glycine max]
  misc_feature (12)..(187): NCBI GI NO: 15237776 NR Description: I-box binding factor - like protein
  misc_feature (23)..(186): NCBI GI NO: 6688529 NR Description: I-box binding factor [Lycopersicon esculentum]
  misc_feature (23)..(109): NCBI GI NO: 7446171 NR Description: probable MYB family transcription factor
  misc_feature (23)..(109): NCBI GI NO: 30687381 NR Description: MYB family transcription factor -related
  misc_feature (101)..(186): NCBI GI NO: 7446171 NR Description: probable MYB family transcription factor
  misc_feature (110)..(110): Xaa is any aa, unknown or other
  misc_feature (111)..(111): Xaa is any aa, unknown or other
  misc_feature (118)..(118): Xaa is any aa, unknown or other
MAFYYGVGGQSSAWAAPGGSRPWTKAEDKVFEGALVMFPEHLPNRWALVASRLYDRTPQEAWDHYQALVTDVDLIERGMVEAPDSWDDDAAAAGGGRSGRGRGGGSGSGXXEERRRGXPWTEDEHRLFLEGLEKYGRGDWRNISRWSVKTRTPTQVASHAQKYFIRQASAASRGDTKRKSIHDITTP

SEQ ID NO: 39438 - protein, 173 aa, Zea mays subsp. mays
  peptide (1)..(173): Ceres Seq. ID no. 12417673
  misc_feature (151)..(151): Xaa is any aa, unknown or other
  misc_feature (152)..(152): Xaa is any aa, unknown or other
  misc_feature (160)..(160): Xaa is any aa, unknown or other
ARDHYLEHPNRKKIQQTRVLQSAKLQLKLQATVTVRERARSNGLLLRRGRTVVGVGGAGRQQAMDQGGGQGVRGRAGDVPGALAEPVGAGGVPAVRPHAAGGLGPLPGAGDRRRPHRARHGGGPGLLGRRRGRRRRGTLGPRPRGRQRQRXXRGAPPRGXVDRGRAQAVSGGA

SEQ ID NO: 39439 - protein, 151 aa, Zea mays subsp. mays
  peptide (1)..(151): Ceres Seq. ID no. 12417674
  misc_feature (81)..(128): Pfam Name: Pfam Description:  Myb-like DNA-binding domain
  misc_feature (1)..(151): NCBI GI NO: 34908528 NR Description: putative I-box binding factor
  misc_feature (1)..(150): NCBI GI NO: 15238311 NR Description: I-box binding factor - like protein
  misc_feature (1)..(150): NCBI GI NO: 18874263 NR Description: MYB-like transcription factor DIVARICATA
  misc_feature (1)..(150): NCBI GI NO: 19911579 NR Description: syringolide-induced protein 1-3-1B [Glycine max]
  misc_feature (1)..(150): NCBI GI NO: 19911577 NR Description: syringolide-induced protein 1-3-1A [Glycine max]
  misc_feature (1)..(151): NCBI GI NO: 15237776 NR Description: I-box binding factor - like protein
  misc_feature (1)..(150): NCBI GI NO: 6688529 NR Description: I-box binding factor [Lycopersicon esculentum]
  misc_feature (1)..(73): NCBI GI NO: 7446171 NR Description: probable MYB family transcription factor
  misc_feature (1)..(73): NCBI GI NO: 30687381 NR Description: MYB family transcription factor -related
  misc_feature (65)..(150): NCBI GI NO: 7446171 NR Description: probable MYB family transcription factor
  misc_feature (74)..(74): Xaa is any aa, unknown or other
  misc_feature (75)..(75): Xaa is any aa, unknown or other
  misc_feature (82)..(82): Xaa is any aa, unknown or other
MFPEHLPNRWALVASRLYDRTPQEAWDHYQALVTDVDLIERGMVEAPDSWDDDAAAAGGGRSGRGRGGGSGSGXXEERRRGXPWTEDEHRLFLEGLEKYGRGDWRNISRWSVKTRTPTQVASHAQKYFIRQASAASRGDTKRKSIHDITTP

SEQ ID NO: 39440 - DNA, 1534 bp, Zea mays subsp. mays; identical to SEQ ID NO: 32925
  misc_feature (1)..(1534): Ceres Seq. ID no. 13492041

SEQ ID NO: 39441 - protein, 418 aa, Zea mays subsp. mays; identical to SEQ ID NO: 32926
  peptide (1)..(418): Ceres Seq. ID no. 13492042
  misc_feature (249)..(377): Pfam Name: Pfam Description:  Integral membrane protein DUF6
  misc_feature (63)..(418): NCBI GI NO: 34908982 NR Description: P0003D09.29
  misc_feature (64)..(413): NCBI GI NO: 15236781 NR Description: phosphate translocator-related
  misc_feature (64)..(412): NCBI GI NO: 15224742 NR Description: phosphate translocator-related
  misc_feature (72)..(415): NCBI GI NO: 18420914 NR Description: phosphate translocator-related
  misc_feature (64)..(418): NCBI GI NO: 15238995 NR Description: phosphate translocator-related
  misc_feature (74)..(385): NCBI GI NO: 15221115 NR Description: phosphate translocator-related
  misc_feature (74)..(418): NCBI GI NO: 18401506 NR Description: phosphate translocator-related
  misc_feature (74)..(385): NCBI GI NO: 8778534 NR Description: F21D18.5 [Arabidopsis thaliana]
  misc_feature (75)..(412): NCBI GI NO: 18400381 NR Description: transporter-related [Arabidopsis thaliana]
  misc_feature (75)..(412): NCBI GI NO: 9279588 NR Description: phosphate/phosphoenolpyruvate translocator protein-like

SEQ ID NO: 39442 - protein, 414 aa, Zea mays subsp. mays; identical to SEQ ID NO: 32927
  peptide (1)..(414): Ceres Seq. ID no. 13492043
  misc_feature (19)..(66): NCBI GI NO: 27375632 NR Description: blr0521 [Bradyrhizobium japonicum]

SEQ ID NO: 39443 - protein, 355 aa, Zea mays subsp. mays; identical to SEQ ID NO: 32928
  peptide (1)..(355): Ceres Seq. ID no. 13492044
  misc_feature (186)..(314): Pfam Name: Pfam Description:  Integral membrane protein DUF6
  misc_feature (1)..(355): NCBI GI NO: 34908982 NR Description: P0003D09.29
  misc_feature (1)..(350): NCBI GI NO: 15236781 NR Description: phosphate translocator-related
  misc_feature (1)..(349): NCBI GI NO: 15224742 NR Description: phosphate translocator-related
  misc_feature (9)..(352): NCBI GI NO: 18420914 NR Description: phosphate translocator-related
  misc_feature (1)..(355): NCBI GI NO: 15238995 NR Description: phosphate translocator-related
  misc_feature (11)..(322): NCBI GI NO: 15221115 NR Description: phosphate translocator-related
  misc_feature (11)..(355): NCBI GI NO: 18401506 NR Description: phosphate translocator-related
  misc_feature (11)..(322): NCBI GI NO: 8778534 NR Description: F21D18.5 [Arabidopsis thaliana]
  misc_feature (12)..(349): NCBI GI NO: 18400381 NR Description: transporter-related [Arabidopsis thaliana]
  misc_feature (12)..(349): NCBI GI NO: 9279588 NR Description: phosphate/phosphoenolpyruvate translocator protein-like

SEQ ID NO: 39444 - DNA, 1070 bp, Zea mays subsp. mays
  misc_feature (1)..(1070): Ceres Seq. ID no. 12364063
gcacgagaccattacctagaacatcctaatcgaaaaactagcagccctcgctcgcattctctcctcccagtcccctagtccttactccttaccatcccatatatccctagctagcgctctcggccgcatcgccggacgtctattaaaccgccgccgctcctcctcggcatgcgcggttctgctcgcctgcgacatggcgcctgcagcttccatcctctcggccaccgccgccgcctccgccaagcgcccggccacttccgacgctgatgagctcccgcacgacgactcctccgcgccccaccagcaggtgcagggcgacgagcccgcgcgcaagggccagcaaccgcggcagcagcagctggagtgcccgcgctgccgctccaccaacaccaagttctgctactacaacaactacagcacggcgcagccgcgccacttctgccgcgcgtgccgccgctactggacgcacgggggcacgctgcgcgacgtccccgtcggcggcgcctcgcgccgcgccgccactggcagcggcggcaagcggcgcagggtctccgccgagccctcatccccgccgccgtcggtcgcggacgcgtgcctgccgtccgccttcccgttcctcagcgacggcagcttcttcccgcagctcgacctcgtcggcggcgttgcgcttgcacccccggccttctcctcctcgtggcagtcggtgctggtcccggacttgtacgacgggctcgcgccgtgggacgacggagcaacggcgggcacgtggggcgacatcggtggcctcgacctcagctggacactgccggggaactgagtgccagccgccgtcgcgcgtcttgaggggctccggttttagcagtgcggcctcgtcaggttcagttcagttcagttcctagcatgcagagctctcacaattctcctatgtcgcctccactgtttcttctcgtccttactgcgaatgaaatggtggggctgctagttagatcagtgcatcttgatctgtagctagagccagagtgtaagatctgtgcagtgatttatcgtgacaataaaattaagtttgtgcc

SEQ ID NO: 39445 - protein, 210 aa, Zea mays subsp. mays
  peptide (1)..(210): Ceres Seq. ID no. 12364064
  misc_feature (1)..(177): Pfam Name: Pfam Description:  Equine herpesvirus glycoprotein gp2
  misc_feature (1)..(202): NCBI GI NO: 11360494 NR Description: antifreeze glycopeptide AFGP polyprotein precursor
  misc_feature (1)..(183): NCBI GI NO: 11360494 NR Description: antifreeze glycopeptide AFGP polyprotein precursor
  misc_feature (1)..(170): NCBI GI NO: 11360494 NR Description: antifreeze glycopeptide AFGP polyprotein precursor
  misc_feature (1)..(210): NCBI GI NO: 13592175 NR Description: ppg3 [Leishmania major]
  misc_feature (1)..(133): NCBI GI NO: 11360494 NR Description: antifreeze glycopeptide AFGP polyprotein precursor
  misc_feature (1)..(210): NCBI GI NO: 13592175 NR Description: ppg3 [Leishmania major]
  misc_feature (1)..(210): NCBI GI NO: 13592175 NR Description: ppg3 [Leishmania major]
  misc_feature (1)..(210): NCBI GI NO: 13592175 NR Description: ppg3 [Leishmania major]
  misc_feature (1)..(205): NCBI GI NO: 11360494 NR Description: antifreeze glycopeptide AFGP polyprotein precursor
  misc_feature (1)..(210): NCBI GI NO: 13592175 NR Description: ppg3 [Leishmania major]
MSSRTTTPPRPTSRCRATSPRARASNRGSSSWSARAAAPPTPSSATTTTTARRSRATSAARAAATGRTGARCATSPSAAPRAAPPLAAAASGAGSPPSPHPRRRRSRTRACRPPSRSSATAASSRSSTSSAALRLHPRPSPPRGSRCWSRTCTTGSRRGTTEQRRARGATSVASTSAGHCRGTECQPPSRVLRGSGFSSAASSGSVQFSS

SEQ ID NO: 39446 - protein, 207 aa, Zea mays subsp. mays
  peptide (1)..(207): Ceres Seq. ID no. 12364065
  misc_feature (52)..(112): Pfam Name: Pfam Description:  Dof domain, zinc finger
  misc_feature (1)..(207): NCBI GI NO: 38344208 NR Description: OSJNBa0064G10.24
  misc_feature (27)..(157): NCBI GI NO: 15229744 NR Description: Dof zinc finger protein; protein id: At3g50410.1
  misc_feature (35)..(166): NCBI GI NO: 15240134 NR Description: Dof zinc finger protein; protein id: At5g66940.1
  misc_feature (52)..(157): NCBI GI NO: 1212759 NR Description: DNA binding protein [Arabidopsis thaliana]
  misc_feature (25)..(167): NCBI GI NO: 3777436 NR Description: DNA binding protein
  misc_feature (25)..(149): NCBI GI NO: 3790264 NR Description: PBF protein [Triticum aestivum]
  misc_feature (48)..(179): NCBI GI NO: 34903500 NR Description: P0001B06.2
  misc_feature (19)..(166): NCBI GI NO: 21538785 NR Description: dof zinc finger protein
  misc_feature (40)..(159): NCBI GI NO: 25352305 NR Description: probable DOF zinc finger protein
  misc_feature (40)..(159): NCBI GI NO: 30684022 NR Description: Dof zinc finger protein [Arabidopsis thaliana]
MAPAASILSATAAASAKRPATSDADELPHDDSSAPHQQVQGDEPARKGQQPRQQQLECPRCRSTNTKFCYYNNYSTAQPRHFCRACRRYWTHGGTLRDVPVGGASRRAATGSGGKRRRVSAEPSSPPPSVADACLPSAFPFLSDGSFFPQLDLVGGVALAPPAFSSSWQSVLVPDLYDGLAPWDDGATAGTWGDIGGLDLSWTLPGN

SEQ ID NO: 39447 - DNA, 2141 bp, Zea mays subsp. mays
  misc_feature (1)..(2141): Ceres Seq. ID no. 12435299
gcacgagaccattacctagaacatcctaatcaaaatcgcctcgccgtcgccgtcgtcatctcagctttaattcgcagcaggcgggcagtggcaggccaggccacggcgtccagcaccagctacgcctgtgcgcgcgcttgtgcagtacctacgttggtgggtgggtaggtagctagtgcggcggagcatcgatcgcgcggtactctcagttccatccgtcgagagatcgaccggtcgtcgatcgacatggcgggccggggaggagcctcggcggcggcgccgttgctggagaagacagcggcggcggcggagtcgggcggcgggtgctgctacgtggacgggtgccccgggtgcgccgtggaccggcacaaggcggcgaacccgggcattccctacggcaacttcatctacgtctggatcgtcaccctctgcacagccttaccgatatcgtcgctcttccccttcttgtatttcatgataagagacctgaatgtcgctaaaagaacagaagacatcgggttctacgctggttttgtaggtgcctcattcatgtttggtagatgcttgacttcaacagtatggggcatagcggcagaccgcgttgggaggaaacctgttgtcgtgttcggcatttcctctgtagttgtgttcaacacattgtttggtctgagtgtcaactactggatggcaatagctacccggtttctgcttggtgccttgaatggtttgcttggaccgataaaggcttatgccattgaagtttgccgacctgaacatgaagccctagcactatcacttgtcagcacagcatggggaataggtctcattattggtcctgctcttggaggctaccttgcactgcctgcagaaaattttccaactgtcttttcacctgactcaatctttggaaggttcccatatttcttaccatgcttatgcacgtcaatcttcgctgcggttgttctcataagctgcatatggatgccggagactttgcacaagcacaaagtccatgaaaatagaagtcggaacattgaagctttggaggcccgtctgattgattcaaatgaaaaggttgaagaaagtggtagtttagatagtaagaagagcctattcaggaattggccattgatgtcatcaataattgtctattgtgtcttctccttccatgacatggcttacacagaggtgttctctctatgggctgaaagcgacaagaagtatggtgggctgagtttatcatctgaggatgttggtcaagtgcttgcagtcacaggtgccagtcttcttgtataccaactctttctataccccagtatcaataaggttcttgggcctatcaaatcttctcgagttgcagctatcctgtgcatacccatcctctttgcctacccctacatgacgtacctgtcggaacctggattatcaatcgttttgaatattgcgtcagtgataaagaataatctcggtgtcaccatcattacaggcactttcatccttcaaaacaatgccgtgcctcaggaccagcgaggcgctgcgaatggactgtccatgactgggatgtcctttttcaaggcacttgctccagcaggagcaggcattgtgttctcatgggcgcagaaacgccagcatgcgtttttcttcccaggtgaccagatggtattcttcctcctgaacgccgtcgagctggtcgggcttctcctcacgttcaagcccttcctggcagtaccagagcagtacgatacgagatagttagacgatctatctatctatacaagttctggaacgttcaagacgattcatcgtgtgcggctgtaccagtgaaggagaagcgccaaagcgtgtgccctttacgccgcggaaggtctacaaacagggacatactcctatataggaagatgcaatgcaagagctgtggtgtacttttaattgtaggtgatgtagtagtgtatggtagtatcagcattttctgcattcatgaaatgcacacgcaggtggtgggaaatgtgggcatggatcgagagtcgctgcgctgttaagtagcaataaatgttaaggttcagtgactcgctgttatttgttgggaatgaaattactgggcatctgtaccctcgttgttttatatctggctgttggattct

SEQ ID NO: 39448 - protein, 501 aa, Zea mays subsp. mays
  peptide (1)..(501): Ceres Seq. ID no. 12435300
  misc_feature (29)..(498): NCBI GI NO: 23452823 NR Description: major facilitator superfamily antiporter
  misc_feature (31)..(497): NCBI GI NO: 30684565 NR Description: transporter-related protein [Arabidopsis thaliana]
  misc_feature (1)..(496): NCBI GI NO: 23452821 NR Description: major facilitator superfamily antiporter
  misc_feature (29)..(492): NCBI GI NO: 22326785 NR Description: transporter-like protein; protein id: At5g13740
  misc_feature (42)..(492): NCBI GI NO: 20260160 NR Description: transporter-like protein [Arabidopsis thaliana]
  misc_feature (42)..(469): NCBI GI NO: 10177340 NR Description: transporter-like protein [Arabidopsis thaliana]
  misc_feature (102)..(498): NCBI GI NO: 23452819 NR Description: major facilitator superfamily antiporter
  misc_feature (31)..(493): NCBI GI NO: 15229781 NR Description: transporter-like protein; protein id: At3g43790.1
  misc_feature (102)..(497): NCBI GI NO: 30684567 NR Description: transporter-related protein [Arabidopsis thaliana]
  misc_feature (102)..(497): NCBI GI NO: 21555230 NR Description: transporter-like protein [Arabidopsis thaliana]
MAGRGGASAAAPLLEKTAAAAESGGGCCYVDGCPGCAVDRHKAANPGIPYGNFIYVWIVTLCTALPISSLFPFLYFMIRDLNVAKRTEDIGFYAGFVGASFMFGRCLTSTVWGIAADRVGRKPVVVFGISSVVVFNTLFGLSVNYWMAIATRFLLGALNGLLGPIKAYAIEVCRPEHEALALSLVSTAWGIGLIIGPALGGYLALPAENFPTVFSPDSIFGRFPYFLPCLCTSIFAAVVLISCIWMPETLHKHKVHENRSRNIEALEARLIDSNEKVEESGSLDSKKSLFRNWPLMSSIIVYCVFSFHDMAYTEVFSLWAESDKKYGGLSLSSEDVGQVLAVTGASLLVYQLFLYPSINKVLGPIKSSRVAAILCIPILFAYPYMTYLSEPGLSIVLNIASVIKNNLGVTIITGTFILQNNAVPQDQRGAANGLSMTGMSFFKALAPAGAGIVFSWAQKRQHAFFFPGDQMVFFLLNAVELVGLLLTFKPFLAVPEQYDTR

SEQ ID NO: 39449 - protein, 425 aa, Zea mays subsp. mays
  peptide (1)..(425): Ceres Seq. ID no. 12435301
  misc_feature (1)..(422): NCBI GI NO: 23452823 NR Description: major facilitator superfamily antiporter
  misc_feature (1)..(421): NCBI GI NO: 30684565 NR Description: transporter-related protein [Arabidopsis thaliana]
  misc_feature (1)..(420): NCBI GI NO: 23452821 NR Description: major facilitator superfamily antiporter
  misc_feature (1)..(416): NCBI GI NO: 22326785 NR Description: transporter-like protein; protein id: At5g13740
  misc_feature (1)..(416): NCBI GI NO: 20260160 NR Description: transporter-like protein [Arabidopsis thaliana]
  misc_feature (1)..(393): NCBI GI NO: 10177340 NR Description: transporter-like protein [Arabidopsis thaliana]
  misc_feature (26)..(422): NCBI GI NO: 23452819 NR Description: major facilitator superfamily antiporter
  misc_feature (1)..(417): NCBI GI NO: 15229781 NR Description: transporter-like protein; protein id: At3g43790.1
  misc_feature (26)..(421): NCBI GI NO: 30684567 NR Description: transporter-related protein [Arabidopsis thaliana]
  misc_feature (26)..(421): NCBI GI NO: 21555230 NR Description: transporter-like protein [Arabidopsis thaliana]
MIRDLNVAKRTEDIGFYAGFVGASFMFGRCLTSTVWGIAADRVGRKPVVVFGISSVVVFNTLFGLSVNYWMAIATRFLLGALNGLLGPIKAYAIEVCRPEHEALALSLVSTAWGIGLIIGPALGGYLALPAENFPTVFSPDSIFGRFPYFLPCLCTSIFAAVVLISCIWMPETLHKHKVHENRSRNIEALEARLIDSNEKVEESGSLDSKKSLFRNWPLMSSIIVYCVFSFHDMAYTEVFSLWAESDKKYGGLSLSSEDVGQVLAVTGASLLVYQLFLYPSINKVLGPIKSSRVAAILCIPILFAYPYMTYLSEPGLSIVLNIASVIKNNLGVTIITGTFILQNNAVPQDQRGAANGLSMTGMSFFKALAPAGAGIVFSWAQKRQHAFFFPGDQMVFFLLNAVELVGLLLTFKPFLAVPEQYDTR

SEQ ID NO: 39450 - protein, 400 aa, Zea mays subsp. mays
  peptide (1)..(400): Ceres Seq. ID no. 12435302
  misc_feature (1)..(397): NCBI GI NO: 23452823 NR Description: major facilitator superfamily antiporter
  misc_feature (1)..(396): NCBI GI NO: 30684565 NR Description: transporter-related protein [Arabidopsis thaliana]
  misc_feature (1)..(395): NCBI GI NO: 23452821 NR Description: major facilitator superfamily antiporter
  misc_feature (1)..(391): NCBI GI NO: 22326785 NR Description: transporter-like protein; protein id: At5g13740
  misc_feature (1)..(391): NCBI GI NO: 20260160 NR Description: transporter-like protein [Arabidopsis thaliana]
  misc_feature (1)..(368): NCBI GI NO: 10177340 NR Description: transporter-like protein [Arabidopsis thaliana]
  misc_feature (1)..(397): NCBI GI NO: 23452819 NR Description: major facilitator superfamily antiporter
  misc_feature (1)..(392): NCBI GI NO: 15229781 NR Description: transporter-like protein; protein id: At3g43790.1
  misc_feature (1)..(396): NCBI GI NO: 30684567 NR Description: transporter-related protein [Arabidopsis thaliana]
  misc_feature (1)..(396): NCBI GI NO: 21555230 NR Description: transporter-like protein [Arabidopsis thaliana]
MFGRCLTSTVWGIAADRVGRKPVVVFGISSVVVFNTLFGLSVNYWMAIATRFLLGALNGLLGPIKAYAIEVCRPEHEALALSLVSTAWGIGLIIGPALGGYLALPAENFPTVFSPDSIFGRFPYFLPCLCTSIFAAVVLISCIWMPETLHKHKVHENRSRNIEALEARLIDSNEKVEESGSLDSKKSLFRNWPLMSSIIVYCVFSFHDMAYTEVFSLWAESDKKYGGLSLSSEDVGQVLAVTGASLLVYQLFLYPSINKVLGPIKSSRVAAILCIPILFAYPYMTYLSEPGLSIVLNIASVIKNNLGVTIITGTFILQNNAVPQDQRGAANGLSMTGMSFFKALAPAGAGIVFSWAQKRQHAFFFPGDQMVFFLLNAVELVGLLLTFKPFLAVPEQYDTR

SEQ ID NO: 39451 - DNA, 789 bp, Zea mays subsp. mays; identical to SEQ ID NO: 23396
  misc_feature (1)..(789): Ceres Seq. ID no. 12355957

SEQ ID NO: 39452 - protein, 161 aa, Zea mays subsp. mays; identical to SEQ ID NO: 23397
  peptide (1)..(161): Ceres Seq. ID no. 12355958
  misc_feature (3)..(73): Pfam Name: Pfam Description:  Ribosomal protein L24e
  misc_feature (1)..(161): NCBI GI NO: 1710521 NR Description: 60S RIBOSOMAL PROTEIN L24
  misc_feature (4)..(161): NCBI GI NO: 34900364 NR Description: putative 60S ribosomal protein L24
  misc_feature (1)..(160): NCBI GI NO: 6094040 NR Description: 60S ribosomal protein L24
  misc_feature (1)..(156): NCBI GI NO: 10180025 NR Description: 60S ribosomal protein L24 [Prunus avium]
  misc_feature (1)..(161): NCBI GI NO: 18404176 NR Description: 60S ribosomal protein L24; protein id: At2g36620
  misc_feature (1)..(161): NCBI GI NO: 15231730 NR Description: 60S ribosomal protein - like; protein id:At3g53020
  misc_feature (5)..(161): NCBI GI NO: 25295112 NR Description: 60S ribosomal protein L24
  misc_feature (3)..(150): NCBI GI NO: 19075214 NR Description: 60s ribosomal protein L24
  misc_feature (3)..(150): NCBI GI NO: 19115030 NR Description: 60S ribosomal protein L24
  misc_feature (10)..(154): NCBI GI NO: 40741063 NR Description: conserved hypothetical protein

SEQ ID NO: 39453 - protein, 106 aa, Zea mays subsp. mays; identical to SEQ ID NO: 23398
  peptide (1)..(106): Ceres Seq. ID no. 12355959
  misc_feature (1)..(106): NCBI GI NO: 1710521 NR Description: 60S RIBOSOMAL PROTEIN L24
  misc_feature (1)..(106): NCBI GI NO: 34900364 NR Description: putative 60S ribosomal protein L24
  misc_feature (1)..(105): NCBI GI NO: 6094040 NR Description: 60S ribosomal protein L24
  misc_feature (1)..(101): NCBI GI NO: 10180025 NR Description: 60S ribosomal protein L24 [Prunus avium]
  misc_feature (1)..(106): NCBI GI NO: 18404176 NR Description: 60S ribosomal protein L24; protein id: At2g36620
  misc_feature (1)..(106): NCBI GI NO: 15231730 NR Description: 60S ribosomal protein - like; protein id:At3g53020
  misc_feature (1)..(106): NCBI GI NO: 25295112 NR Description: 60S ribosomal protein L24
  misc_feature (1)..(95): NCBI GI NO: 19075214 NR Description: 60s ribosomal protein L24
  misc_feature (1)..(95): NCBI GI NO: 19115030 NR Description: 60S ribosomal protein L24
  misc_feature (1)..(99): NCBI GI NO: 40741063 NR Description: conserved hypothetical protein

SEQ ID NO: 39454 - DNA, 2101 bp, Zea mays subsp. mays
  misc_feature (1)..(2101): Ceres Seq. ID no. 12435356
acaaccacccccgccgcaatggacaagattgagacgacgacgaggaggaggaggaaagggagaagcagcagcagccgccgccgccagggggcacggggaccggcgggcctcgtagccacggccttggccctcctctgcgcctgcgccttctccacgcctgccgccacggctctcaccccggacggcgaggcgttgctggagctcaagctggccttcaacgccaccgtgcatcatcggctcaccagctggcggcgcagcgaccccaacccctgtgtctgggagggcatctcctgctccgtccccgacctcagggtacaatccataaatctcccatacatgcagcttgggggcatcatttcgcccagcatcgggaggctggacaagctgcagagactagctctgcaccagaacagcttgcacggcccaatccccgcagagatcaagaactgcaccgagctcagggcaatttacctgagagccaactacctgcaaggaggtatcccttcggagattggcgagctcgtgcacctcaccatcttggacctgtcaagcaatctgttgaggggaacgataccggcctccatcggaagcctcactcaccttcgcttcctgaacctgtctactaatttcttctccggagagatcccaaatgtcggtgtcctcggagccttcaaaagcagctcgttcgttggaaatctggagctctgtggcctgtccatccagaaagcttgccgtggaaccctcggctttcctgccgtgctgccccactccgatccgctctcttcagctggcggtgtctctccaatcagtaacaacaagaagaagacatcgcgctttctgaatggcgtcgtgatcggctcgatgtcaaccttggctcttgccctgatcgctgtgctcggattcctgtggatctgcttgctgtccaggaagaagagcgtcggtggaaactacgtaaagatggacaagaaaactgttcctgacggcgcgaagcttgtgacgtaccagtggaaccttccgtactcgtcgagtgagatcattagaaggctggagctgcttgacgaagaggatgtggttggctgcgggggcttcggcacggtgtacagaatggtgatggacgatggcacgtcgttcgccgtcaagaggattgatctcagccgccaaagccgcgacaggaccatggagaaggagctcgagttcctgggcagcatcaggcacataaatcttgtcactttgcgaggctactgccggctgctccctgcagcaaagctactcgtatacgatttcgttgagctgggcagcttggactgctaccttcatggagatggacaagaggaccagccgttgaactggaacgcgcgtatgaagatcgcccttggctcggctcgaggcctggcatatctgcaccatgattgctcgcctgggatcgtgcacagggacatcaaggccagcaatatcctgctggacagaagcttggagcctcgtgtctctgattttggacttgcaaagctgcttgtagacaatgccgccgcccatgttaccactgttgtggcgggcacctttggatacctagcaccagagtacttgcaaaacgggcatgctactgagaaatcagacgtgtatagctttggagtgcttttgctggagctagtgacgggaaagaggccaaccgattcatgcttcatcaagaagggactgaacattgttggctggctgaacaccctgacgggggagcaccggctggaggatatcgttgacgagcgatgcggcgacgtcgaggtggaagccgtggaagccatcctggacatcgcagcgatgtgcaccgacgcagacccggcgcagcggccgtccatgagcgctgtcctcaagatgctggaggaagagatcctgtccccctgcatgagcgagctgtgctacgagcagcacctggagctctgagccgaggaagcctgacctgactacgatgcagtgcatgatggatgagactgtgtaggaaacaaaagttttgtagatatgacgatgatgaaccgcgtacgtagtgtaggtgtttgtgagcagctcaaaagtaggacaagtgcagaaccaacaacctgatcggcacgtt

SEQ ID NO: 39455 - protein, 644 aa, Zea mays subsp. mays
  peptide (1)..(644): Ceres Seq. ID no. 12435357
  misc_feature (38)..(631): NCBI GI NO: 30697726 NR Description: leucine rich repeat protein family
  misc_feature (62)..(631): NCBI GI NO: 10177448 NR Description: receptor-like protein kinase
  misc_feature (132)..(635): NCBI GI NO: 25403114 NR Description: probable protein kinase
  misc_feature (132)..(635): NCBI GI NO: 30692520 NR Description: leucine-rich repeat transmembrane protein kinase
  misc_feature (132)..(635): NCBI GI NO: 15227455 NR Description: putative receptor-like protein kinase
  misc_feature (344)..(626): NCBI GI NO: 23304947 NR Description: extra sporogenous cells [Arabidopsis thaliana]
  misc_feature (40)..(231): NCBI GI NO: 23304947 NR Description: extra sporogenous cells [Arabidopsis thaliana]
  misc_feature (344)..(626): NCBI GI NO: 15240747 NR Description: receptor-like protein kinase-like protein
  misc_feature (40)..(242): NCBI GI NO: 15240747 NR Description: receptor-like protein kinase-like protein
  misc_feature (340)..(630): NCBI GI NO: 15219817 NR Description: receptor-like kinase, putative
TTTPAAMDKIETTTRRRRKGRSSSSRRRQGARGPAGLVATALALLCACAFSTPAATALTPDGEALLELKLAFNATVHHRLTSWRRSDPNPCVWEGISCSVPDLRVQSINLPYMQLGGIISPSIGRLDKLQRLALHQNSLHGPIPAEIKNCTELRAIYLRANYLQGGIPSEIGELVHLTILDLSSNLLRGTIPASIGSLTHLRFLNLSTNFFSGEIPNVGVLGAFKSSSFVGNLELCGLSIQKACRGTLGFPAVLPHSDPLSSAGGVSPISNNKKKTSRFLNGVVIGSMSTLALALIAVLGFLWICLLSRKKSVGGNYVKMDKKTVPDGAKLVTYQWNLPYSSSEIIRRLELLDEEDVVGCGGFGTVYRMVMDDGTSFAVKRIDLSRQSRDRTMEKELEFLGSIRHINLVTLRGYCRLLPAAKLLVYDFVELGSLDCYLHGDGQEDQPLNWNARMKIALGSARGLAYLHHDCSPGIVHRDIKASNILLDRSLEPRVSDFGLAKLLVDNAAAHVTTVVAGTFGYLAPEYLQNGHATEKSDVYSFGVLLLELVTGKRPTDSCFIKKGLNIVGWLNTLTGEHRLEDIVDERCGDVEVEAVEAILDIAAMCTDADPAQRPSMSAVLKMLEEEILSPCMSELCYEQHLEL

SEQ ID NO: 39456 - protein, 638 aa, Zea mays subsp. mays
  peptide (1)..(638): Ceres Seq. ID no. 12435358
  misc_feature (32)..(625): NCBI GI NO: 30697726 NR Description: leucine rich repeat protein family
  misc_feature (56)..(625): NCBI GI NO: 10177448 NR Description: receptor-like protein kinase
  misc_feature (126)..(629): NCBI GI NO: 25403114 NR Description: probable protein kinase
  misc_feature (126)..(629): NCBI GI NO: 30692520 NR Description: leucine-rich repeat transmembrane protein kinase
  misc_feature (126)..(629): NCBI GI NO: 15227455 NR Description: putative receptor-like protein kinase
  misc_feature (338)..(620): NCBI GI NO: 23304947 NR Description: extra sporogenous cells [Arabidopsis thaliana]
  misc_feature (34)..(225): NCBI GI NO: 23304947 NR Description: extra sporogenous cells [Arabidopsis thaliana]
  misc_feature (338)..(620): NCBI GI NO: 15240747 NR Description: receptor-like protein kinase-like protein
  misc_feature (34)..(236): NCBI GI NO: 15240747 NR Description: receptor-like protein kinase-like protein
  misc_feature (334)..(624): NCBI GI NO: 15219817 NR Description: receptor-like kinase, putative
MDKIETTTRRRRKGRSSSSRRRQGARGPAGLVATALALLCACAFSTPAATALTPDGEALLELKLAFNATVHHRLTSWRRSDPNPCVWEGISCSVPDLRVQSINLPYMQLGGIISPSIGRLDKLQRLALHQNSLHGPIPAEIKNCTELRAIYLRANYLQGGIPSEIGELVHLTILDLSSNLLRGTIPASIGSLTHLRFLNLSTNFFSGEIPNVGVLGAFKSSSFVGNLELCGLSIQKACRGTLGFPAVLPHSDPLSSAGGVSPISNNKKKTSRFLNGVVIGSMSTLALALIAVLGFLWICLLSRKKSVGGNYVKMDKKTVPDGAKLVTYQWNLPYSSSEIIRRLELLDEEDVVGCGGFGTVYRMVMDDGTSFAVKRIDLSRQSRDRTMEKELEFLGSIRHINLVTLRGYCRLLPAAKLLVYDFVELGSLDCYLHGDGQEDQPLNWNARMKIALGSARGLAYLHHDCSPGIVHRDIKASNILLDRSLEPRVSDFGLAKLLVDNAAAHVTTVVAGTFGYLAPEYLQNGHATEKSDVYSFGVLLLELVTGKRPTDSCFIKKGLNIVGWLNTLTGEHRLEDIVDERCGDVEVEAVEAILDIAAMCTDADPAQRPSMSAVLKMLEEEILSPCMSELCYEQHLEL

SEQ ID NO: 39457 - protein, 532 aa, Zea mays subsp. mays
  peptide (1)..(532): Ceres Seq. ID no. 12435359
  misc_feature (1)..(519): NCBI GI NO: 30697726 NR Description: leucine rich repeat protein family
  misc_feature (1)..(519): NCBI GI NO: 10177448 NR Description: receptor-like protein kinase
  misc_feature (20)..(523): NCBI GI NO: 25403114 NR Description: probable protein kinase
  misc_feature (20)..(523): NCBI GI NO: 30692520 NR Description: leucine-rich repeat transmembrane protein kinase
  misc_feature (20)..(523): NCBI GI NO: 15227455 NR Description: putative receptor-like protein kinase
  misc_feature (232)..(514): NCBI GI NO: 23304947 NR Description: extra sporogenous cells [Arabidopsis thaliana]
  misc_feature (1)..(119): NCBI GI NO: 23304947 NR Description: extra sporogenous cells [Arabidopsis thaliana]
  misc_feature (232)..(514): NCBI GI NO: 15240747 NR Description: receptor-like protein kinase-like protein
  misc_feature (1)..(130): NCBI GI NO: 15240747 NR Description: receptor-like protein kinase-like protein
  misc_feature (228)..(518): NCBI GI NO: 15219817 NR Description: receptor-like kinase, putative
MQLGGIISPSIGRLDKLQRLALHQNSLHGPIPAEIKNCTELRAIYLRANYLQGGIPSEIGELVHLTILDLSSNLLRGTIPASIGSLTHLRFLNLSTNFFSGEIPNVGVLGAFKSSSFVGNLELCGLSIQKACRGTLGFPAVLPHSDPLSSAGGVSPISNNKKKTSRFLNGVVIGSMSTLALALIAVLGFLWICLLSRKKSVGGNYVKMDKKTVPDGAKLVTYQWNLPYSSSEIIRRLELLDEEDVVGCGGFGTVYRMVMDDGTSFAVKRIDLSRQSRDRTMEKELEFLGSIRHINLVTLRGYCRLLPAAKLLVYDFVELGSLDCYLHGDGQEDQPLNWNARMKIALGSARGLAYLHHDCSPGIVHRDIKASNILLDRSLEPRVSDFGLAKLLVDNAAAHVTTVVAGTFGYLAPEYLQNGHATEKSDVYSFGVLLLELVTGKRPTDSCFIKKGLNIVGWLNTLTGEHRLEDIVDERCGDVEVEAVEAILDIAAMCTDADPAQRPSMSAVLKMLEEEILSPCMSELCYEQHLEL

SEQ ID NO: 39458 - DNA, 1062 bp, Zea mays subsp. mays
  misc_feature (1)..(1062): Ceres Seq. ID no. 12364415
aacttgccgaccgcaggaatccagccgacccagcacttcccccggttcctcccagcagagtcttctctgcatccgttccgttccacggcctctcgcacatccaccgccaccgagccgcgtgcgtcttccatgaaggacccgttcgaggcggacgtcgaggagcaggactcgccgccggagtcgccggcgccgcccgaggatgaacccggcgccgcgggccccgcggaggaccccgaggactacgacggcggcccgcccccgcgccagccgtcggccccggcgtcgcacgcagtcacagccggtgccaaggccaaggcccgtatccatagggagcagcaggaggatgacgacgaggacgaggaccagattgaggtcgacctcgagaagcttcccagcagcactggcgacccagacaagctcgctaagatgaatgctatactgtcccaatttacacaacagcagatgaaccgttatgagtcattccgaagatctggatttcagaaatctaacatgaaaaggctgttggcaagcatcactggaagtcagaagatttctatccctacttcaattgtggtatcgggaatcgccaaaatatttgttggtgagctaattgaaacagcaagagtggtcatgagcgagaggaaggattcaggacccattaggccttgccacatcagggaggcatacagaagattgaagcttgaagggaagatcccacggcgatctgttcctaggctcttccgctagaattgaagcatgtatattacacatgtgtctggagtcctgacagatgtgtgccatgaggtgaggagtttctagtaccagcttgttgcagtttctggacagaaacctgaccagactctcacagcttctgttgagaaatcctgtcaaatgtcatatcatctttaagatggaattagaaagagttaaaacgtccctaccacggggcctaaaatcgcctggggttgttatttgtactgagggctactttgaaaacctcaaatccccttcgggattggaggggattgaggtggaaatgaactaattttctcttgagtttcc

SEQ ID NO: 39459 - protein, 248 aa, Zea mays subsp. mays
  peptide (1)..(248): Ceres Seq. ID no. 12364416
  misc_feature (143)..(232): Pfam Name: Pfam Description:  hTAFII28-like protein conserved region
  misc_feature (27)..(219): NCBI GI NO: 34911174 NR Description: B1144G04.34
  misc_feature (45)..(248): NCBI GI NO: 15235369 NR Description: putative protein; protein id: At4g20280
  misc_feature (45)..(248): NCBI GI NO: 7447999 NR Description: hypothetical protein F1C12
  misc_feature (118)..(248): NCBI GI NO: 15223727 NR Description: hypothetical protein; protein id: At1g20000.1
  misc_feature (118)..(248): NCBI GI NO: 25316525 NR Description: T20H2.22 protein - Arabidopsis thaliana
  misc_feature (54)..(239): NCBI GI NO: 5032151 NR Description: TBP-associated factor 11
  misc_feature (49)..(239): NCBI GI NO: 30794436 NR Description: TAF11 RNA polymerase II, TATA box binding protein
  misc_feature (44)..(239): NCBI GI NO: 27674899 NR Description: similar to Transcription initiation factor TFIID 28kDa subunit
  misc_feature (49)..(239): NCBI GI NO: 27704824 NR Description: similar to Transcription initiation factor TFIID 28kDa subunit
  misc_feature (138)..(239): NCBI GI NO: 12835252 NR Description: unnamed protein product [Mus musculus]
NLPTAGIQPTQHFPRFLPAESSLHPFRSTASRTSTATEPRASSMKDPFEADVEEQDSPPESPAPPEDEPGAAGPAEDPEDYDGGPPPRQPSAPASHAVTAGAKAKARIHREQQEDDDEDEDQIEVDLEKLPSSTGDPDKLAKMNAILSQFTQQQMNRYESFRRSGFQKSNMKRLLASITGSQKISIPTSIVVSGIAKIFVGELIETARVVMSERKDSGPIRPCHIREAYRRLKLEGKIPRRSVPRLFR

SEQ ID NO: 39460 - protein, 205 aa, Zea mays subsp. mays
  peptide (1)..(205): Ceres Seq. ID no. 12364417
  misc_feature (100)..(189): Pfam Name: Pfam Description:  hTAFII28-like protein conserved region
  misc_feature (1)..(176): NCBI GI NO: 34911174 NR Description: B1144G04.34
  misc_feature (2)..(205): NCBI GI NO: 15235369 NR Description: putative protein; protein id: At4g20280
  misc_feature (2)..(205): NCBI GI NO: 7447999 NR Description: hypothetical protein F1C12
  misc_feature (75)..(205): NCBI GI NO: 15223727 NR Description: hypothetical protein; protein id: At1g20000.1
  misc_feature (75)..(205): NCBI GI NO: 25316525 NR Description: T20H2.22 protein - Arabidopsis thaliana
  misc_feature (11)..(196): NCBI GI NO: 5032151 NR Description: TBP-associated factor 11
  misc_feature (6)..(196): NCBI GI NO: 30794436 NR Description: TAF11 RNA polymerase II, TATA box binding protein
  misc_feature (1)..(196): NCBI GI NO: 27674899 NR Description: similar to Transcription initiation factor TFIID 28kDa subunit
  misc_feature (6)..(196): NCBI GI NO: 27704824 NR Description: similar to Transcription initiation factor TFIID 28kDa subunit
  misc_feature (95)..(196): NCBI GI NO: 12835252 NR Description: unnamed protein product [Mus musculus]
MKDPFEADVEEQDSPPESPAPPEDEPGAAGPAEDPEDYDGGPPPRQPSAPASHAVTAGAKAKARIHREQQEDDDEDEDQIEVDLEKLPSSTGDPDKLAKMNAILSQFTQQQMNRYESFRRSGFQKSNMKRLLASITGSQKISIPTSIVVSGIAKIFVGELIETARVVMSERKDSGPIRPCHIREAYRRLKLEGKIPRRSVPRLFR

SEQ ID NO: 39461 - DNA, 1063 bp, Zea mays subsp. mays
  misc_feature (1)..(1063): Ceres Seq. ID no. 12417560
aggaaggtaggaggagaaccgtcagcagagagacatggcgccccaccaccagcagcgggcgctgctcctgttcccactcgtcttcctcctcctcctccttgccccgcccctcgccggcgcgtggggaaaggagggccacatcatggtctgcaagatcgccgagaagtacctgtcggagaaggcggcggcggcggtgcaggcgctgctgccggagtcggcgggcggggagctgtcgacggtgtgcccgtgggcgtaccaggtgcgctggcactaccactgggccagcccgctccactacgccaacaccccccaagtctgcaacttcaagtattctcgggactgccacaattctcggggccagcaagggatgtgcgtcgtcggggctatcaacaactacacggaccagctctacagctacggccagaagacttcgtataacctgacggaaagcctgatgttcctggcacacttcgtcggcgacgtccaccagccgctgcacgtaggcttcgaagatgacgagggcggtaacaccatcaccgtccactggtaccggaggaaagcaaacctccatcacgtgtgggatgtcagcattattgatacggcaatcaaggacttctacaacaagagcatggataccatggtagaggctctcaagatgaatcttacagatggatggtctgacgacatcgtccactgggaaaattgcaagaacaaacacgcgacctgcgcgaacgactatgcgattgagagcatccattattcctgcaactacgcctacaaagatgtggagcaagacatcactctaggagatgattattttttcagtaggtacccgattgtggagaagaggttagcgcaggctggaatcagattggcgttggtacttaatcggatatttggtggaggtgaagcggatgatataccactaaaagtacagtaacagctgtaataaaaggaagcatagctattacaaggatttgtccattacgtcgtctatacatcaataaattggcatgaatttgtaactccattgctatacatcaataaattggcatgaatttgt

SEQ ID NO: 39462 - protein, 301 aa, Zea mays subsp. mays
  peptide (1)..(301): Ceres Seq. ID no. 12417561
  misc_feature (2)..(301): NCBI GI NO: 9558456 NR Description: unnamed protein product
  misc_feature (2)..(301): NCBI GI NO: 34895514 NR Description: putative bifunctional nuclease
  misc_feature (11)..(292): NCBI GI NO: 38345900 NR Description: OSJNBa0060D06.10
  misc_feature (19)..(288): NCBI GI NO: 22328857 NR Description: expressed protein; protein id: At4g21585.1
  misc_feature (10)..(290): NCBI GI NO: 13274190 NR Description: putative nuclease [Hordeum vulgare subsp. vulgare]
  misc_feature (7)..(289): NCBI GI NO: 15221343 NR Description: putative bifunctional nuclease
  misc_feature (10)..(290): NCBI GI NO: 5672692 NR Description: nuclease I [Hordeum vulgare]
  misc_feature (16)..(288): NCBI GI NO: 4099835 NR Description: bifunctional nuclease [Zinnia elegans]
  misc_feature (7)..(289): NCBI GI NO: 21554516 NR Description: putative bifunctional nuclease
  misc_feature (10)..(290): NCBI GI NO: 7489371 NR Description: endonuclease (EC 3.1.30.-) precursor - barley
MAPHHQQRALLLFPLVFLLLLLAPPLAGAWGKEGHIMVCKIAEKYLSEKAAAAVQALLPESAGGELSTVCPWAYQVRWHYHWASPLHYANTPQVCNFKYSRDCHNSRGQQGMCVVGAINNYTDQLYSYGQKTSYNLTESLMFLAHFVGDVHQPLHVGFEDDEGGNTITVHWYRRKANLHHVWDVSIIDTAIKDFYNKSMDTMVEALKMNLTDGWSDDIVHWENCKNKHATCANDYAIESIHYSCNYAYKDVEQDITLGDDYFFSRYPIVEKRLAQAGIRLALVLNRIFGGGEADDIPLKVQ

SEQ ID NO: 39463 - protein, 265 aa, Zea mays subsp. mays
  peptide (1)..(265): Ceres Seq. ID no. 12417562
  misc_feature (1)..(265): NCBI GI NO: 9558456 NR Description: unnamed protein product
  misc_feature (1)..(265): NCBI GI NO: 34895514 NR Description: putative bifunctional nuclease
  misc_feature (1)..(256): NCBI GI NO: 38345900 NR Description: OSJNBa0060D06.10
  misc_feature (1)..(252): NCBI GI NO: 22328857 NR Description: expressed protein; protein id: At4g21585.1
  misc_feature (1)..(254): NCBI GI NO: 13274190 NR Description: putative nuclease [Hordeum vulgare subsp. vulgare]
  misc_feature (1)..(253): NCBI GI NO: 15221343 NR Description: putative bifunctional nuclease
  misc_feature (1)..(254): NCBI GI NO: 5672692 NR Description: nuclease I [Hordeum vulgare]
  misc_feature (1)..(252): NCBI GI NO: 4099835 NR Description: bifunctional nuclease [Zinnia elegans]
  misc_feature (1)..(253): NCBI GI NO: 21554516 NR Description: putative bifunctional nuclease
  misc_feature (1)..(254): NCBI GI NO: 7489371 NR Description: endonuclease (EC 3.1.30.-) precursor - barley
MVCKIAEKYLSEKAAAAVQALLPESAGGELSTVCPWAYQVRWHYHWASPLHYANTPQVCNFKYSRDCHNSRGQQGMCVVGAINNYTDQLYSYGQKTSYNLTESLMFLAHFVGDVHQPLHVGFEDDEGGNTITVHWYRRKANLHHVWDVSIIDTAIKDFYNKSMDTMVEALKMNLTDGWSDDIVHWENCKNKHATCANDYAIESIHYSCNYAYKDVEQDITLGDDYFFSRYPIVEKRLAQAGIRLALVLNRIFGGGEADDIPLKVQ

SEQ ID NO: 39464 - protein, 190 aa, Zea mays subsp. mays
  peptide (1)..(190): Ceres Seq. ID no. 12417563
  misc_feature (1)..(190): NCBI GI NO: 9558456 NR Description: unnamed protein product
  misc_feature (1)..(190): NCBI GI NO: 34895514 NR Description: putative bifunctional nuclease
  misc_feature (1)..(181): NCBI GI NO: 38345900 NR Description: OSJNBa0060D06.10
  misc_feature (1)..(177): NCBI GI NO: 22328857 NR Description: expressed protein; protein id: At4g21585.1
  misc_feature (1)..(179): NCBI GI NO: 13274190 NR Description: putative nuclease [Hordeum vulgare subsp. vulgare]
  misc_feature (1)..(178): NCBI GI NO: 15221343 NR Description: putative bifunctional nuclease
  misc_feature (1)..(179): NCBI GI NO: 5672692 NR Description: nuclease I [Hordeum vulgare]
  misc_feature (1)..(177): NCBI GI NO: 4099835 NR Description: bifunctional nuclease [Zinnia elegans]
  misc_feature (1)..(178): NCBI GI NO: 21554516 NR Description: putative bifunctional nuclease
  misc_feature (1)..(179): NCBI GI NO: 7489371 NR Description: endonuclease (EC 3.1.30.-) precursor - barley
MCVVGAINNYTDQLYSYGQKTSYNLTESLMFLAHFVGDVHQPLHVGFEDDEGGNTITVHWYRRKANLHHVWDVSIIDTAIKDFYNKSMDTMVEALKMNLTDGWSDDIVHWENCKNKHATCANDYAIESIHYSCNYAYKDVEQDITLGDDYFFSRYPIVEKRLAQAGIRLALVLNRIFGGGEADDIPLKVQ

SEQ ID NO: 39465 - DNA, 2214 bp, Zea mays subsp. mays
  misc_feature (1)..(2214): Ceres Seq. ID no. 13494953
agaccattacctagaagatcctaatcgaaaaaaacgatccatcctcaccaccattcgactccacagctggaggctgaagctccgcagtcacagcattcaaatcaatctctctctttctctctctctctctcacaggagataagccatggcagagttgcctttggcagcggggctgatggaccttcgcaactgcaagctctctccgaagccagcgccgcccttgccactccccgcgctccgccgcatgcacacaagcgccacggctacgacggccccgtccccgcgccatgcggtccccgaactccactccactaccgagctggcggacgggagcatcgtcttccgtttcggccatcctaagtccaaggcgctggagccggagccggcgagcgtaaagaccagcccttactccagagttgcccctgcctcgggcgctgtgcccggcagccagatggagccggagattgactctgaacatggattagacggcgtgcgaataggcaccacggctggggttgagaagccgagcccgaatgccgcagccgaggcctggccgacacctccacctcctgacgccggcgcggtaaccggtgccacttccgctgcgctagaggaggcgccggagcaggaggcgggttccaatgctgccgttgaggaggtggacaccaggccatcatccgcagagtctcttgtcccgtcgagatcagaggatgggccaaagggcgacggcgtcgctgttgaggctggcatgccgaccagtggtgctgccatggatacgattgagactgctttggaggggcgcggggcaagcgaggatgactcagcagttgatgtgagtggtggcttggatgaggcggcgacttccggtttggaggactccgaagccgcatcggaaggctccactgcacaggatttctacaccgacgttgaaacggagtccagcggctccagcagcgacgagcagagagctgagttcggcttttccttaccaccaccggaacaagttagcaacaaggcggattggaaaaatgacacttcagaggtgaagagttctgataggatgattccaatagctcaacggacacgtgtgttatcgtcaggtgctgcaatattgcctcatccgtcaaaggtagcaacaggtggagaagatgcatatttcattgcagccaatggctggtttggtgtagcagatggagttggccagtggtcatttgaaggaatcaacgcagggctttatgcaagagaactaatggatggctgcaaaaagttcgttaccgagaatcaaggggatccagatcttagaccagagcagatcctttccaaagcagtagatgaagcatgttcacctggttcttgcactgtattagttgctcattttgatggccaggcccttcaagcatcaaatattggggactctgggtttatagtgataagaaatggagaagtgttcaaaaagtctaaacctacgctttatggtttcaatttcccactacaaattcagaagggagatgacccctcaaagtttgtacagaattatgctattgatctagaggacggcgatgcaattgtgacagcaaccgatggcctttttgataatgtatacgagcatgaaatagctggaattgtctccaaatcgttacaggcagatctagaaccagcggagattgcggaacacttggctgtgaaggcccaggaagtagggaggtctggggctgggagaagcccattttcagatgctgctctctcggctgggtaccttggctacagtgggggcaaactggatgacatagccgtcgttgtatcaattgtccggactgaaattcaagaggataggctaagatgactatgcagaaaagaagctcatgttttgtggaagctcaacaccaagcgaccacgcgggttgccctatcagtattctgtactgctagaactgcagctatgtggcgatttctggaaagttaagggcgtatgcatcagcatcatacaccgtgctcgatcatcaataggcgggccaataaccattggacatcagcattgtagcgaagccccttcctgttgcccttgccagtgcaccggcgccacattttgatttttggtttcgctataaaaatataaggcatttagatgttgcccttgccattaaaccaatgtcatgtactccttctgtcataaattaaaattcgttttggtttctaatggattcatataatactt

SEQ ID NO: 39466 - protein, 565 aa, Zea mays subsp. mays
  peptide (1)..(565): Ceres Seq. ID no. 13494954
  misc_feature (328)..(524): Pfam Name: Pfam Description:  Protein phosphatase 2C
  misc_feature (328)..(559): NCBI GI NO: 37533570 NR Description: putative protein phosphatase 2C
  misc_feature (137)..(344): NCBI GI NO: 37533570 NR Description: putative protein phosphatase 2C
  misc_feature (1)..(184): NCBI GI NO: 37533570 NR Description: putative protein phosphatase 2C
  misc_feature (162)..(556): NCBI GI NO: 18418226 NR Description: protein phosphatase 2C (PP2C) -related
  misc_feature (148)..(556): NCBI GI NO: 7485658 NR Description: hypothetical protein F17M5
  misc_feature (316)..(555): NCBI GI NO: 15240071 NR Description: expressed protein [Arabidopsis thaliana]
  misc_feature (271)..(563): NCBI GI NO: 25366932 NR Description: hypothetical protein dl4315c
  misc_feature (302)..(563): NCBI GI NO: 30683717 NR Description: expressed protein [Arabidopsis thaliana]
  misc_feature (305)..(562): NCBI GI NO: 34896100 NR Description: B1189A09.35
  misc_feature (316)..(555): NCBI GI NO: 18402284 NR Description: expressed protein [Arabidopsis thaliana]
MAELPLAAGLMDLRNCKLSPKPAPPLPLPALRRMHTSATATTAPSPRHAVPELHSTTELADGSIVFRFGHPKSKALEPEPASVKTSPYSRVAPASGAVPGSQMEPEIDSEHGLDGVRIGTTAGVEKPSPNAAAEAWPTPPPPDAGAVTGATSAALEEAPEQEAGSNAAVEEVDTRPSSAESLVPSRSEDGPKGDGVAVEAGMPTSGAAMDTIETALEGRGASEDDSAVDVSGGLDEAATSGLEDSEAASEGSTAQDFYTDVETESSGSSSDEQRAEFGFSLPPPEQVSNKADWKNDTSEVKSSDRMIPIAQRTRVLSSGAAILPHPSKVATGGEDAYFIAANGWFGVADGVGQWSFEGINAGLYARELMDGCKKFVTENQGDPDLRPEQILSKAVDEACSPGSCTVLVAHFDGQALQASNIGDSGFIVIRNGEVFKKSKPTLYGFNFPLQIQKGDDPSKFVQNYAIDLEDGDAIVTATDGLFDNVYEHEIAGIVSKSLQADLEPAEIAEHLAVKAQEVGRSGAGRSPFSDAALSAGYLGYSGGKLDDIAVVVSIVRTEIQEDRLR

SEQ ID NO: 39467 - protein, 555 aa, Zea mays subsp. mays
  peptide (1)..(555): Ceres Seq. ID no. 13494955
  misc_feature (318)..(514): Pfam Name: Pfam Description:  Protein phosphatase 2C
  misc_feature (318)..(549): NCBI GI NO: 37533570 NR Description: putative protein phosphatase 2C
  misc_feature (127)..(334): NCBI GI NO: 37533570 NR Description: putative protein phosphatase 2C
  misc_feature (1)..(174): NCBI GI NO: 37533570 NR Description: putative protein phosphatase 2C
  misc_feature (152)..(546): NCBI GI NO: 18418226 NR Description: protein phosphatase 2C (PP2C) -related
  misc_feature (138)..(546): NCBI GI NO: 7485658 NR Description: hypothetical protein F17M5
  misc_feature (306)..(545): NCBI GI NO: 15240071 NR Description: expressed protein [Arabidopsis thaliana]
  misc_feature (261)..(553): NCBI GI NO: 25366932 NR Description: hypothetical protein dl4315c
  misc_feature (292)..(553): NCBI GI NO: 30683717 NR Description: expressed protein [Arabidopsis thaliana]
  misc_feature (295)..(552): NCBI GI NO: 34896100 NR Description: B1189A09.35
  misc_feature (306)..(545): NCBI GI NO: 18402284 NR Description: expressed protein [Arabidopsis thaliana]
MDLRNCKLSPKPAPPLPLPALRRMHTSATATTAPSPRHAVPELHSTTELADGSIVFRFGHPKSKALEPEPASVKTSPYSRVAPASGAVPGSQMEPEIDSEHGLDGVRIGTTAGVEKPSPNAAAEAWPTPPPPDAGAVTGATSAALEEAPEQEAGSNAAVEEVDTRPSSAESLVPSRSEDGPKGDGVAVEAGMPTSGAAMDTIETALEGRGASEDDSAVDVSGGLDEAATSGLEDSEAASEGSTAQDFYTDVETESSGSSSDEQRAEFGFSLPPPEQVSNKADWKNDTSEVKSSDRMIPIAQRTRVLSSGAAILPHPSKVATGGEDAYFIAANGWFGVADGVGQWSFEGINAGLYARELMDGCKKFVTENQGDPDLRPEQILSKAVDEACSPGSCTVLVAHFDGQALQASNIGDSGFIVIRNGEVFKKSKPTLYGFNFPLQIQKGDDPSKFVQNYAIDLEDGDAIVTATDGLFDNVYEHEIAGIVSKSLQADLEPAEIAEHLAVKAQEVGRSGAGRSPFSDAALSAGYLGYSGGKLDDIAVVVSIVRTEIQEDRLR

SEQ ID NO: 39468 - protein, 532 aa, Zea mays subsp. mays
  peptide (1)..(532): Ceres Seq. ID no. 13494956
  misc_feature (295)..(491): Pfam Name: Pfam Description:  Protein phosphatase 2C
  misc_feature (295)..(526): NCBI GI NO: 37533570 NR Description: putative protein phosphatase 2C
  misc_feature (104)..(311): NCBI GI NO: 37533570 NR Description: putative protein phosphatase 2C
  misc_feature (1)..(151): NCBI GI NO: 37533570 NR Description: putative protein phosphatase 2C
  misc_feature (129)..(523): NCBI GI NO: 18418226 NR Description: protein phosphatase 2C (PP2C) -related
  misc_feature (115)..(523): NCBI GI NO: 7485658 NR Description: hypothetical protein F17M5
  misc_feature (283)..(522): NCBI GI NO: 15240071 NR Description: expressed protein [Arabidopsis thaliana]
  misc_feature (238)..(530): NCBI GI NO: 25366932 NR Description: hypothetical protein dl4315c
  misc_feature (269)..(530): NCBI GI NO: 30683717 NR Description: expressed protein [Arabidopsis thaliana]
  misc_feature (272)..(529): NCBI GI NO: 34896100 NR Description: B1189A09.35
  misc_feature (283)..(522): NCBI GI NO: 18402284 NR Description: expressed protein [Arabidopsis thaliana]
MHTSATATTAPSPRHAVPELHSTTELADGSIVFRFGHPKSKALEPEPASVKTSPYSRVAPASGAVPGSQMEPEIDSEHGLDGVRIGTTAGVEKPSPNAAAEAWPTPPPPDAGAVTGATSAALEEAPEQEAGSNAAVEEVDTRPSSAESLVPSRSEDGPKGDGVAVEAGMPTSGAAMDTIETALEGRGASEDDSAVDVSGGLDEAATSGLEDSEAASEGSTAQDFYTDVETESSGSSSDEQRAEFGFSLPPPEQVSNKADWKNDTSEVKSSDRMIPIAQRTRVLSSGAAILPHPSKVATGGEDAYFIAANGWFGVADGVGQWSFEGINAGLYARELMDGCKKFVTENQGDPDLRPEQILSKAVDEACSPGSCTVLVAHFDGQALQASNIGDSGFIVIRNGEVFKKSKPTLYGFNFPLQIQKGDDPSKFVQNYAIDLEDGDAIVTATDGLFDNVYEHEIAGIVSKSLQADLEPAEIAEHLAVKAQEVGRSGAGRSPFSDAALSAGYLGYSGGKLDDIAVVVSIVRTEIQEDRLR

SEQ ID NO: 39469 - DNA, 2028 bp, Zea mays subsp. mays
  misc_feature (1)..(2028): Ceres Seq. ID no. 12382545
aggtcgtgaaattgattgaaatacctggggcttgagcgtgatatatagagggtggtagagaccaagcgacgttgggcgagcggcgccgccagggctgcgttggtcccttcaccggtgatgagcatccaccagatacaggaatgaacaacattgtgtaggcacctcatccagacatctaaggcgaaaaatgctgcgcctgcaccaccatagtgcacctgtctctccgcacgctgcgatttgtccaccgagtaggcttgcttgttcttgcatatgtaacaagccaaacagcagaatcaccgcttcccaggggtggtcttccataaggcggcgaatcaccactgttgccagtggccagtcagtaccaggatacacacctgatgatggcgatcaatgccttgaaacaggcaacaagctctcttttgctactgtgaaggaggctttcatcagccctgaactctgtgggtgtcagaagtgagctaattcttctagctctaccagcagtcttgggtcaagctattgatccaatagcacaacttatggagactgcatacatcggtagattaggtgcactggaattggcatcggctggtattggtatatcgatttttaatattgtgtcaaagatcttcaacataccactgttgagcattgcaacctcatttgtggcagaggatatttctaggagtgctaccaagcatcctagttcaggcaaattggagctgacatctgtatcatctgccctgatcttagctgctggaattggtataatggaagcattagcattgttcctaggatcaggattgtttcttaaactaatgggcgtgtcacctgtatctccaatgcacagacctgctaaactctttctttcattgagagctctcggagcacctgcaaatgtgattatgttggcagtccaaggtatctttcggggattcaaggatacaaagactccggtgttttatataggtttgggcaatctttctgctgtagcccttcttcctctacttatatatggctttaagcttggcataactggtgctgcaatttctacagttgtgtcccagtacattattacagttcttcttatttggtctctaagtaaaagagctgttttgcttcctccgcgaatagatcaattagagtttggtggatatctaaaatctggtggaatgctgttgggaagaactctttcaattctgctaactatgaccattggtacatcaatggctgctcggcaaggcccaacagcgatggctgctcatcagatttgtttgcaagtatggcttgctgtatccttgcttgcagatgcattagctgtttctgcccaggcgctgatagcaagctcttatgcaatattggactacaaaaaagttcaaaagacagcaatgtttgcgttgcagataggagtgtttagtgggttagctttggccattggattgtatgcctcatttggcaatatatctagactgtttaccagtgacccagaggtcctaacggttgtcaaatcttgtgcactgtcagcccatcaatgccctggccttcatctttgacggtctacattatggtgtatcagattttgaatatgtggctcaagctactatcgtggtgggtgttacgtcttcactcgtcctgttatgggctccgtctgtatttggcttggctggagtttgggctggtttgactacactcatggggttgcgtatggctgcaggcatcctgaggttgctacagaaagcgggcccttggtcgtttatgcacgaggagccataagctgaggtgtatcaactaccagcctgcgcagtttggagctgctaacttacttctgggagtttacatcactgcaaagattatccgagtgtcatggactcgctgaagatgttacccctgttactcctccggctcagaacaaaatctgacttcattgaatttcttaaaatcagtctgctagatggcatggtttggtttggattggtttggtgaaggcgtgaggcccatctgaacatcggtgcggcctctattttttttggc

SEQ ID NO: 39470 - protein, 337 aa, Zea mays subsp. mays
  peptide (1)..(337): Ceres Seq. ID no. 12382546
  misc_feature (1)..(327): NCBI GI NO: 30687474 NR Description: MATE efflux protein family [Arabidopsis thaliana]
  misc_feature (1)..(327): NCBI GI NO: 7487160 NR Description: hypothetical protein At2g38330
  misc_feature (48)..(319): NCBI GI NO: 15231918 NR Description: MATE efflux family protein, putative
  misc_feature (1)..(70): NCBI GI NO: 15231918 NR Description: MATE efflux family protein, putative
  misc_feature (37)..(322): NCBI GI NO: 25405456 NR Description: hypothetical protein F11M15.20
  misc_feature (1)..(46): NCBI GI NO: 25405456 NR Description: hypothetical protein F11M15.20
  misc_feature (62)..(319): NCBI GI NO: 37532300 NR Description: putative membrane protein
  misc_feature (1)..(68): NCBI GI NO: 37532300 NR Description: putative membrane protein
  misc_feature (38)..(322): NCBI GI NO: 19386721 NR Description: P0678F11.10
  misc_feature (1)..(46): NCBI GI NO: 19386721 NR Description: P0678F11.10
METAYIGRLGALELASAGIGISIFNIVSKIFNIPLLSIATSFVAEDISRSATKHPSSGKLELTSVSSALILAAGIGIMEALALFLGSGLFLKLMGVSPVSPMHRPAKLFLSLRALGAPANVIMLAVQGIFRGFKDTKTPVFYIGLGNLSAVALLPLLIYGFKLGITGAAISTVVSQYIITVLLIWSLSKRAVLLPPRIDQLEFGGYLKSGGMLLGRTLSILLTMTIGTSMAARQGPTAMAAHQICLQVWLAVSLLADALAVSAQALIASSYAILDYKKVQKTAMFALQIGVFSGLALAIGLYASFGNISRLFTSDPEVLTVVKSCALSAHQCPGLHL

SEQ ID NO: 39471 - protein, 260 aa, Zea mays subsp. mays
  peptide (1)..(260): Ceres Seq. ID no. 12382547
  misc_feature (1)..(250): NCBI GI NO: 30687474 NR Description: MATE efflux protein family [Arabidopsis thaliana]
  misc_feature (1)..(250): NCBI GI NO: 7487160 NR Description: hypothetical protein At2g38330
  misc_feature (1)..(242): NCBI GI NO: 15231918 NR Description: MATE efflux family protein, putative
  misc_feature (1)..(245): NCBI GI NO: 25405456 NR Description: hypothetical protein F11M15.20
  misc_feature (1)..(242): NCBI GI NO: 37532300 NR Description: putative membrane protein
  misc_feature (1)..(245): NCBI GI NO: 19386721 NR Description: P0678F11.10
  misc_feature (62)..(204): NCBI GI NO: 15233839 NR Description: putative protein; protein id: At4g38380.1
  misc_feature (1)..(36): NCBI GI NO: 15233839 NR Description: putative protein; protein id: At4g38380.1
  misc_feature (1)..(242): NCBI GI NO: 20270057 NR Description: Putative membrane protein
  misc_feature (1)..(180): NCBI GI NO: 18403476 NR Description: expressed protein; protein id: At1g51340
MEALALFLGSGLFLKLMGVSPVSPMHRPAKLFLSLRALGAPANVIMLAVQGIFRGFKDTKTPVFYIGLGNLSAVALLPLLIYGFKLGITGAAISTVVSQYIITVLLIWSLSKRAVLLPPRIDQLEFGGYLKSGGMLLGRTLSILLTMTIGTSMAARQGPTAMAAHQICLQVWLAVSLLADALAVSAQALIASSYAILDYKKVQKTAMFALQIGVFSGLALAIGLYASFGNISRLFTSDPEVLTVVKSCALSAHQCPGLHL

SEQ ID NO: 39472 - protein, 244 aa, Zea mays subsp. mays
  peptide (1)..(244): Ceres Seq. ID no. 12382548
  misc_feature (1)..(234): NCBI GI NO: 30687474 NR Description: MATE efflux protein family [Arabidopsis thaliana]
  misc_feature (1)..(234): NCBI GI NO: 7487160 NR Description: hypothetical protein At2g38330
  misc_feature (1)..(226): NCBI GI NO: 15231918 NR Description: MATE efflux family protein, putative
  misc_feature (1)..(229): NCBI GI NO: 25405456 NR Description: hypothetical protein F11M15.20
  misc_feature (1)..(226): NCBI GI NO: 37532300 NR Description: putative membrane protein
  misc_feature (1)..(229): NCBI GI NO: 19386721 NR Description: P0678F11.10
  misc_feature (46)..(188): NCBI GI NO: 15233839 NR Description: putative protein; protein id: At4g38380.1
  misc_feature (1)..(20): NCBI GI NO: 15233839 NR Description: putative protein; protein id: At4g38380.1
  misc_feature (1)..(226): NCBI GI NO: 20270057 NR Description: Putative membrane protein
  misc_feature (1)..(164): NCBI GI NO: 18403476 NR Description: expressed protein; protein id: At1g51340
MGVSPVSPMHRPAKLFLSLRALGAPANVIMLAVQGIFRGFKDTKTPVFYIGLGNLSAVALLPLLIYGFKLGITGAAISTVVSQYIITVLLIWSLSKRAVLLPPRIDQLEFGGYLKSGGMLLGRTLSILLTMTIGTSMAARQGPTAMAAHQICLQVWLAVSLLADALAVSAQALIASSYAILDYKKVQKTAMFALQIGVFSGLALAIGLYASFGNISRLFTSDPEVLTVVKSCALSAHQCPGLHL

SEQ ID NO: 39473 - DNA, 2013 bp, Zea mays subsp. mays; identical to SEQ ID NO: 37117
  misc_feature (1)..(2013): Ceres Seq. ID no. 12417337

SEQ ID NO: 39474 - protein, 536 aa, Zea mays subsp. mays; identical to SEQ ID NO: 37118
  peptide (1)..(536): Ceres Seq. ID no. 12417338
  misc_feature (116)..(272): Pfam Name: Pfam Description:  Chalcone and stilbene synthases
  misc_feature (1)..(324): NCBI GI NO: 17979464 NR Description: At1g68530/T26J14_10 [Arabidopsis thaliana]
  misc_feature (5)..(324): NCBI GI NO: 21618184 NR Description: fatty acid condensing enzyme CUT1, putative
  misc_feature (1)..(324): NCBI GI NO: 15221431 NR Description: very-long-chain fatty acid condensing enzyme
  misc_feature (5)..(324): NCBI GI NO: 15222592 NR Description: fatty acid condensing enzyme CUT1, putative
  misc_feature (5)..(324): NCBI GI NO: 21593111 NR Description: very-long-chain fatty acid condensing enzyme CUT1
  misc_feature (5)..(324): NCBI GI NO: 28393607 NR Description: putative fatty acid condensing enzyme CUT1
  misc_feature (12)..(324): NCBI GI NO: 34913436 NR Description: putative fatty acid condensing enzyme CUT1
  misc_feature (7)..(324): NCBI GI NO: 15223556 NR Description: very-long-chain fatty acid condensing enzyme CUT1
  misc_feature (7)..(324): NCBI GI NO: 15226724 NR Description: putative beta-ketoacyl-CoA synthase
  misc_feature (4)..(324): NCBI GI NO: 15236133 NR Description: putative ketoacyl-CoA synthase

SEQ ID NO: 39475 - protein, 534 aa, Zea mays subsp. mays; identical to SEQ ID NO: 37119
  peptide (1)..(534): Ceres Seq. ID no. 12417339
  misc_feature (114)..(270): Pfam Name: Pfam Description:  Chalcone and stilbene synthases
  misc_feature (1)..(322): NCBI GI NO: 17979464 NR Description: At1g68530/T26J14_10 [Arabidopsis thaliana]
  misc_feature (3)..(322): NCBI GI NO: 21618184 NR Description: fatty acid condensing enzyme CUT1, putative
  misc_feature (1)..(322): NCBI GI NO: 15221431 NR Description: very-long-chain fatty acid condensing enzyme
  misc_feature (3)..(322): NCBI GI NO: 15222592 NR Description: fatty acid condensing enzyme CUT1, putative
  misc_feature (3)..(322): NCBI GI NO: 21593111 NR Description: very-long-chain fatty acid condensing enzyme CUT1
  misc_feature (3)..(322): NCBI GI NO: 28393607 NR Description: putative fatty acid condensing enzyme CUT1
  misc_feature (10)..(322): NCBI GI NO: 34913436 NR Description: putative fatty acid condensing enzyme CUT1
  misc_feature (5)..(322): NCBI GI NO: 15223556 NR Description: very-long-chain fatty acid condensing enzyme CUT1
  misc_feature (5)..(322): NCBI GI NO: 15226724 NR Description: putative beta-ketoacyl-CoA synthase
  misc_feature (2)..(322): NCBI GI NO: 15236133 NR Description: putative ketoacyl-CoA synthase

SEQ ID NO: 39476 - protein, 466 aa, Zea mays subsp. mays; identical to SEQ ID NO: 37120
  peptide (1)..(466): Ceres Seq. ID no. 12417340
  misc_feature (46)..(202): Pfam Name: Pfam Description:  Chalcone and stilbene synthases
  misc_feature (1)..(254): NCBI GI NO: 17979464 NR Description: At1g68530/T26J14_10 [Arabidopsis thaliana]
  misc_feature (1)..(254): NCBI GI NO: 21618184 NR Description: fatty acid condensing enzyme CUT1, putative
  misc_feature (1)..(254): NCBI GI NO: 15221431 NR Description: very-long-chain fatty acid condensing enzyme
  misc_feature (1)..(254): NCBI GI NO: 15222592 NR Description: fatty acid condensing enzyme CUT1, putative
  misc_feature (1)..(254): NCBI GI NO: 21593111 NR Description: very-long-chain fatty acid condensing enzyme CUT1
  misc_feature (1)..(254): NCBI GI NO: 28393607 NR Description: putative fatty acid condensing enzyme CUT1
  misc_feature (1)..(254): NCBI GI NO: 34913436 NR Description: putative fatty acid condensing enzyme CUT1
  misc_feature (1)..(254): NCBI GI NO: 15223556 NR Description: very-long-chain fatty acid condensing enzyme CUT1
  misc_feature (1)..(254): NCBI GI NO: 15226724 NR Description: putative beta-ketoacyl-CoA synthase
  misc_feature (1)..(254): NCBI GI NO: 15236133 NR Description: putative ketoacyl-CoA synthase

SEQ ID NO: 39477 - DNA, 2195 bp, Zea mays subsp. mays
  misc_feature (1)..(2195): Ceres Seq. ID no. 12368028
taatcgaaaagcacacgcacggacggccccgagggtttagagcccaacttctctcttcacatcgccgcgaagccagctccccgatgcgatctggccgagggaagatggcgactccgccgccgccaatccgccccgccgccgcgctcctcctcctcgtcctcgctggcgtcctcgcctccgccgcgagcgccgatctcgtcatctccaaggcagatcggagggttgatctgacctcgcatatcgttcgcgtcctcgcttccctcaaggctgaaaatgttggaccagaccctgtctctcaagttttactgccttttcccaatattcaagccaagaacttggcagctattagagcattcggcagtgaagggaaagtgaagggtcaaagtactgttctgccaattgaagttgttcaaccttctggagctcccccggagctgacattcttttcagcattgttgcccaaacctttggaaaaaggaaagactctgtacttggatgttctgactgtgttcacacactctcttcaaccattcccagaagaaatcactcaagccgaagcacaacttgttgtctatcaggatagtgctcactatctgtcaccttaccctgttaaggctcagacacttgctatcagattgcctggtggaagggttgaatcatacacaaggcatccaaacgcaaaacttgtggattcagaactgaaatatggaccatttcatgaccttcccccgttctcctacttacctgtgattgtgcattttgagaacaacaatccttttgcagttgcaaaggaagttataagggagattgagatatctcactggggaaatgtacagattacggaacactacaacattgctcatggtggtgccagactcaagggtgaattttccaggattgattatcaatctagaccttacgtaaggggtgtttcatcttttagacatcttattgcaaaactgcctccaagggcacactctatttattaccgagatgagattggtaatatttccacatcacatttgtggagtgattctatgaagacccaactggaaatagaaccaaggtttccattgtttggtgggtggcaaacaaccttcactgttggttatggtttaccacttgaagactttgttttctattctgatggaaagagatttctcaatatcacatttggttctccattggaggaaattctcattgaaaagcttatcgtaaaggttgttctacctgaagggtcaaaggatatcgaagtttcagctccctttccaacacagcagcagcaagaggttaagtattcacaccttgacattgtcggaagaccagttgttgtcttggagaaacctgatgttattccagagcataatttgtatttccaggtttactacagattcaacaacatatccttgctcagagagccgttgatgctgattactggtttcttcctcctgtttgtggcctgtattgtttacatgcgtactgatatgtcaatatccaagagctctccttcctacttggccaagctgcaatgggatgaggtgcaagcaactgttcagaaaatccagggtatctttgagcaatgcttagcagttcatgataaactggaggcctcattgcgggatttgtctaggacaggagacattcagtcttgcaaggcagctcgtaaagctgctgacacgcagtttaaggagctatcgaaagatctgaagccactgttggcgactctacagtcatctccccagtcttatcagatattgccaaaggtagaggacttgatcgtaaaggagagagagatgcaggagaagctcatgacaaggcattccaccgttgtcgacagctttgagaagaagctgcgcgggcaagatgtagagaacaggattgctttgcagcagcagaaaattgctgccctgaggcaggaggttgaatctcttttagagtacattagtgagatttgagcaaatgagtgctgctgtggcgtgatacatctttagcgattagactgcctttgtttggtttagggtttaccccaatattgaaatctactactctgagattgtgtcggtaaccatctagtttcccagttgagagacctggaagttgcaatgaccttgtaacatgataatcagtgtaattctggagctgactaaatttttgcatttaatatcaatatcacaggaaccgtcatcttttggacc

SEQ ID NO: 39478 - protein, 650 aa, Zea mays subsp. mays
  peptide (1)..(650): Ceres Seq. ID no. 12368029
  misc_feature (64)..(491): Pfam Name: Pfam Description:  Ribophorin I
  misc_feature (39)..(512): NCBI GI NO: 7489438 NR Description: ribophorin I homolog - barley (fragment)
  misc_feature (48)..(650): NCBI GI NO: 15223039 NR Description: putative ribophorin I
  misc_feature (47)..(497): NCBI GI NO: 15226341 NR Description: putative ribophorin I; protein id: At2g01720.1
  misc_feature (386)..(650): NCBI GI NO: 5918187 NR Description: ribophorin I [Hordeum vulgare]
  misc_feature (44)..(647): NCBI GI NO: 4506675 NR Description: ribophorin I [Homo sapiens]
  misc_feature (45)..(624): NCBI GI NO: 28175644 NR Description: Similar to ribophorin I [Xenopus laevis]
  misc_feature (44)..(647): NCBI GI NO: 9857227 NR Description: ribophorin I [Sus scrofa]
  misc_feature (45)..(647): NCBI GI NO: 40674542 NR Description: Unknown (protein for MGC:76266)
  misc_feature (173)..(645): NCBI GI NO: 29179446 NR Description: Similar to ribophorin I [Danio rerio]
  misc_feature (50)..(647): NCBI GI NO: 29570391 NR Description: Hypothetical protein T22D1.4
IEKHTHGRPRGFRAQLLSSHRREASSPMRSGRGKMATPPPPIRPAAALLLLVLAGVLASAASADLVISKADRRVDLTSHIVRVLASLKAENVGPDPVSQVLLPFPNIQAKNLAAIRAFGSEGKVKGQSTVLPIEVVQPSGAPPELTFFSALLPKPLEKGKTLYLDVLTVFTHSLQPFPEEITQAEAQLVVYQDSAHYLSPYPVKAQTLAIRLPGGRVESYTRHPNAKLVDSELKYGPFHDLPPFSYLPVIVHFENNNPFAVAKEVIREIEISHWGNVQITEHYNIAHGGARLKGEFSRIDYQSRPYVRGVSSFRHLIAKLPPRAHSIYYRDEIGNISTSHLWSDSMKTQLEIEPRFPLFGGWQTTFTVGYGLPLEDFVFYSDGKRFLNITFGSPLEEILIEKLIVKVVLPEGSKDIEVSAPFPTQQQQEVKYSHLDIVGRPVVVLEKPDVIPEHNLYFQVYYRFNNISLLREPLMLITGFFLLFVACIVYMRTDMSISKSSPSYLAKLQWDEVQATVQKIQGIFEQCLAVHDKLEASLRDLSRTGDIQSCKAARKAADTQFKELSKDLKPLLATLQSSPQSYQILPKVEDLIVKEREMQEKLMTRHSTVVDSFEKKLRGQDVENRIALQQQKIAALRQEVESLLEYISEI

SEQ ID NO: 39479 - protein, 623 aa, Zea mays subsp. mays
  peptide (1)..(623): Ceres Seq. ID no. 12368030
  misc_feature (37)..(464): Pfam Name: Pfam Description:  Ribophorin I
  misc_feature (12)..(485): NCBI GI NO: 7489438 NR Description: ribophorin I homolog - barley (fragment)
  misc_feature (21)..(623): NCBI GI NO: 15223039 NR Description: putative ribophorin I
  misc_feature (20)..(470): NCBI GI NO: 15226341 NR Description: putative ribophorin I; protein id: At2g01720.1
  misc_feature (359)..(623): NCBI GI NO: 5918187 NR Description: ribophorin I [Hordeum vulgare]
  misc_feature (17)..(620): NCBI GI NO: 4506675 NR Description: ribophorin I [Homo sapiens]
  misc_feature (18)..(597): NCBI GI NO: 28175644 NR Description: Similar to ribophorin I [Xenopus laevis]
  misc_feature (17)..(620): NCBI GI NO: 9857227 NR Description: ribophorin I [Sus scrofa]
  misc_feature (18)..(620): NCBI GI NO: 40674542 NR Description: Unknown (protein for MGC:76266)
  misc_feature (146)..(618): NCBI GI NO: 29179446 NR Description: Similar to ribophorin I [Danio rerio]
  misc_feature (23)..(620): NCBI GI NO: 29570391 NR Description: Hypothetical protein T22D1.4
MRSGRGKMATPPPPIRPAAALLLLVLAGVLASAASADLVISKADRRVDLTSHIVRVLASLKAENVGPDPVSQVLLPFPNIQAKNLAAIRAFGSEGKVKGQSTVLPIEVVQPSGAPPELTFFSALLPKPLEKGKTLYLDVLTVFTHSLQPFPEEITQAEAQLVVYQDSAHYLSPYPVKAQTLAIRLPGGRVESYTRHPNAKLVDSELKYGPFHDLPPFSYLPVIVHFENNNPFAVAKEVIREIEISHWGNVQITEHYNIAHGGARLKGEFSRIDYQSRPYVRGVSSFRHLIAKLPPRAHSIYYRDEIGNISTSHLWSDSMKTQLEIEPRFPLFGGWQTTFTVGYGLPLEDFVFYSDGKRFLNITFGSPLEEILIEKLIVKVVLPEGSKDIEVSAPFPTQQQQEVKYSHLDIVGRPVVVLEKPDVIPEHNLYFQVYYRFNNISLLREPLMLITGFFLLFVACIVYMRTDMSISKSSPSYLAKLQWDEVQATVQKIQGIFEQCLAVHDKLEASLRDLSRTGDIQSCKAARKAADTQFKELSKDLKPLLATLQSSPQSYQILPKVEDLIVKEREMQEKLMTRHSTVVDSFEKKLRGQDVENRIALQQQKIAALRQEVESLLEYISEI

SEQ ID NO: 39480 - protein, 616 aa, Zea mays subsp. mays
  peptide (1)..(616): Ceres Seq. ID no. 12368031
  misc_feature (30)..(457): Pfam Name: Pfam Description:  Ribophorin I
  misc_feature (5)..(478): NCBI GI NO: 7489438 NR Description: ribophorin I homolog - barley (fragment)
  misc_feature (14)..(616): NCBI GI NO: 15223039 NR Description: putative ribophorin I
  misc_feature (13)..(463): NCBI GI NO: 15226341 NR Description: putative ribophorin I; protein id: At2g01720.1
  misc_feature (352)..(616): NCBI GI NO: 5918187 NR Description: ribophorin I [Hordeum vulgare]
  misc_feature (10)..(613): NCBI GI NO: 4506675 NR Description: ribophorin I [Homo sapiens]
  misc_feature (11)..(590): NCBI GI NO: 28175644 NR Description: Similar to ribophorin I [Xenopus laevis]
  misc_feature (10)..(613): NCBI GI NO: 9857227 NR Description: ribophorin I [Sus scrofa]
  misc_feature (11)..(613): NCBI GI NO: 40674542 NR Description: Unknown (protein for MGC:76266)
  misc_feature (139)..(611): NCBI GI NO: 29179446 NR Description: Similar to ribophorin I [Danio rerio]
  misc_feature (16)..(613): NCBI GI NO: 29570391 NR Description: Hypothetical protein T22D1.4
MATPPPPIRPAAALLLLVLAGVLASAASADLVISKADRRVDLTSHIVRVLASLKAENVGPDPVSQVLLPFPNIQAKNLAAIRAFGSEGKVKGQSTVLPIEVVQPSGAPPELTFFSALLPKPLEKGKTLYLDVLTVFTHSLQPFPEEITQAEAQLVVYQDSAHYLSPYPVKAQTLAIRLPGGRVESYTRHPNAKLVDSELKYGPFHDLPPFSYLPVIVHFENNNPFAVAKEVIREIEISHWGNVQITEHYNIAHGGARLKGEFSRIDYQSRPYVRGVSSFRHLIAKLPPRAHSIYYRDEIGNISTSHLWSDSMKTQLEIEPRFPLFGGWQTTFTVGYGLPLEDFVFYSDGKRFLNITFGSPLEEILIEKLIVKVVLPEGSKDIEVSAPFPTQQQQEVKYSHLDIVGRPVVVLEKPDVIPEHNLYFQVYYRFNNISLLREPLMLITGFFLLFVACIVYMRTDMSISKSSPSYLAKLQWDEVQATVQKIQGIFEQCLAVHDKLEASLRDLSRTGDIQSCKAARKAADTQFKELSKDLKPLLATLQSSPQSYQILPKVEDLIVKEREMQEKLMTRHSTVVDSFEKKLRGQDVENRIALQQQKIAALRQEVESLLEYISEI

SEQ ID NO: 39481 - DNA, 485 bp, Zea mays subsp. mays
  misc_feature (1)..(485): Ceres Seq. ID no. 4612700
agtcgcctccttcctgcgccgccgccgccgccgccgctaccaccgcctcgcggccgcctgcggctccgcgtttccgcacggagaggtgattaggtgtgactgtagtcactgtcatgcagttggtgaaggtttcttgaggctgagaacatggtgctgaagacggaactttgccgcttcagcggccagaagatttatcctgggaaaggcattagatttatccgtgctgattctcaggtcttcctttttgccaactcgaaatgcaagcgctacttccacaactgcctgaagcctgcaaagcttacctggacagcaatgtacaggaagcagcacaagaaggatatccatgctgaagcggtaaagaagaggcgccgcgccaccaagaagccatactccaggtcaattgtgggtgcttccttggaagtaatccagaagaagagagctgagaagccagaggtccgcgatgctgctagagaagctgctcttcg

SEQ ID NO: 39482 - protein, 112 aa, Zea mays subsp. mays
  peptide (1)..(112): Ceres Seq. ID no. 4612701
  misc_feature (3)..(73): Pfam Name: Pfam Description:  Ribosomal protein L24e
  misc_feature (1)..(111): NCBI GI NO: 1710521 NR Description: 60S RIBOSOMAL PROTEIN L24
  misc_feature (4)..(111): NCBI GI NO: 34900364 NR Description: putative 60S ribosomal protein L24
  misc_feature (1)..(111): NCBI GI NO: 10180025 NR Description: 60S ribosomal protein L24 [Prunus avium]
  misc_feature (1)..(111): NCBI GI NO: 15231730 NR Description: 60S ribosomal protein - like; protein id:At3g53020
  misc_feature (1)..(111): NCBI GI NO: 18404176 NR Description: 60S ribosomal protein L24; protein id: At2g36620
  misc_feature (1)..(111): NCBI GI NO: 6094040 NR Description: 60S ribosomal protein L24
  misc_feature (5)..(111): NCBI GI NO: 25295112 NR Description: 60S ribosomal protein L24
  misc_feature (3)..(111): NCBI GI NO: 19075214 NR Description: 60s ribosomal protein L24
  misc_feature (3)..(111): NCBI GI NO: 19115030 NR Description: 60S ribosomal protein L24
  misc_feature (1)..(111): NCBI GI NO: 28174943 NR Description: Similar to ribosomal protein L24 [Mus musculus]
MVLKTELCRFSGQKIYPGKGIRFIRADSQVFLFANSKCKRYFHNCLKPAKLTWTAMYRKQHKKDIHAEAVKKRRRATKKPYSRSIVGASLEVIQKKRAEKPEVRDAAREAAL

SEQ ID NO: 39483 - protein, 57 aa, Zea mays subsp. mays
  peptide (1)..(57): Ceres Seq. ID no. 4612702
  misc_feature (1)..(56): NCBI GI NO: 1710521 NR Description: 60S RIBOSOMAL PROTEIN L24
  misc_feature (1)..(56): NCBI GI NO: 34900364 NR Description: putative 60S ribosomal protein L24
  misc_feature (1)..(56): NCBI GI NO: 10180025 NR Description: 60S ribosomal protein L24 [Prunus avium]
  misc_feature (1)..(56): NCBI GI NO: 15231730 NR Description: 60S ribosomal protein - like; protein id:At3g53020
  misc_feature (1)..(56): NCBI GI NO: 18404176 NR Description: 60S ribosomal protein L24; protein id: At2g36620
  misc_feature (1)..(56): NCBI GI NO: 6094040 NR Description: 60S ribosomal protein L24
  misc_feature (1)..(56): NCBI GI NO: 25295112 NR Description: 60S ribosomal protein L24
  misc_feature (1)..(56): NCBI GI NO: 19075214 NR Description: 60s ribosomal protein L24
  misc_feature (1)..(56): NCBI GI NO: 19115030 NR Description: 60S ribosomal protein L24
  misc_feature (1)..(56): NCBI GI NO: 28174943 NR Description: Similar to ribosomal protein L24 [Mus musculus]
MYRKQHKKDIHAEAVKKRRRATKKPYSRSIVGASLEVIQKKRAEKPEVRDAAREAAL

SEQ ID NO: 39484 - DNA, 1295 bp, Zea mays subsp. mays
  misc_feature (1)..(1295): Ceres Seq. ID no. 12417381
gcacgagaccattacctagaacattaatcgaaaaaaccacctccaattacttcacagcagcgcggcgccgagaagatggcttccccctcgtacaggcttgcggcggcgatcacggccccctctaccggcgagttcctcgtcgtccggcagccgcgcccgccatccccacccgaggaggaagaggattaccggcgcttcgtcgacagcgatctctacgacctcccgtccgcgcccctcgggccactcgagggggcaccccggtcggaggtggccatcggcggcgcggactctgtcgccagccgcctcgacctctcgcgcctcgacgtgtccgccgcccttgatcagatttttcaccaatttggcttgccggttgggatgagtggggagtggaggctcctgaagtatgtggaggaagcagaatttggcccggatgctggcgttaacacggtgtacattgtcggatctcttgagttgagattggatgatctgccagagtcatgtaaatggatgtccaaggagtgtgcattgaggttgctttcggaagcgaaaccaggtaatgatcgcataggacagtatgcatatattggacttctgaattcggagctgtcatcaaactgcacagcttctcctgcattgcccttccccccgcctccactaccccactcccaggagccgcccaggtacgtcgccggcggcgatgacgacgcgcttcaagaagaaccgcaagaagcgcggccacgtgtccgccgggcacggccgcatcggcaagcaccggaagcatcccggaggtcgcggtaacgccggtggcatgcaccaccaccgcatcctcttcgacaagtaccatcccggctacttcggtaaggtcggcatgcgctacttccacaagctccgcaacaagttctactgccccgcggtcaacatcgagcgcctctggtcgatggtgcccgccgaaaaggcggcggaagccggcggcgacaaggccccgcagatcgacgtcacgcagttcggcttcttcaaggtgctcgggaagggggtgctgccgcccaagcccatcgtcgtcaaggccaagctcatctccaaggtcgccgagaagaagatcaaggccgccggcggcgccgtcgtgctcaccgcctagttttcagtccttattcgcctcttggttttgagatctatatctgaactagcagtctttcttgtctcacctatttgtgttaagaagacgtagtttttaaatccatggctccttcctgtttggacagtgctttcatatcaaatatttcaggtatattagagcg

SEQ ID NO: 39485 - protein, 240 aa, Zea mays subsp. mays
  peptide (1)..(240): Ceres Seq. ID no. 12417382
  misc_feature (7)..(191): NCBI GI NO: 18395656 NR Description: expressed protein
  misc_feature (7)..(191): NCBI GI NO: 25518652 NR Description: hypothetical protein F4F7
  misc_feature (7)..(191): NCBI GI NO: 11761474 NR Description: unknown protein [Arabidopsis thaliana]
MASPSYRLAAAITAPSTGEFLVVRQPRPPSPPEEEEDYRRFVDSDLYDLPSAPLGPLEGAPRSEVAIGGADSVASRLDLSRLDVSAALDQIFHQFGLPVGMSGEWRLLKYVEEAEFGPDAGVNTVYIVGSLELRLDDLPESCKWMSKECALRLLSEAKPGNDRIGQYAYIGLLNSELSSNCTASPALPFPPPPLPHSQEPPRYVAGGDDDALQEEPQEARPRVRRARPHRQAPEASRRSR

SEQ ID NO: 39486 - protein, 145 aa, Zea mays subsp. mays
  peptide (1)..(145): Ceres Seq. ID no. 12417383
  misc_feature (107)..(139): Pfam Name: Pfam Description:  Ribosomal protein L15
  misc_feature (1)..(145): NCBI GI NO: 30017566 NR Description: putative ribosomal protein L27a
  misc_feature (1)..(145): NCBI GI NO: 23237917 NR Description: putative 60S ribosomal protein L27a
  misc_feature (1)..(145): NCBI GI NO: 15223190 NR Description: 60S ribosomal protein L27A; protein id:At1g70600
  misc_feature (1)..(145): NCBI GI NO: 3608481 NR Description: ribosomal protein L27a [Petunia x hybrida]
  misc_feature (1)..(145): NCBI GI NO: 7959355 NR Description: 60S ribosomal protein L27a [Panax ginseng]
  misc_feature (1)..(145): NCBI GI NO: 21553702 NR Description: 60S ribosomal protein L27A [Arabidopsis thaliana]
  misc_feature (1)..(145): NCBI GI NO: 15220698 NR Description: 60s ribosomal protein l27a
  misc_feature (3)..(145): NCBI GI NO: 22758850 NR Description: ribosomal protein L22 [Argopecten irradians]
  misc_feature (1)..(145): NCBI GI NO: 1350711 NR Description: 60S RIBOSOMAL PROTEIN L27A
  misc_feature (1)..(145): NCBI GI NO: 17509867 NR Description: Ribosomal protein L15 (16.2 kD)
MTTRFKKNRKKRGHVSAGHGRIGKHRKHPGGRGNAGGMHHHRILFDKYHPGYFGKVGMRYFHKLRNKFYCPAVNIERLWSMVPAEKAAEAGGDKAPQIDVTQFGFFKVLGKGVLPPKPIVVKAKLISKVAEKKIKAAGGAVVLTA

SEQ ID NO: 39487 - protein, 140 aa, Zea mays subsp. mays
  peptide (1)..(140): Ceres Seq. ID no. 12417384
  misc_feature (1)..(91): NCBI GI NO: 18395656 NR Description: expressed protein
  misc_feature (1)..(91): NCBI GI NO: 25518652 NR Description: hypothetical protein F4F7
  misc_feature (1)..(91): NCBI GI NO: 11761474 NR Description: unknown protein [Arabidopsis thaliana]
MSGEWRLLKYVEEAEFGPDAGVNTVYIVGSLELRLDDLPESCKWMSKECALRLLSEAKPGNDRIGQYAYIGLLNSELSSNCTASPALPFPPPPLPHSQEPPRYVAGGDDDALQEEPQEARPRVRRARPHRQAPEASRRSR

SEQ ID NO: 39488 - DNA, 2397 bp, Zea mays subsp. mays
  misc_feature (1)..(2397): Ceres Seq. ID no. 12363062
gcacgagaccattacctagaacatcctaatcaaaaaattccatttcttcttcgtcctcgcaccagtccctcctccttggaagcgagggaggagagtggagggagagggaggagcgaggcaccggtgagctcgggaggcggcgtggggcttgcacgccggccctacccccagctcactcaccacgctcttgtctgaccaactctctctctctcttatctccttccaagattcccccatttttttgttgttgtccccccattcttgctaggatcattccttgatctttcgctcgctccagtacgcctgttttccagctccggagatcccatctcggccacctcctgcggtctccaagctccaagaggccagattccagcacaaatttgaggtcaatttgcccgctgagctcgaatcaatccgctcggcaacaagtgtcatttgttcccccgatccccgggcttcgattcgatcgaatccgacctaattttattgtgtgtgtgtgtgtttaaccttctctcgctgcacttttcctttctcctccctgtcgcaaacgcaaagtgggttccatcgcgtcacccgcacggctcctctgatcgggcggagaaagaaagcgcataaaaggcgagctcttgatgcggtcttggtcgtagcaacagcagctccactgctcccggcatcgcctgctgttgtttatccatatacggacggagcagcgggcgctccggcagaggcagtggcagcgcgctccccccgtcagcgcgtgctgatgcttgcccccctgctcgccgccttcgctgtcgtcttcctgctcctcctgtccaggccatgcgcccgtgacatgagactgttcctcgcctccctgtgccagcagctcgtgctgtccctgctcgggttcctggcaggcctccgcctgctcagcggcgtcgcggccgcctccgcggccacagagaccatgccgctcatgccctccttcaagaggaagcgggcctcggccacggtggagaatgcggaggaggcggccgccacggccggcggcggcgagacgtcggtgctcgacctgccggagctggccatcgattgcattctggagaagctgcggccggcggagctgcggagcatggccgccgtctgccgctccatgcgcgagcgctgccgcggcgaccacctctgggagcgccacatgacaaacaggtggggccgtgtcctgggccgcgccgccagggacgaatggaggacgcacctggcgtccgccagcgagtcccgcgcggcgggcggcggcggcggcggcggcaagcgccggaggtggctcgccgcgctgtcctgcgtttgcccggtggtgtcctggatgcggcccagggccgacggtggcaagtcgtccgcccccgtgctggacgattccatcatgtcgtggtacctgtccgtggagagcggcaagttctggttcccggctcaggtctacaaccgcgagcatgggcatgttgggttcatgatgtcatgctacgatgcagcgctcagttacgatttgcataccgacacattccgtgcaaggtacccaccacacggtcgacgaaccgtggtgttggaggatggcgtgcaatgggacagggtgagggcaccgcctgttgacacccttgcgcattacctgcacacctctgactgcctgcatgagctccggcccggcgaccacatcgagattcagtggagaaggaacaaagaattcccatacggctggtggtatggagttgttgggcacttggagtcatgtgatggaagcgaacacttttgtcggtgccatcttagtgataccgtggtgctggagtttaatcagtacacgccgggctcaaggtggaggcaagccgttggtgaaacggaaggagcatagggaggagggcaacgagggcgacgggttctacggcggcataaggaagctccgcggcaacgatgacatctccaagtggaggcagctgtggccaacagacgtcctggagtaagcaggaaccgcatcccttctcacaccgacattgatccatcgctcaaatgacacgcctttctttcatcatcatattgaccaaattcgtcgtctctgtcgcgctgttgtaaacgggttagtagaagaacaaatcccgtagctggacaagggtgtaacacttactctctccgtttcgttttagttgtcgctggatagtgcaaaattgaactatccagctacaactaaaaagaaacggatggagtatttgttaggcgtaccaggcgcagactgcttcctatttgttcgtggggctgtaactgtaagccttgtttgtgacccctaagcagtctgcgtcttgtgcctgctgctgtagcggtagagcagagagagatcaaatgtaaattacatttttttagctcaaattcacg

SEQ ID NO: 39489 - protein, 371 aa, Zea mays subsp. mays
  peptide (1)..(371): Ceres Seq. ID no. 12363063
  misc_feature (1)..(371): NCBI GI NO: 34903372 NR Description: unnamed protein product
  misc_feature (59)..(365): NCBI GI NO: 30685347 NR Description: F-box protein family [Arabidopsis thaliana]
  misc_feature (94)..(365): NCBI GI NO: 30688559 NR Description: F-box protein family [Arabidopsis thaliana]
  misc_feature (91)..(320): NCBI GI NO: 15225802 NR Description: unknown protein; protein id: At2g26850.1
  misc_feature (346)..(365): NCBI GI NO: 15225802 NR Description: unknown protein; protein id: At2g26850.1
  misc_feature (1)..(320): NCBI GI NO: 34909060 NR Description: P0702B09.33
  misc_feature (94)..(321): NCBI GI NO: 7487431 NR Description: hypothetical protein At2g32560
  misc_feature (187)..(342): NCBI GI NO: 7459607 NR Description: hypothetical protein At2g41170
  misc_feature (94)..(134): NCBI GI NO: 7459607 NR Description: hypothetical protein At2g41170
MLAPLLAAFAVVFLLLLSRPCARDMRLFLASLCQQLVLSLLGFLAGLRLLSGVAAASAATETMPLMPSFKRKRASATVENAEEAAATAGGGETSVLDLPELAIDCILEKLRPAELRSMAAVCRSMRERCRGDHLWERHMTNRWGRVLGRAARDEWRTHLASASESRAAGGGGGGGKRRRWLAALSCVCPVVSWMRPRADGGKSSAPVLDDSIMSWYLSVESGKFWFPAQVYNREHGHVGFMMSCYDAALSYDLHTDTFRARYPPHGRRTVVLEDGVQWDRVRAPPVDTLAHYLHTSDCLHELRPGDHIEIQWRRNKEFPYGWWYGVVGHLESCDGSEHFCRCHLSDTVVLEFNQYTPGSRWRQAVGETEGA

SEQ ID NO: 39490 - protein, 347 aa, Zea mays subsp. mays
  peptide (1)..(347): Ceres Seq. ID no. 12363064
  misc_feature (1)..(347): NCBI GI NO: 34903372 NR Description: unnamed protein product
  misc_feature (35)..(341): NCBI GI NO: 30685347 NR Description: F-box protein family [Arabidopsis thaliana]
  misc_feature (70)..(341): NCBI GI NO: 30688559 NR Description: F-box protein family [Arabidopsis thaliana]
  misc_feature (67)..(296): NCBI GI NO: 15225802 NR Description: unknown protein; protein id: At2g26850.1
  misc_feature (322)..(341): NCBI GI NO: 15225802 NR Description: unknown protein; protein id: At2g26850.1
  misc_feature (1)..(296): NCBI GI NO: 34909060 NR Description: P0702B09.33
  misc_feature (70)..(297): NCBI GI NO: 7487431 NR Description: hypothetical protein At2g32560
  misc_feature (163)..(318): NCBI GI NO: 7459607 NR Description: hypothetical protein At2g41170
  misc_feature (70)..(110): NCBI GI NO: 7459607 NR Description: hypothetical protein At2g41170
MRLFLASLCQQLVLSLLGFLAGLRLLSGVAAASAATETMPLMPSFKRKRASATVENAEEAAATAGGGETSVLDLPELAIDCILEKLRPAELRSMAAVCRSMRERCRGDHLWERHMTNRWGRVLGRAARDEWRTHLASASESRAAGGGGGGGKRRRWLAALSCVCPVVSWMRPRADGGKSSAPVLDDSIMSWYLSVESGKFWFPAQVYNREHGHVGFMMSCYDAALSYDLHTDTFRARYPPHGRRTVVLEDGVQWDRVRAPPVDTLAHYLHTSDCLHELRPGDHIEIQWRRNKEFPYGWWYGVVGHLESCDGSEHFCRCHLSDTVVLEFNQYTPGSRWRQAVGETEGA

SEQ ID NO: 39491 - protein, 309 aa, Zea mays subsp. mays
  peptide (1)..(309): Ceres Seq. ID no. 12363065
  misc_feature (1)..(309): NCBI GI NO: 34903372 NR Description: unnamed protein product
  misc_feature (1)..(303): NCBI GI NO: 30685347 NR Description: F-box protein family [Arabidopsis thaliana]
  misc_feature (32)..(303): NCBI GI NO: 30688559 NR Description: F-box protein family [Arabidopsis thaliana]
  misc_feature (29)..(258): NCBI GI NO: 15225802 NR Description: unknown protein; protein id: At2g26850.1
  misc_feature (284)..(303): NCBI GI NO: 15225802 NR Description: unknown protein; protein id: At2g26850.1
  misc_feature (1)..(258): NCBI GI NO: 34909060 NR Description: P0702B09.33
  misc_feature (32)..(259): NCBI GI NO: 7487431 NR Description: hypothetical protein At2g32560
  misc_feature (125)..(280): NCBI GI NO: 7459607 NR Description: hypothetical protein At2g41170
  misc_feature (32)..(72): NCBI GI NO: 7459607 NR Description: hypothetical protein At2g41170
MPLMPSFKRKRASATVENAEEAAATAGGGETSVLDLPELAIDCILEKLRPAELRSMAAVCRSMRERCRGDHLWERHMTNRWGRVLGRAARDEWRTHLASASESRAAGGGGGGGKRRRWLAALSCVCPVVSWMRPRADGGKSSAPVLDDSIMSWYLSVESGKFWFPAQVYNREHGHVGFMMSCYDAALSYDLHTDTFRARYPPHGRRTVVLEDGVQWDRVRAPPVDTLAHYLHTSDCLHELRPGDHIEIQWRRNKEFPYGWWYGVVGHLESCDGSEHFCRCHLSDTVVLEFNQYTPGSRWRQAVGETEGA

SEQ ID NO: 39492 - DNA, 418 bp, Zea mays subsp. mays
  misc_feature (1)..(418): Ceres Seq. ID no. 5754401
cccacagtgagcgaggttcccctcccgactcggtgatggcggctacggtggcggcggcggctacggtggtggtggcggcggctacggcggtggcaaccgtggcggcggctacggcaactccgacgggaactggaggaactgagcggtggggcccgcgcggccaagttatcctgttcgctaccgtgttgtttaccctagtccagagggtttatcttcgttcgtctcatgtttgttgttgcccatctgtgtttttgattgcaaggtcgctttgtgtcagttgttagtgctgtgttcatcctcggctccagcagacccatgcatcaaccagcatggactgcggatcgatggatgctgttacccccgtcaggctttatcctaagttaatcttcaaggaaaaaatggtgcttcttggtgctgc

SEQ ID NO: 39493 - protein, 93 aa, Zea mays subsp. mays
  peptide (1)..(93): Ceres Seq. ID no. 5754402
  misc_feature (13)..(78): NCBI GI NO: 18103931 NR Description: glycine rich RNA binding protein [Oryza sativa]
HSERGSPPDSVMAATVAAAATVVVAAATAVATVAAATATPTGTGGTERWGPRGQVILFATVLFTLVQRVYLRSSHVCCCPSVFLIARSLCVSC

SEQ ID NO: 39494 - protein, 82 aa, Zea mays subsp. mays
  peptide (1)..(82): Ceres Seq. ID no. 5754403
  misc_feature (2)..(67): NCBI GI NO: 18103931 NR Description: glycine rich RNA binding protein [Oryza sativa]
MAATVAAAATVVVAAATAVATVAAATATPTGTGGTERWGPRGQVILFATVLFTLVQRVYLRSSHVCCCPSVFLIARSLCVSC

SEQ ID NO: 39495 - DNA, 991 bp, Zea mays subsp. mays
  misc_feature (1)..(991): Ceres Seq. ID no. 12359848
  misc_feature (975)..(975): n is a, c, t, g, unknown, or other
gtccgcccctgcggtgcgggtgctttctccagcgacagcgacagcgagaggggaggggaaccagcaagctcctcctcctctacccctcgcctcgtccgcgccagatctatctgtcccttcctcttgtagttgcaggcagacgcgccatgcggatgcgggtgcttcccgcgtcctggtcatcttcctccgccaagcatagcagcggcagctccgagtcgcaggagcacccttcttcctcctctgctacggccgcggtgtacctcaacatctacgacatctcccccctcaaccactacctctactggttcggactcggcatcttccactccgggatccaagtccatggcatggagtatggctttggagctcatgaataccccaccagcggagtcttccaagtagaacccaaaagctgccccgggtttatcttcaggcgctctgtgtgtgtgggtgtaactcacatgtcccgttcccaagtccgcacttccatagaggatctcgccgaggattatcatggggacacttatcatttgattctcaagaactgcaatcatttcacagcagatgtctgcgagcgtttgaccgggaagccagtacctggatgggtgaatcgactcgccagattaggttccttcttcaattgtgtattgcctgacagcatcaaggtttcagcagtcagagatgtaaatgcacatccagatttttctgatgatggcttggggtccaatgcctcgatccttgagggaagtgatgacgatgatttagaccaactcctaagaacacctaacagcgacactgtgtcttcaagggacaagacattaactcctggcagggatagtctctaattgttctcctttgatagcaaaatagaggcaagtgctttgatgttcacgtctcatggtggtatggggttggcctgatcatatcatcatctgctgtcaaaatttggtggcgcgctagtctggggtgatgaangattgtttgatattgt

SEQ ID NO: 39496 - protein, 280 aa, Zea mays subsp. mays
  peptide (1)..(280): Ceres Seq. ID no. 12359849
  misc_feature (85)..(206): Pfam Name: DUF862 Pfam Description: Eukaryotic protein of unknown function
  misc_feature (78)..(258): NCBI GI NO: 38346173 NR Description: OSJNBa0079A21.20
  misc_feature (51)..(280): NCBI GI NO: 15238059 NR Description: putative protein; protein id: At5g47310.1
  misc_feature (66)..(280): NCBI GI NO: 30684058 NR Description: expressed protein [Arabidopsis thaliana]
  misc_feature (106)..(280): NCBI GI NO: 7488100 NR Description: probable EREBP-4 - Arabidopsis thaliana
  misc_feature (66)..(112): NCBI GI NO: 7488100 NR Description: probable EREBP-4 - Arabidopsis thaliana
  misc_feature (83)..(225): NCBI GI NO: 18401869 NR Description: expressed protein; protein id: At1g47740
  misc_feature (83)..(225): NCBI GI NO: 21593644 NR Description: unknown [Arabidopsis thaliana]
  misc_feature (85)..(230): NCBI GI NO: 18420889 NR Description: putative protein; protein id: At5g25170
  misc_feature (83)..(225): NCBI GI NO: 9802596 NR Description: T2E6.19 [Arabidopsis thaliana]
  misc_feature (85)..(267): NCBI GI NO: 18412886 NR Description: expressed protein; protein id: At1g80690
PPLRCGCFLQRQRQREGRGTSKLLLLYPSPRPRQIYLSLPLVVAGRRAMRMRVLPASWSSSSAKHSSGSSESQEHPSSSSATAAVYLNIYDISPLNHYLYWFGLGIFHSGIQVHGMEYGFGAHEYPTSGVFQVEPKSCPGFIFRRSVCVGVTHMSRSQVRTSIEDLAEDYHGDTYHLILKNCNHFTADVCERLTGKPVPGWVNRLARLGSFFNCVLPDSIKVSAVRDVNAHPDFSDDGLGSNASILEGSDDDDLDQLLRTPNSDTVSSRDKTLTPGRDSL

SEQ ID NO: 39497 - protein, 232 aa, Zea mays subsp. mays
  peptide (1)..(232): Ceres Seq. ID no. 12359850
  misc_feature (37)..(158): Pfam Name: DUF862 Pfam Description: Eukaryotic protein of unknown function
  misc_feature (30)..(210): NCBI GI NO: 38346173 NR Description: OSJNBa0079A21.20
  misc_feature (3)..(232): NCBI GI NO: 15238059 NR Description: putative protein; protein id: At5g47310.1
  misc_feature (18)..(232): NCBI GI NO: 30684058 NR Description: expressed protein [Arabidopsis thaliana]
  misc_feature (58)..(232): NCBI GI NO: 7488100 NR Description: probable EREBP-4 - Arabidopsis thaliana
  misc_feature (18)..(64): NCBI GI NO: 7488100 NR Description: probable EREBP-4 - Arabidopsis thaliana
  misc_feature (35)..(177): NCBI GI NO: 18401869 NR Description: expressed protein; protein id: At1g47740
  misc_feature (35)..(177): NCBI GI NO: 21593644 NR Description: unknown [Arabidopsis thaliana]
  misc_feature (37)..(182): NCBI GI NO: 18420889 NR Description: putative protein; protein id: At5g25170
  misc_feature (35)..(177): NCBI GI NO: 9802596 NR Description: T2E6.19 [Arabidopsis thaliana]
  misc_feature (37)..(219): NCBI GI NO: 18412886 NR Description: expressed protein; protein id: At1g80690
MRMRVLPASWSSSSAKHSSGSSESQEHPSSSSATAAVYLNIYDISPLNHYLYWFGLGIFHSGIQVHGMEYGFGAHEYPTSGVFQVEPKSCPGFIFRRSVCVGVTHMSRSQVRTSIEDLAEDYHGDTYHLILKNCNHFTADVCERLTGKPVPGWVNRLARLGSFFNCVLPDSIKVSAVRDVNAHPDFSDDGLGSNASILEGSDDDDLDQLLRTPNSDTVSSRDKTLTPGRDSL

SEQ ID NO: 39498 - protein, 230 aa, Zea mays subsp. mays
  peptide (1)..(230): Ceres Seq. ID no. 12359851
  misc_feature (35)..(156): Pfam Name: DUF862 Pfam Description: Eukaryotic protein of unknown function
  misc_feature (28)..(208): NCBI GI NO: 38346173 NR Description: OSJNBa0079A21.20
  misc_feature (1)..(230): NCBI GI NO: 15238059 NR Description: putative protein; protein id: At5g47310.1
  misc_feature (16)..(230): NCBI GI NO: 30684058 NR Description: expressed protein [Arabidopsis thaliana]
  misc_feature (56)..(230): NCBI GI NO: 7488100 NR Description: probable EREBP-4 - Arabidopsis thaliana
  misc_feature (16)..(62): NCBI GI NO: 7488100 NR Description: probable EREBP-4 - Arabidopsis thaliana
  misc_feature (33)..(175): NCBI GI NO: 18401869 NR Description: expressed protein; protein id: At1g47740
  misc_feature (33)..(175): NCBI GI NO: 21593644 NR Description: unknown [Arabidopsis thaliana]
  misc_feature (35)..(180): NCBI GI NO: 18420889 NR Description: putative protein; protein id: At5g25170
  misc_feature (33)..(175): NCBI GI NO: 9802596 NR Description: T2E6.19 [Arabidopsis thaliana]
  misc_feature (35)..(217): NCBI GI NO: 18412886 NR Description: expressed protein; protein id: At1g80690
MRVLPASWSSSSAKHSSGSSESQEHPSSSSATAAVYLNIYDISPLNHYLYWFGLGIFHSGIQVHGMEYGFGAHEYPTSGVFQVEPKSCPGFIFRRSVCVGVTHMSRSQVRTSIEDLAEDYHGDTYHLILKNCNHFTADVCERLTGKPVPGWVNRLARLGSFFNCVLPDSIKVSAVRDVNAHPDFSDDGLGSNASILEGSDDDDLDQLLRTPNSDTVSSRDKTLTPGRDSL

SEQ ID NO: 39499 - DNA, 495 bp, Zea mays subsp. mays
  misc_feature (1)..(495): Ceres Seq. ID no. 11414813
atctctcactccctcgctccgtctaccagtaccaccacgtccctcctcgtcgacgatctcgtagcggcggcgcacatggcgagcgacggcgcggcggctacgccagcgaaggttaccccaaagaaggccaatctcctcgacccgcactccatcaagcaccttctcgacgagaccatctccgaggtcgtgaagagtaagggctacaccgaggacacgcggctgggcaactggaagctggggatcggagccgccgtgattgctgtcgccctcctcgctcagttttaccccaagaagttcccgcagaaccgcgatttcctccttggctgcatcgccctgyatgtggtgctgaatgtggtgctgctgatccttagctacaccaaggagaaggatgccatcctattcacgcaccctcctatgaatacttgccatcaggtgccaaggagaagatgcgtttgtcttcaatattaggctgctgcacaatgacagaaagagcat

SEQ ID NO: 39500 - protein, 155 aa, Zea mays subsp. mays
  peptide (1)..(155): Ceres Seq. ID no. 11414814
  misc_feature (26)..(138): NCBI GI NO: 38344552 NR Description: OSJNBa0027P08.20
  misc_feature (41)..(138): NCBI GI NO: 30688096 NR Description: expressed protein [Arabidopsis thaliana]
  misc_feature (41)..(137): NCBI GI NO: 34365647 NR Description: At4g04200 [Arabidopsis thaliana]
  misc_feature (41)..(112): NCBI GI NO: 25408649 NR Description: hypothetical protein At2g39960
  misc_feature (113)..(113): Xaa is any aa, unknown or other
ISHSLAPSTSTTTSLLVDDLVAAAHMASDGAAATPAKVTPKKANLLDPHSIKHLLDETISEVVKSKGYTEDTRLGNWKLGIGAAVIAVALLAQFYPKKFPQNRDFLLGCIALXVVLNVVLLILSYTKEKDAILFTHPPMNTCHQVPRRRCVCLQY

SEQ ID NO: 39501 - protein, 130 aa, Zea mays subsp. mays
  peptide (1)..(130): Ceres Seq. ID no. 11414815
  misc_feature (1)..(113): NCBI GI NO: 38344552 NR Description: OSJNBa0027P08.20
  misc_feature (16)..(113): NCBI GI NO: 30688096 NR Description: expressed protein [Arabidopsis thaliana]
  misc_feature (16)..(112): NCBI GI NO: 34365647 NR Description: At4g04200 [Arabidopsis thaliana]
  misc_feature (16)..(87): NCBI GI NO: 25408649 NR Description: hypothetical protein At2g39960
  misc_feature (88)..(88): Xaa is any aa, unknown or other
MASDGAAATPAKVTPKKANLLDPHSIKHLLDETISEVVKSKGYTEDTRLGNWKLGIGAAVIAVALLAQFYPKKFPQNRDFLLGCIALXVVLNVVLLILSYTKEKDAILFTHPPMNTCHQVPRRRCVCLQY

SEQ ID NO: 39502 - DNA, 1343 bp, Zea mays subsp. mays
  misc_feature (1)..(1343): Ceres Seq. ID no. 13491323
aaaaaaacccaaacgtccatctcatcgacaccccctccgatctccttatcccttcccgtcgcataaacccccgccgccgtgacctcgcagcgaccctgccctcgttctaggctttcactgcaggcatcgcgtctccagtagcagggcaagagaaaggagaggatggcgtcgccgataccgcgcgagtgggtcgggctgcagcagtttccggcggctacacagaccaagctgcacgaactcctcggcaaactcaaggaggaggatgtgagcacattaacaattctggtgatggggaaaggtggagtggggaagtcatccactgttaactccatcgttggggagagggttgcctctgtcagcgctttccagtctgagggtctgagaccaatgatgtgctcgcgcacaagggcagggttcactttgaacattatcgacactcctgggcttattgaaggtggatacattaatgagcaggccgttgacatcattaagagatttcttctaggcaagactatcgatgttctcctgtacgtggatcgtttggatgcgtatagaatggatacactggatgaacaggttataagagccatcaccaattcatttggaaaagatatttggcgaagatcattggttgtgttgacccatgctcaactctcaccacctgatggaatcgactataatgatttctttacaagaagatcagaggcacttttgcgatacatccactcaggagcaggaatcaacaaacgagaatatggggatttccccttgccaatagcattggtggagaacagtggaaggtgcaagactaatgagcatggggagaagatacttccggacggaactctgtgggttccaaacctgatgaaagaaattactgttgtcatctcaaacgggagcagtcccattcatgttgatcagaagttaattgatggtccaaaccctaacaatcgccgaaagttgttcataccacttatccttgctgtggagtacttcttggtggtaaaaggaatccggagggcgatccatgcagatatcgcaaacgggaaggtagatgactgggagcagcgttaccgggacttggtgggaagcagggacctcgtagagcagaaaggttctacctcccggaaccgcaaagcctaagttggtgtaccagaaaggattctattcgtgttgagacccacccactcgatctgctgctccttttcctaaatctgtgctgggagctttatagagttcgctggtactacttgaaaaaaaatgctcctgttgcagttgataagattatgtttcccattttatgacgattggccgtcttcgcaattttgaagatgttatcgaat

SEQ ID NO: 39503 - protein, 326 aa, Zea mays subsp. mays
  peptide (1)..(326): Ceres Seq. ID no. 13491324
  misc_feature (38)..(235): Pfam Name: Pfam Description:  AIG1 family
  misc_feature (1)..(326): NCBI GI NO: 7259224 NR Description: Toc34-2 protein [Zea mays]
  misc_feature (1)..(326): NCBI GI NO: 6689637 NR Description: Toc34-1 protein [Zea mays]
  misc_feature (7)..(311): NCBI GI NO: 15238381 NR Description: GTP-binding protein (gb|AAD09203.1)
  misc_feature (7)..(311): NCBI GI NO: 25091410 NR Description: Translocase of chloroplast 34
  misc_feature (7)..(311): NCBI GI NO: 21594231 NR Description: GTP-binding protein [Arabidopsis thaliana]
  misc_feature (7)..(311): NCBI GI NO: 25091388 NR Description: Translocase of chloroplast 34
  misc_feature (7)..(311): NCBI GI NO: 1076522 NR Description: chloroplast import-associated protein IAP36
  misc_feature (7)..(296): NCBI GI NO: 33391904 NR Description: TOC33 [Brassica napus]
  misc_feature (7)..(296): NCBI GI NO: 32765535 NR Description: TOC33 [Brassica napus]
  misc_feature (7)..(296): NCBI GI NO: 15217705 NR Description: GTP-binding protein -related
MASPIPREWVGLQQFPAATQTKLHELLGKLKEEDVSTLTILVMGKGGVGKSSTVNSIVGERVASVSAFQSEGLRPMMCSRTRAGFTLNIIDTPGLIEGGYINEQAVDIIKRFLLGKTIDVLLYVDRLDAYRMDTLDEQVIRAITNSFGKDIWRRSLVVLTHAQLSPPDGIDYNDFFTRRSEALLRYIHSGAGINKREYGDFPLPIALVENSGRCKTNEHGEKILPDGTLWVPNLMKEITVVISNGSSPIHVDQKLIDGPNPNNRRKLFIPLILAVEYFLVVKGIRRAIHADIANGKVDDWEQRYRDLVGSRDLVEQKGSTSRNRKA

SEQ ID NO: 39504 - protein, 284 aa, Zea mays subsp. mays
  peptide (1)..(284): Ceres Seq. ID no. 13491325
  misc_feature (1)..(193): Pfam Name: Pfam Description:  AIG1 family
  misc_feature (1)..(284): NCBI GI NO: 7259224 NR Description: Toc34-2 protein [Zea mays]
  misc_feature (1)..(284): NCBI GI NO: 6689637 NR Description: Toc34-1 protein [Zea mays]
  misc_feature (1)..(269): NCBI GI NO: 15238381 NR Description: GTP-binding protein (gb|AAD09203.1)
  misc_feature (1)..(269): NCBI GI NO: 25091410 NR Description: Translocase of chloroplast 34
  misc_feature (1)..(269): NCBI GI NO: 21594231 NR Description: GTP-binding protein [Arabidopsis thaliana]
  misc_feature (1)..(269): NCBI GI NO: 25091388 NR Description: Translocase of chloroplast 34
  misc_feature (1)..(269): NCBI GI NO: 1076522 NR Description: chloroplast import-associated protein IAP36
  misc_feature (1)..(254): NCBI GI NO: 33391904 NR Description: TOC33 [Brassica napus]
  misc_feature (1)..(254): NCBI GI NO: 32765535 NR Description: TOC33 [Brassica napus]
  misc_feature (1)..(254): NCBI GI NO: 15217705 NR Description: GTP-binding protein -related
MGKGGVGKSSTVNSIVGERVASVSAFQSEGLRPMMCSRTRAGFTLNIIDTPGLIEGGYINEQAVDIIKRFLLGKTIDVLLYVDRLDAYRMDTLDEQVIRAITNSFGKDIWRRSLVVLTHAQLSPPDGIDYNDFFTRRSEALLRYIHSGAGINKREYGDFPLPIALVENSGRCKTNEHGEKILPDGTLWVPNLMKEITVVISNGSSPIHVDQKLIDGPNPNNRRKLFIPLILAVEYFLVVKGIRRAIHADIANGKVDDWEQRYRDLVGSRDLVEQKGSTSRNRKA

SEQ ID NO: 39505 - protein, 251 aa, Zea mays subsp. mays
  peptide (1)..(251): Ceres Seq. ID no. 13491326
  misc_feature (1)..(160): Pfam Name: Pfam Description:  AIG1 family
  misc_feature (1)..(251): NCBI GI NO: 7259224 NR Description: Toc34-2 protein [Zea mays]
  misc_feature (1)..(251): NCBI GI NO: 6689637 NR Description: Toc34-1 protein [Zea mays]
  misc_feature (1)..(236): NCBI GI NO: 15238381 NR Description: GTP-binding protein (gb|AAD09203.1)
  misc_feature (1)..(236): NCBI GI NO: 25091410 NR Description: Translocase of chloroplast 34
  misc_feature (1)..(236): NCBI GI NO: 21594231 NR Description: GTP-binding protein [Arabidopsis thaliana]
  misc_feature (1)..(236): NCBI GI NO: 25091388 NR Description: Translocase of chloroplast 34
  misc_feature (1)..(236): NCBI GI NO: 1076522 NR Description: chloroplast import-associated protein IAP36
  misc_feature (1)..(221): NCBI GI NO: 33391904 NR Description: TOC33 [Brassica napus]
  misc_feature (1)..(221): NCBI GI NO: 32765535 NR Description: TOC33 [Brassica napus]
  misc_feature (1)..(221): NCBI GI NO: 15217705 NR Description: GTP-binding protein -related
MMCSRTRAGFTLNIIDTPGLIEGGYINEQAVDIIKRFLLGKTIDVLLYVDRLDAYRMDTLDEQVIRAITNSFGKDIWRRSLVVLTHAQLSPPDGIDYNDFFTRRSEALLRYIHSGAGINKREYGDFPLPIALVENSGRCKTNEHGEKILPDGTLWVPNLMKEITVVISNGSSPIHVDQKLIDGPNPNNRRKLFIPLILAVEYFLVVKGIRRAIHADIANGKVDDWEQRYRDLVGSRDLVEQKGSTSRNRKA

SEQ ID NO: 39506 - DNA, 1241 bp, Zea mays subsp. mays
  misc_feature (1)..(1241): Ceres Seq. ID no. 12417443
aaagcagcacgggcaacacgccgagcaaaacagcgaaatcctcaaatccccaccccggctggtgacggcgccgcccccgctgctgcctgcggtcctgcttctgctaatagtaataggtattcagattcgagcagagcactcccgtgctgcaggcaagggaggacgcaccaccatggattgggatgctccggcattgacgagcttcgtcgccgacttgtccttccgccacctctgctgctacggggccggaatcgcagggaacgccttcgccttcgtgctcttcgtctccccgctccccacattcaagaggatcgtccgcaacggatccacggagcagttctcgtgcacgccgtacatctactcgctgctcaactgcctcatctgcatgtggtacggcctccccttcgtctcctacggcgtcgtcctcgtcgccaccgtcaactccatcggcgccgtgttccagctcgcctacaccgccgtgttcatcgccttcgccgacgccaagcagaggctcaaggtctctgctctcctggccgctgtcttcctggtgttcggactgattgtgtttgttagtctggctttgttggatcacaaagcccggcaggtgttcgtcggatatctcagcgtcgcgtccctcgtatgcatgttcgcgtcccccatgtcaatcgtcaatctggtcatccggacgaagagcgtggaatacatgcccttctacttgtcattatccatgtttctgatgagtgcatccttcgtcatatacggagtgctgcttggtgatggcttcatatatattccaaatgcattggaaccatattgggtatcgtacagttgctgctgtatgcctacatcagaaagggatcaagcgaggaagccaagctgcccttactaatcacacatacatgagcatgccaaaaggaaaaaaaaacaaggttcgctgataggctttcccgaaatcctgtctctggtcaaacttccaggtcgatgtacttgtccgaattgttttgctcctgtgaaaaaagcatgccgttctttcgttttgtttacacgcgacggggatcgtagtttcgctgtatattccatggtagatgctccaagttgttgctggagtcattcgtttatgagtgagcgaagctttgtatataatatagtagtagtaatgtggttccgtgaacttcatcaacagagaggaccagctgtatacacaaagaaaagcaataaaaggatgttactatatcattacc

SEQ ID NO: 39507 - protein, 295 aa, Zea mays subsp. mays
  peptide (1)..(295): Ceres Seq. ID no. 12417444
  misc_feature (82)..(168): Pfam Name: Pfam Description:  MtN3/saliva family
  misc_feature (67)..(268): NCBI GI NO: 18400517 NR Description: expressed protein; protein id: At3g14770
  misc_feature (73)..(250): NCBI GI NO: 34911484 NR Description: putative MtN3
  misc_feature (76)..(266): NCBI GI NO: 34907420 NR Description: P0018C10.36
  misc_feature (83)..(266): NCBI GI NO: 18394992 NR Description: expressed protein; protein id: At1g21460
  misc_feature (83)..(266): NCBI GI NO: 34146818 NR Description: At5g53190 [Arabidopsis thaliana]
  misc_feature (83)..(290): NCBI GI NO: 34912454 NR Description: P0681B11.31
  misc_feature (83)..(266): NCBI GI NO: 15238678 NR Description: MtN3 protein-like; protein id: At5g53190.1
  misc_feature (83)..(290): NCBI GI NO: 34912462 NR Description: MtN3-like protein
  misc_feature (83)..(268): NCBI GI NO: 18413388 NR Description: putative protein; protein id: At4g10850
  misc_feature (82)..(268): NCBI GI NO: 18405611 NR Description: Expressed protein; protein id: At3g28007
KQHGQHAEQNSEILKSPPRLVTAPPPLLPAVLLLLIVIGIQIRAEHSRAAGKGGRTTMDWDAPALTSFVADLSFRHLCCYGAGIAGNAFAFVLFVSPLPTFKRIVRNGSTEQFSCTPYIYSLLNCLICMWYGLPFVSYGVVLVATVNSIGAVFQLAYTAVFIAFADAKQRLKVSALLAAVFLVFGLIVFVSLALLDHKARQVFVGYLSVASLVCMFASPMSIVNLVIRTKSVEYMPFYLSLSMFLMSASFVIYGVLLGDGFIYIPNALEPYWVSYSCCCMPTSERDQARKPSCPY

SEQ ID NO: 39508 - protein, 238 aa, Zea mays subsp. mays
  peptide (1)..(238): Ceres Seq. ID no. 12417445
  misc_feature (25)..(111): Pfam Name: Pfam Description:  MtN3/saliva family
  misc_feature (10)..(211): NCBI GI NO: 18400517 NR Description: expressed protein; protein id: At3g14770
  misc_feature (16)..(193): NCBI GI NO: 34911484 NR Description: putative MtN3
  misc_feature (19)..(209): NCBI GI NO: 34907420 NR Description: P0018C10.36
  misc_feature (26)..(209): NCBI GI NO: 18394992 NR Description: expressed protein; protein id: At1g21460
  misc_feature (26)..(209): NCBI GI NO: 34146818 NR Description: At5g53190 [Arabidopsis thaliana]
  misc_feature (26)..(233): NCBI GI NO: 34912454 NR Description: P0681B11.31
  misc_feature (26)..(209): NCBI GI NO: 15238678 NR Description: MtN3 protein-like; protein id: At5g53190.1
  misc_feature (26)..(233): NCBI GI NO: 34912462 NR Description: MtN3-like protein
  misc_feature (26)..(211): NCBI GI NO: 18413388 NR Description: putative protein; protein id: At4g10850
  misc_feature (25)..(211): NCBI GI NO: 18405611 NR Description: Expressed protein; protein id: At3g28007
MDWDAPALTSFVADLSFRHLCCYGAGIAGNAFAFVLFVSPLPTFKRIVRNGSTEQFSCTPYIYSLLNCLICMWYGLPFVSYGVVLVATVNSIGAVFQLAYTAVFIAFADAKQRLKVSALLAAVFLVFGLIVFVSLALLDHKARQVFVGYLSVASLVCMFASPMSIVNLVIRTKSVEYMPFYLSLSMFLMSASFVIYGVLLGDGFIYIPNALEPYWVSYSCCCMPTSERDQARKPSCPY

SEQ ID NO: 39509 - protein, 190 aa, Zea mays subsp. mays
  peptide (1)..(190): Ceres Seq. ID no. 12417446
KAARATRRAKQRNPQIPTPAGDGAAPAAACGPASANSNRYSDSSRALPCCRQGRTHHHGLGCSGIDELRRRLVLPPPLLLRGRNRRERLRLRALRLPAPHIQEDRPQRIHGAVLVHAVHLLAAQLPHLHVVRPPLRLLRRRPRRHRQLHRRRVPARLHRRVHRLRRRQAEAQGLCSPGRCLPGVRTDCVC

SEQ ID NO: 39510 - DNA, 1163 bp, Zea mays subsp. mays
  misc_feature (1)..(1163): Ceres Seq. ID no. 12391908
  misc_feature (695)..(695): n is a, c, t, g, unknown, or other
  misc_feature (597)..(597): n is a, c, t, g, unknown, or other
  misc_feature (711)..(711): n is a, c, t, g, unknown, or other
  misc_feature (507)..(507): n is a, c, t, g, unknown, or other
acaggctcccagcagctcgattcgctcgcctagtcgccttctcgaattctcccgcaaacttgacgctgaagcctgcacgagaggacatggccatggccacgcgtgtcacggcagcagcggtcgtcctccgggttctctcgttgctgatcctgctgcgcacgggcacgtgcgccgacgactactcggcgttcgtgtacgcggggtgctcgcagggccgctacagcgccgattcgcagtacgcgtcgggggtggactccgtgctcacctcggtcgccagcagcgcgccgtacgccccctacgacaacttcacctcgccgaccgactcgtccgtggtcggcctctaccagtgccgctccgacctccccgcctccgtctgcagcggctgcgtccgctccgccatctccaggctctcctctctctgcgcctgggcggtcggcggcgcggtgcagctgcgggcctgcttcgtgcgatacgggaacgactcgttcctggggaagcaggacacgncggtgctgttcaagaaatgcggcggcacgcccggggacgccggcggggtggccatgagggactcggcgctcggcgcgctcgtggccgcgncggcgccggcgggcggagggttccgcaccggagggtccggcgccgtgcaggccatgtcgcagtgcgtgggggacctcggcgccaagccctgctccgantgcgtctcggccgcgnccgcacagctcaaggccgggtgcggttacgccacggccggcgaggtctacctcggcaagtgctacgcgcgcttctgggccaacggtggcggaggtttcagtagcagcagcagcagcgccggccggcatggatttcgtctagtccacgtggtcgccgccggtttattcttcccctccttggcttatgcctcacttgccatataggtattgttgcaccgtgcggtgatgttgagactggagcagtagctatgctgtgttttgtcatcatgcttgagatttacagctcagtttttgctcttgtgctcaaactcaaatggtgttcatgtagcttaactctgtctctttctttctcaagtcttataactgtaaatttcttacgtcgtatgcatgcaaactatgctaaatcatgtataagtaatctttttactacagcttaccaccattattaatctt

SEQ ID NO: 39511 - protein, 303 aa, Zea mays subsp. mays
  peptide (1)..(303): Ceres Seq. ID no. 12391909
  misc_feature (110)..(164): Pfam Name: Pfam Description:  Domain of unknown function DUF26
  misc_feature (51)..(303): NCBI GI NO: 30693130 NR Description: expressed protein [Arabidopsis thaliana]
  misc_feature (44)..(266): NCBI GI NO: 21554153 NR Description: unknown [Arabidopsis thaliana]
  misc_feature (44)..(266): NCBI GI NO: 18379273 NR Description: expressed protein; protein id: At2g01660
  misc_feature (44)..(266): NCBI GI NO: 25410919 NR Description: hypothetical protein At2g01660
  misc_feature (51)..(272): NCBI GI NO: 9757976 NR Description: contains similarity to secretoryprotein~gene_id:K12B20
  misc_feature (29)..(265): NCBI GI NO: 38567870 NR Description: OSJNBa0091D06.12
  misc_feature (36)..(280): NCBI GI NO: 21593606 NR Description: unknown [Arabidopsis thaliana]
  misc_feature (36)..(280): NCBI GI NO: 18409653 NR Description: expressed protein; protein id: At1g70690
  misc_feature (36)..(280): NCBI GI NO: 25406066 NR Description: unknown protein F5A18.13
  misc_feature (63)..(274): NCBI GI NO: 15232412 NR Description: secretory protein - like; protein id: At3g60720.1
  misc_feature (169)..(169): Xaa is any aa, unknown or other
  misc_feature (199)..(199): Xaa is any aa, unknown or other
  misc_feature (231)..(231): Xaa is any aa, unknown or other
  misc_feature (237)..(237): Xaa is any aa, unknown or other
RLPAARFARLVAFSNSPANLTLKPAREDMAMATRVTAAAVVLRVLSLLILLRTGTCADDYSAFVYAGCSQGRYSADSQYASGVDSVLTSVASSAPYAPYDNFTSPTDSSVVGLYQCRSDLPASVCSGCVRSAISRLSSLCAWAVGGAVQLRACFVRYGNDSFLGKQDTXVLFKKCGGTPGDAGGVAMRDSALGALVAAXAPAGGGFRTGGSGAVQAMSQCVGDLGAKPCSXCVSAAXAQLKAGCGYATAGEVYLGKCYARFWANGGGGFSSSSSSAGRHGFRLVHVVAAGLFFPSLAYASLAI

SEQ ID NO: 39512 - protein, 275 aa, Zea mays subsp. mays
  peptide (1)..(275): Ceres Seq. ID no. 12391910
  misc_feature (82)..(136): Pfam Name: Pfam Description:  Domain of unknown function DUF26
  misc_feature (23)..(275): NCBI GI NO: 30693130 NR Description: expressed protein [Arabidopsis thaliana]
  misc_feature (16)..(238): NCBI GI NO: 21554153 NR Description: unknown [Arabidopsis thaliana]
  misc_feature (16)..(238): NCBI GI NO: 18379273 NR Description: expressed protein; protein id: At2g01660
  misc_feature (16)..(238): NCBI GI NO: 25410919 NR Description: hypothetical protein At2g01660
  misc_feature (23)..(244): NCBI GI NO: 9757976 NR Description: contains similarity to secretoryprotein~gene_id:K12B20
  misc_feature (1)..(237): NCBI GI NO: 38567870 NR Description: OSJNBa0091D06.12
  misc_feature (8)..(252): NCBI GI NO: 21593606 NR Description: unknown [Arabidopsis thaliana]
  misc_feature (8)..(252): NCBI GI NO: 18409653 NR Description: expressed protein; protein id: At1g70690
  misc_feature (8)..(252): NCBI GI NO: 25406066 NR Description: unknown protein F5A18.13
  misc_feature (35)..(246): NCBI GI NO: 15232412 NR Description: secretory protein - like; protein id: At3g60720.1
  misc_feature (141)..(141): Xaa is any aa, unknown or other
  misc_feature (171)..(171): Xaa is any aa, unknown or other
  misc_feature (203)..(203): Xaa is any aa, unknown or other
  misc_feature (209)..(209): Xaa is any aa, unknown or other
MAMATRVTAAAVVLRVLSLLILLRTGTCADDYSAFVYAGCSQGRYSADSQYASGVDSVLTSVASSAPYAPYDNFTSPTDSSVVGLYQCRSDLPASVCSGCVRSAISRLSSLCAWAVGGAVQLRACFVRYGNDSFLGKQDTXVLFKKCGGTPGDAGGVAMRDSALGALVAAXAPAGGGFRTGGSGAVQAMSQCVGDLGAKPCSXCVSAAXAQLKAGCGYATAGEVYLGKCYARFWANGGGGFSSSSSSAGRHGFRLVHVVAAGLFFPSLAYASLAI

SEQ ID NO: 39513 - protein, 273 aa, Zea mays subsp. mays
  peptide (1)..(273): Ceres Seq. ID no. 12391911
  misc_feature (80)..(134): Pfam Name: Pfam Description:  Domain of unknown function DUF26
  misc_feature (21)..(273): NCBI GI NO: 30693130 NR Description: expressed protein [Arabidopsis thaliana]
  misc_feature (14)..(236): NCBI GI NO: 21554153 NR Description: unknown [Arabidopsis thaliana]
  misc_feature (14)..(236): NCBI GI NO: 18379273 NR Description: expressed protein; protein id: At2g01660
  misc_feature (14)..(236): NCBI GI NO: 25410919 NR Description: hypothetical protein At2g01660
  misc_feature (21)..(242): NCBI GI NO: 9757976 NR Description: contains similarity to secretoryprotein~gene_id:K12B20
  misc_feature (1)..(235): NCBI GI NO: 38567870 NR Description: OSJNBa0091D06.12
  misc_feature (6)..(250): NCBI GI NO: 21593606 NR Description: unknown [Arabidopsis thaliana]
  misc_feature (6)..(250): NCBI GI NO: 18409653 NR Description: expressed protein; protein id: At1g70690
  misc_feature (6)..(250): NCBI GI NO: 25406066 NR Description: unknown protein F5A18.13
  misc_feature (33)..(244): NCBI GI NO: 15232412 NR Description: secretory protein - like; protein id: At3g60720.1
  misc_feature (139)..(139): Xaa is any aa, unknown or other
  misc_feature (169)..(169): Xaa is any aa, unknown or other
  misc_feature (201)..(201): Xaa is any aa, unknown or other
  misc_feature (207)..(207): Xaa is any aa, unknown or other
MATRVTAAAVVLRVLSLLILLRTGTCADDYSAFVYAGCSQGRYSADSQYASGVDSVLTSVASSAPYAPYDNFTSPTDSSVVGLYQCRSDLPASVCSGCVRSAISRLSSLCAWAVGGAVQLRACFVRYGNDSFLGKQDTXVLFKKCGGTPGDAGGVAMRDSALGALVAAXAPAGGGFRTGGSGAVQAMSQCVGDLGAKPCSXCVSAAXAQLKAGCGYATAGEVYLGKCYARFWANGGGGFSSSSSSAGRHGFRLVHVVAAGLFFPSLAYASLAI

SEQ ID NO: 39514 - DNA, 1268 bp, Zea mays subsp. mays
  misc_feature (1)..(1268): Ceres Seq. ID no. 12361287
gcacgagaccattacctagaacatcctaatcaaaaaattaaaccatcgaacattctccttggcgaaggctatcatgcaaaattgtccgactttggacttgctaagcttggtcctgtaggcgacaagactcatgtgacaacacgcgttatggggacacatggttattgtgctcctgaatatgccttagctggacagctgacagtgaagtctgacatctatagttttggcgtcgttttccttgagctaattacaggtcgaagaccacaagacactgatcggcctcctgaggaacaagacctagttgcatgggctcgtccattgttcaaagaccaaaagaagtttcgcaagatggctgatccttcgttgtgtggccgcttcccaaagaggggtttattccaggcactagctattgcagcaatgtgtttgcaggagaaggcaaaaagccgacctcccatgagggaagttgccgcagctctctcttatttagcatcacaagcatacgacaggaacaacaacgctgctgctcatcgtaatcgtgccgggccttcaacaccgagagttctggacgaccagattggccaggacacctgcacattggctaatcaacagggagctcagatgtccatgcatgtcgggacagaccacgccatgcctgaagtgaaggaagcttcctgtagtggttcacatcgtggaggacggggcagggttaccccgaatggcgctgatagggagcgtgcacttgcggacgccaacgtgtgggccgaggcttggaggcgccaggagaaggcaagcaagatgcgatagcgaccagagcctgactgcatgagttttgacatgtcactgcaaagatgcttactttgcatacattttgaaagagaactgtgggctacacgaagggttgttagaatagaaagaggaataatgcgcagtggaaatgtagagcttcaccagagtgagcgcttcgaagatttcaccggtgaatctacagtactcagacttgtttcagtgcgtacatggatttagcttactttatacacagacacttcacactccatagatgcatgtaatagctcaataataggcacagtagactacacaatctgtctgtagttcagcggttttggaaaattaataacataggatccgccgttaggttgcatgaaatgctatgatccgttggcgggtcttgcattctctattgggtcaacgtctacatatttgtacatcgttcaaccatttacatgatgaaatatacaattaagacttct

SEQ ID NO: 39515 - protein, 267 aa, Zea mays subsp. mays
  peptide (1)..(267): Ceres Seq. ID no. 12361288
  misc_feature (13)..(267): NCBI GI NO: 34902958 NR Description: putative protein kinase
  misc_feature (14)..(186): NCBI GI NO: 34907210 NR Description: putative serine/threonine kinase PBS1 protein
  misc_feature (232)..(261): NCBI GI NO: 34907210 NR Description: putative serine/threonine kinase PBS1 protein
  misc_feature (13)..(249): NCBI GI NO: 15238886 NR Description: protein kinase -like protein; protein id:At5g18610
  misc_feature (14)..(240): NCBI GI NO: 34395193 NR Description: putative protein serine/threonine kinase
  misc_feature (14)..(240): NCBI GI NO: 34899302 NR Description: putative protein serine/threonine kinase
  misc_feature (13)..(187): NCBI GI NO: 34394036 NR Description: putative protein serine/threonine kinase BNK1
  misc_feature (14)..(179): NCBI GI NO: 15240038 NR Description: protein kinase-like; protein id: At5g13160
  misc_feature (13)..(185): NCBI GI NO: 10445209 NR Description: protein serine/threonine kinase BNK1
  misc_feature (13)..(194): NCBI GI NO: 7573596 NR Description: protein kinase 1 [Populus nigra]
ARDHYLEHPNQKIKPSNILLGEGYHAKLSDFGLAKLGPVGDKTHVTTRVMGTHGYCAPEYALAGQLTVKSDIYSFGVVFLELITGRRPQDTDRPPEEQDLVAWARPLFKDQKKFRKMADPSLCGRFPKRGLFQALAIAAMCLQEKAKSRPPMREVAAALSYLASQAYDRNNNAAAHRNRAGPSTPRVLDDQIGQDTCTLANQQGAQMSMHVGTDHAMPEVKEASCSGSHRGGRGRVTPNGADRERALADANVWAEAWRRQEKASKMR

SEQ ID NO: 39516 - protein, 218 aa, Zea mays subsp. mays
  peptide (1)..(218): Ceres Seq. ID no. 12361289
  misc_feature (1)..(218): NCBI GI NO: 34902958 NR Description: putative protein kinase
  misc_feature (1)..(137): NCBI GI NO: 34907210 NR Description: putative serine/threonine kinase PBS1 protein
  misc_feature (183)..(212): NCBI GI NO: 34907210 NR Description: putative serine/threonine kinase PBS1 protein
  misc_feature (1)..(200): NCBI GI NO: 15238886 NR Description: protein kinase -like protein; protein id:At5g18610
  misc_feature (1)..(191): NCBI GI NO: 34395193 NR Description: putative protein serine/threonine kinase
  misc_feature (1)..(191): NCBI GI NO: 34899302 NR Description: putative protein serine/threonine kinase
  misc_feature (1)..(138): NCBI GI NO: 34394036 NR Description: putative protein serine/threonine kinase BNK1
  misc_feature (1)..(130): NCBI GI NO: 15240038 NR Description: protein kinase-like; protein id: At5g13160
  misc_feature (1)..(136): NCBI GI NO: 10445209 NR Description: protein serine/threonine kinase BNK1
  misc_feature (1)..(145): NCBI GI NO: 7573596 NR Description: protein kinase 1 [Populus nigra]
MGTHGYCAPEYALAGQLTVKSDIYSFGVVFLELITGRRPQDTDRPPEEQDLVAWARPLFKDQKKFRKMADPSLCGRFPKRGLFQALAIAAMCLQEKAKSRPPMREVAAALSYLASQAYDRNNNAAAHRNRAGPSTPRVLDDQIGQDTCTLANQQGAQMSMHVGTDHAMPEVKEASCSGSHRGGRGRVTPNGADRERALADANVWAEAWRRQEKASKMR

SEQ ID NO: 39517 - protein, 151 aa, Zea mays subsp. mays
  peptide (1)..(151): Ceres Seq. ID no. 12361290
  misc_feature (1)..(151): NCBI GI NO: 34902958 NR Description: putative protein kinase
  misc_feature (1)..(70): NCBI GI NO: 34907210 NR Description: putative serine/threonine kinase PBS1 protein
  misc_feature (116)..(145): NCBI GI NO: 34907210 NR Description: putative serine/threonine kinase PBS1 protein
  misc_feature (1)..(133): NCBI GI NO: 15238886 NR Description: protein kinase -like protein; protein id:At5g18610
  misc_feature (1)..(124): NCBI GI NO: 34395193 NR Description: putative protein serine/threonine kinase
  misc_feature (1)..(124): NCBI GI NO: 34899302 NR Description: putative protein serine/threonine kinase
  misc_feature (1)..(71): NCBI GI NO: 34394036 NR Description: putative protein serine/threonine kinase BNK1
  misc_feature (1)..(63): NCBI GI NO: 15240038 NR Description: protein kinase-like; protein id: At5g13160
  misc_feature (1)..(69): NCBI GI NO: 10445209 NR Description: protein serine/threonine kinase BNK1
  misc_feature (1)..(78): NCBI GI NO: 7573596 NR Description: protein kinase 1 [Populus nigra]
MADPSLCGRFPKRGLFQALAIAAMCLQEKAKSRPPMREVAAALSYLASQAYDRNNNAAAHRNRAGPSTPRVLDDQIGQDTCTLANQQGAQMSMHVGTDHAMPEVKEASCSGSHRGGRGRVTPNGADRERALADANVWAEAWRRQEKASKMR

SEQ ID NO: 39518 - DNA, 1045 bp, Zea mays subsp. mays
  misc_feature (1)..(1045): Ceres Seq. ID no. 15180507
acccaatgtcgcgtgcggccactagatttttcctgacgcggtgtctgctcccacttcccctcctctcccccaggtggcggcagcggcggcggggtagcatttgtgctacgagggcttttgcaatggcggcttcggggttcggcggcggcgaggcgttccggctctcggccgcaccaggggccggcttactgaagctgcacaagggcgacatcaccctctggtccgtcgactgcgccaccgacgccatcgttaatgctgctaatgagcgaatgttaggtggcggaggtgttgatggagctatacatcaagctgctggaccagagctagtgcaagcatgccggaaagttccagaggtcaaaccaggtaagcaggagcgtccaccccagccgccgccatgaagcgcaacccccgcgtcacgagctcccgccggaagtgccgcaaggcgcacttcacggccccgtcctccgtccgccgcgtgctcatgtccgcggcgctatcgacggagctccgccacaagtacaatgtgcgttccatcccgatccgcaaggacgacgaggtgcaggtcgtgcgcggcacctacaagggccgtgagggcaaagtggtgcaggtgtaccgccgtcgctgggtcatccacgtcgagcggatcacccgcgagaaggtgaacggctccaccgtgaacgtgggcatccacccttccaaggtgatggttacaaagctgaagcttgacaaggaccgcaaggctctcctcgaccgcaaggcccggggccgcgccgccgacaaggctaagggcaagtttactgccgacgacgtcgccgccgctgctggtggcgccgccgccactggcgcgtctctccaggagatcgactaggcgcttcgcggggatctgatggtggtcctaccgcctattactccttatcgctctagtttttgctatcaatgattatgtgctaggagttttatgttacttataaactgctttgagcctcgatgggagttgaacttaatgtggagtgtatctgagatatgaagaactcattatatggcc

SEQ ID NO: 39519 - protein, 157 aa, Zea mays subsp. mays
  peptide (1)..(157): Ceres Seq. ID no. 15180508
  misc_feature (49)..(82): Pfam Name: Pfam Description:  KOW motif
  misc_feature (1)..(157): NCBI GI NO: 34895672 NR Description: putative ribosomal protein L26
  misc_feature (1)..(119): NCBI GI NO: 3747050 NR Description: ribosomal protein L26 [Zea mays]
  misc_feature (1)..(139): NCBI GI NO: 15229631 NR Description: 60S ribosomal protein L26 (RPL26A)
  misc_feature (1)..(139): NCBI GI NO: 15240766 NR Description: 60S ribosomal protein L26 (RPL26B)
  misc_feature (1)..(139): NCBI GI NO: 3914740 NR Description: 60S ribosomal protein L26
  misc_feature (1)..(143): NCBI GI NO: 31207009 NR Description: ENSANGP00000022122 [Anopheles gambiae]
  misc_feature (1)..(139): NCBI GI NO: 4506621 NR Description: ribosomal protein L26; 60S ribosomal protein L26
  misc_feature (1)..(139): NCBI GI NO: 15293919 NR Description: ribosomal protein L26 [Ictalurus punctatus]
  misc_feature (1)..(134): NCBI GI NO: 7705813 NR Description: ribosomal protein L26-like 1
  misc_feature (1)..(139): NCBI GI NO: 34851284 NR Description: similar to 60S ribosomal protein L26
MKRNPRVTSSRRKCRKAHFTAPSSVRRVLMSAALSTELRHKYNVRSIPIRKDDEVQVVRGTYKGREGKVVQVYRRRWVIHVERITREKVNGSTVNVGIHPSKVMVTKLKLDKDRKALLDRKARGRAADKAKGKFTADDVAAAAGGAAATGASLQEID

SEQ ID NO: 39520 - protein, 131 aa, Zea mays subsp. mays
  peptide (1)..(131): Ceres Seq. ID no. 15180509
  misc_feature (18)..(98): NCBI GI NO: 38636779 NR Description: hypothetical protein
  misc_feature (36)..(121): NCBI GI NO: 30688336 NR Description: expressed protein [Arabidopsis thaliana]
  misc_feature (43)..(121): NCBI GI NO: 20196872 NR Description: expressed protein [Arabidopsis thaliana]
  misc_feature (36)..(131): NCBI GI NO: 23397339 NR Description: unknown protein [Arabidopsis thaliana]
  misc_feature (43)..(121): NCBI GI NO: 25348551 NR Description: hypothetical protein At2g40600
  misc_feature (63)..(121): NCBI GI NO: 21232613 NR Description: conserved hypothetical protein
  misc_feature (63)..(121): NCBI GI NO: 21244068 NR Description: conserved hypothetical protein
  misc_feature (63)..(121): NCBI GI NO: 25453353 NR Description: Hypothetical protein XAC3343
  misc_feature (63)..(127): NCBI GI NO: 17545053 NR Description: CONSERVED HYPOTHETICAL PROTEIN
  misc_feature (63)..(118): NCBI GI NO: 28899958 NR Description: hypothetical protein
PMSRAATRFFLTRCLLPLPLLSPRWRQRRRGSICATRAFAMAASGFGGGEAFRLSAAPGAGLLKLHKGDITLWSVDCATDAIVNAANERMLGGGGVDGAIHQAAGPELVQACRKVPEVKPGKQERPPQPPP

SEQ ID NO: 39521 - protein, 130 aa, Zea mays subsp. mays
  peptide (1)..(130): Ceres Seq. ID no. 15180510
  misc_feature (17)..(97): NCBI GI NO: 38636779 NR Description: hypothetical protein
  misc_feature (35)..(120): NCBI GI NO: 30688336 NR Description: expressed protein [Arabidopsis thaliana]
  misc_feature (42)..(120): NCBI GI NO: 20196872 NR Description: expressed protein [Arabidopsis thaliana]
  misc_feature (35)..(130): NCBI GI NO: 23397339 NR Description: unknown protein [Arabidopsis thaliana]
  misc_feature (42)..(120): NCBI GI NO: 25348551 NR Description: hypothetical protein At2g40600
  misc_feature (62)..(120): NCBI GI NO: 21232613 NR Description: conserved hypothetical protein
  misc_feature (62)..(120): NCBI GI NO: 21244068 NR Description: conserved hypothetical protein
  misc_feature (62)..(120): NCBI GI NO: 25453353 NR Description: Hypothetical protein XAC3343
  misc_feature (62)..(126): NCBI GI NO: 17545053 NR Description: CONSERVED HYPOTHETICAL PROTEIN
  misc_feature (62)..(117): NCBI GI NO: 28899958 NR Description: hypothetical protein
MSRAATRFFLTRCLLPLPLLSPRWRQRRRGSICATRAFAMAASGFGGGEAFRLSAAPGAGLLKLHKGDITLWSVDCATDAIVNAANERMLGGGGVDGAIHQAAGPELVQACRKVPEVKPGKQERPPQPPP

SEQ ID NO: 39522 - DNA, 1544 bp, Zea mays subsp. mays
  misc_feature (1)..(1544): Ceres Seq. ID no. 12435291
actttgtggcagacgaacagggaaagtgaaaaatcgctttcgcacaagtcgcggaacagaggcaagcgctgtgccacacagcgggagtcctccccgactccccgagagatttgctgcccagagccttcgaatcgggttcaatcccttcgatctttctgcccgccgccgccacgggactccagaagttgccttcgattcggccggggccgtggaagcggggatggggctcggagaggcggcggggcggctcctggcggccgtggactgggagcgcgaggcctaccctgcgtacgacgacttcctcgcgctccccgccttcgttctcttcttccctaccgtccgcttcctcctcgaccgcttcgtcttcaagtgggttgcaatgaggcttatacatgggcagggacatcagagagctaataatgaaacagaagaggcaaggaagaagataagaaaattcaaggaatcagcttggaaatgtgtttatttcctgtctggagagcttttatctttgtctgtcacatataatgagccttggttcaccaataccagatatttttgggtaggaccaggagaacaggtctggcctgaccaaaagataaaattgaaacttaaggctgtatatatgtatgctgctggattctacacatattccatatttgcacttatgttttgggaaacaaggcgttcagactttggagtgtcaatgtctcatcatgttgctactgttgttctgattgttctatcttacgtgttcagatttgctagagttggctctatagtattggcaattcatgatgcaagtgacgttttcctggaagtagggaagatgtccaagtacagccattgtgattggcttgccaatgtttcgtttctgttttttgttatttcgtgggttcttctccgcctcacatattttccgttctggattctgagaagtacaagctatgaggtcttgttgactttggacaaaaagaagcacaattttgatggtcctatatactattatgtgttcaattcccttctattttcactacttgttctccacatatattggtgggttttaatatatcggatgcttgtgagacaaatcaagacaagaaatgttggagatgatgttcgatctgattctgaaggagaagacgaccatgaagattgattgggggcatcatcttactttctgtgttataacggtgcttatacattcttttacttgattccaacattgttcctcacgagattcaccgaagccgggctacgggttacctgtgtcttggctgccaatttctgtgcattagaaacaacgctgcaatgcattagaaaaaagctggatgtcgaatataacattcttttcagtgttcacacaaagtgcagcggtaaatgtagcgccaatttagtattccggaaacaaaaggactggttgtaaatcaaagcctttctgccgacataccatgtacattctgtttgccaggatgacaccgcttggagttttgtgaacggtagcgctggccgccggtgaaacgcttctcttgagctcctgttgttcc

SEQ ID NO: 39523 - protein, 384 aa, Zea mays subsp. mays
  peptide (1)..(384): Ceres Seq. ID no. 12435292
  misc_feature (170)..(383): Pfam Name: LAG1 Pfam Description: Longevity-assurance protein
  misc_feature (87)..(384): NCBI GI NO: 16974114 NR Description: putative resistance protein
  misc_feature (74)..(384): NCBI GI NO: 25518747 NR Description: hypothetical protein F13B4
  misc_feature (74)..(384): NCBI GI NO: 18404559 NR Description: expressed protein; protein id: At3g25540
  misc_feature (83)..(384): NCBI GI NO: 7688742 NR Description: ASC1 [Lycopersicon esculentum]
  misc_feature (74)..(315): NCBI GI NO: 30683361 NR Description: longevity assurance protein -related
  misc_feature (105)..(381): NCBI GI NO: 15230323 NR Description: longevity factor-like protein
  misc_feature (105)..(381): NCBI GI NO: 7658241 NR Description: LAG1 homolog 2 [Arabidopsis thaliana]
  misc_feature (95)..(380): NCBI GI NO: 34901974 NR Description: unknown protein
  misc_feature (74)..(200): NCBI GI NO: 8920562 NR Description: Contains similarity to LAG1 homolog 1 fromArabidopsis thaliana gb|AF198179
  misc_feature (136)..(384): NCBI GI NO: 27769146 NR Description: Similar to RIKEN cDNA 0610013I17 gene
LCGRRTGKVKNRFRTSRGTEASAVPHSGSPPRLPERFAAQSLRIGFNPFDLSARRRHGTPEVAFDSAGAVEAGMGLGEAAGRLLAAVDWEREAYPAYDDFLALPAFVLFFPTVRFLLDRFVFKWVAMRLIHGQGHQRANNETEEARKKIRKFKESAWKCVYFLSGELLSLSVTYNEPWFTNTRYFWVGPGEQVWPDQKIKLKLKAVYMYAAGFYTYSIFALMFWETRRSDFGVSMSHHVATVVLIVLSYVFRFARVGSIVLAIHDASDVFLEVGKMSKYSHCDWLANVSFLFFVISWVLLRLTYFPFWILRSTSYEVLLTLDKKKHNFDGPIYYYVFNSLLFSLLVLHIYWWVLIYRMLVRQIKTRNVGDDVRSDSEGEDDHED

SEQ ID NO: 39524 - protein, 311 aa, Zea mays subsp. mays
  peptide (1)..(311): Ceres Seq. ID no. 12435293
  misc_feature (97)..(310): Pfam Name: LAG1 Pfam Description: Longevity-assurance protein
  misc_feature (14)..(311): NCBI GI NO: 16974114 NR Description: putative resistance protein
  misc_feature (1)..(311): NCBI GI NO: 25518747 NR Description: hypothetical protein F13B4
  misc_feature (1)..(311): NCBI GI NO: 18404559 NR Description: expressed protein; protein id: At3g25540
  misc_feature (10)..(311): NCBI GI NO: 7688742 NR Description: ASC1 [Lycopersicon esculentum]
  misc_feature (1)..(242): NCBI GI NO: 30683361 NR Description: longevity assurance protein -related
  misc_feature (32)..(308): NCBI GI NO: 15230323 NR Description: longevity factor-like protein
  misc_feature (32)..(308): NCBI GI NO: 7658241 NR Description: LAG1 homolog 2 [Arabidopsis thaliana]
  misc_feature (22)..(307): NCBI GI NO: 34901974 NR Description: unknown protein
  misc_feature (1)..(127): NCBI GI NO: 8920562 NR Description: Contains similarity to LAG1 homolog 1 fromArabidopsis thaliana gb|AF198179
  misc_feature (63)..(311): NCBI GI NO: 27769146 NR Description: Similar to RIKEN cDNA 0610013I17 gene
MGLGEAAGRLLAAVDWEREAYPAYDDFLALPAFVLFFPTVRFLLDRFVFKWVAMRLIHGQGHQRANNETEEARKKIRKFKESAWKCVYFLSGELLSLSVTYNEPWFTNTRYFWVGPGEQVWPDQKIKLKLKAVYMYAAGFYTYSIFALMFWETRRSDFGVSMSHHVATVVLIVLSYVFRFARVGSIVLAIHDASDVFLEVGKMSKYSHCDWLANVSFLFFVISWVLLRLTYFPFWILRSTSYEVLLTLDKKKHNFDGPIYYYVFNSLLFSLLVLHIYWWVLIYRMLVRQIKTRNVGDDVRSDSEGEDDHED

SEQ ID NO: 39525 - protein, 258 aa, Zea mays subsp. mays
  peptide (1)..(258): Ceres Seq. ID no. 12435294
  misc_feature (44)..(257): Pfam Name: LAG1 Pfam Description: Longevity-assurance protein
  misc_feature (1)..(258): NCBI GI NO: 16974114 NR Description: putative resistance protein
  misc_feature (1)..(258): NCBI GI NO: 25518747 NR Description: hypothetical protein F13B4
  misc_feature (1)..(258): NCBI GI NO: 18404559 NR Description: expressed protein; protein id: At3g25540
  misc_feature (1)..(258): NCBI GI NO: 7688742 NR Description: ASC1 [Lycopersicon esculentum]
  misc_feature (1)..(189): NCBI GI NO: 30683361 NR Description: longevity assurance protein -related
  misc_feature (1)..(255): NCBI GI NO: 15230323 NR Description: longevity factor-like protein
  misc_feature (1)..(255): NCBI GI NO: 7658241 NR Description: LAG1 homolog 2 [Arabidopsis thaliana]
  misc_feature (1)..(254): NCBI GI NO: 34901974 NR Description: unknown protein
  misc_feature (1)..(74): NCBI GI NO: 8920562 NR Description: Contains similarity to LAG1 homolog 1 fromArabidopsis thaliana gb|AF198179
  misc_feature (10)..(258): NCBI GI NO: 27769146 NR Description: Similar to RIKEN cDNA 0610013I17 gene
MRLIHGQGHQRANNETEEARKKIRKFKESAWKCVYFLSGELLSLSVTYNEPWFTNTRYFWVGPGEQVWPDQKIKLKLKAVYMYAAGFYTYSIFALMFWETRRSDFGVSMSHHVATVVLIVLSYVFRFARVGSIVLAIHDASDVFLEVGKMSKYSHCDWLANVSFLFFVISWVLLRLTYFPFWILRSTSYEVLLTLDKKKHNFDGPIYYYVFNSLLFSLLVLHIYWWVLIYRMLVRQIKTRNVGDDVRSDSEGEDDHED

SEQ ID NO: 39526 - DNA, 2001 bp, Zea mays subsp. mays
  misc_feature (1)..(2001): Ceres Seq. ID no. 12387575
  misc_feature (1980)..(1980): n is a, c, t, g, unknown, or other
  misc_feature (1996)..(1996): n is a, c, t, g, unknown, or other
  misc_feature (1959)..(1959): n is a, c, t, g, unknown, or other
  misc_feature (1877)..(1877): n is a, c, t, g, unknown, or other
  misc_feature (1890)..(1890): n is a, c, t, g, unknown, or other
  misc_feature (1859)..(1859): n is a, c, t, g, unknown, or other
  misc_feature (1866)..(1866): n is a, c, t, g, unknown, or other
  misc_feature (1878)..(1878): n is a, c, t, g, unknown, or other
  misc_feature (1856)..(1856): n is a, c, t, g, unknown, or other
gcacgagaccattacctagaacatcctaatcgaaaaatcctggtgctgcacgccccacggtctcggcggccacgccccacactcctcgtcctcgtcctcctcctcgcacccctcctccccggcccgcgccgccgcccatcacatggacccgccgcccaccagctctaccgtggcctcctcctacgccactccgccccagccttcctacgcgccctcctaccctaccagctacaccaagttcaactccgcgctcaacgcggggttgctcaatcccatgtccccgccgccgctgccacttgacaagacgcgctccagccccacactcttcgacatgatggccaacgagcaggactaccacccccgcaccgccgccggcatccactccatccccgccccgccccagccgcaccagctcccgcccgcgcgctccatggacaggcagatgctgctccaggaccgcatcgccgacctcatcggcagctgtagccccgggaaccagttcaacgacgccgactcctccgacgtccgcctcaccctcagctccaaggacggcctctccgtcacgctctgcgttcaccgccacatactcgtcgcgcacagcaggttcttcgccgccaaactgtccgaccgctggtccaagcagcagcggacgctgccgcacatcgtcgagatctccgactgcgacgacgtcgaggtgtacgccgagacgctgcggctcatgtactgcaaggatctccgccggaggctgatgcgggaggatgtgaacaaggtccttggcatcctgaaggtgtccgcagccattgtattcgatgccggggtgttgtcttgcttggagtacttggaggctgcgccttgggctgaggacgatgatgagaaggtggctacgttgttgacgcagctgcatcttgagaactccggggctggggaggtgcttaagagggtgtcactggaattggccccttcgtcattggttgaagaggcagatgaaggaggcagctgcaacggtggcaattccagtggtggtgaggaggtattgctgaggctcctgcaggtcgtcctggaagggaaggacgaaaaggcaaggagggagatgaaggggctagtgtccaaaatgctcagggagaacagcacatcccgtggtggagcaattggtggcgaccttcgcaaggaatcgctctattctgcgtgcaatggatgcttgtccctgctgtgcgagcaatttgtgagggcttcagagggtgatcactcagaggtggcgcggatcgcaaggcaggctgacaacctgcattggatgcttgacatccttgttgagcgccagatcgcggaggatttcttgaggacatgggcaacgcagactgagttagcggcgatgcatcgtaaagtgccagcgatacaccgctacgaagtgagccgagtgacggcaagactctttgttggggttggcaagggtcagatcttggtgtccaaggaggcccgttgccagctcttgagcacctggctagagcccttttatgaggacttctgatggatgcggcgagcatgcaaggggcttgaccggcatttgatcgaggatggactggcaaacacaatcctgacgctgcctcttgcaactcagcaggagatccttctggcatggtttaatcggttcctcaactctggggaggattgcccaaacattcagagagggtttgaggtgtggtggcggcgggcattctggaaaaggaactctgaaccagaaccaccatcccgtttgaggattactgcgatctgcgagaactcttgatgacggcggttcatattcgacatggaatgtggcggatgctgtgatataattattgattttctgtgatatgtantantgtctanctgtttctcannttttttttttgntatgtctgattaggcagttagccaattacacatgtcatcttgatcctgtttcaatgcaatgtataccangtccaatgtactactatgccncaaccattttgattcnaagtg

SEQ ID NO: 39527 - protein, 460 aa, Zea mays subsp. mays
  peptide (1)..(460): Ceres Seq. ID no. 12387576
  misc_feature (17)..(460): NCBI GI NO: 32488518 NR Description: OSJNBa0011J08.25
  misc_feature (279)..(460): NCBI GI NO: 15222554 NR Description: hypothetical protein; protein id: At1g63850.1
  misc_feature (1)..(85): NCBI GI NO: 15222554 NR Description: hypothetical protein; protein id: At1g63850.1
  misc_feature (106)..(460): NCBI GI NO: 15238599 NR Description: putative protein; protein id: At5g60050.1
  misc_feature (7)..(74): NCBI GI NO: 15238599 NR Description: putative protein; protein id: At5g60050.1
  misc_feature (256)..(460): NCBI GI NO: 38230508 NR Description: predicted protein [Populus alba x Populus tremula]
  misc_feature (96)..(330): NCBI GI NO: 15222554 NR Description: hypothetical protein; protein id: At1g63850.1
  misc_feature (1)..(330): NCBI GI NO: 38230508 NR Description: predicted protein [Populus alba x Populus tremula]
  misc_feature (15)..(268): NCBI GI NO: 15230303 NR Description: putative protein; protein id: At3g50780.1
  misc_feature (295)..(460): NCBI GI NO: 15230303 NR Description: putative protein; protein id: At3g50780.1
MDPPPTSSTVASSYATPPQPSYAPSYPTSYTKFNSALNAGLLNPMSPPPLPLDKTRSSPTLFDMMANEQDYHPRTAAGIHSIPAPPQPHQLPPARSMDRQMLLQDRIADLIGSCSPGNQFNDADSSDVRLTLSSKDGLSVTLCVHRHILVAHSRFFAAKLSDRWSKQQRTLPHIVEISDCDDVEVYAETLRLMYCKDLRRRLMREDVNKVLGILKVSAAIVFDAGVLSCLEYLEAAPWAEDDDEKVATLLTQLHLENSGAGEVLKRVSLELAPSSLVEEADEGGSCNGGNSSGGEEVLLRLLQVVLEGKDEKARREMKGLVSKMLRENSTSRGGAIGGDLRKESLYSACNGCLSLLCEQFVRASEGDHSEVARIARQADNLHWMLDILVERQIAEDFLRTWATQTELAAMHRKVPAIHRYEVSRVTARLFVGVGKGQILVSKEARCQLLSTWLEPFYEDF

SEQ ID NO: 39528 - protein, 416 aa, Zea mays subsp. mays
  peptide (1)..(416): Ceres Seq. ID no. 12387577
  misc_feature (1)..(416): NCBI GI NO: 32488518 NR Description: OSJNBa0011J08.25
  misc_feature (235)..(416): NCBI GI NO: 15222554 NR Description: hypothetical protein; protein id: At1g63850.1
  misc_feature (1)..(41): NCBI GI NO: 15222554 NR Description: hypothetical protein; protein id: At1g63850.1
  misc_feature (62)..(416): NCBI GI NO: 15238599 NR Description: putative protein; protein id: At5g60050.1
  misc_feature (1)..(30): NCBI GI NO: 15238599 NR Description: putative protein; protein id: At5g60050.1
  misc_feature (212)..(416): NCBI GI NO: 38230508 NR Description: predicted protein [Populus alba x Populus tremula]
  misc_feature (52)..(286): NCBI GI NO: 15222554 NR Description: hypothetical protein; protein id: At1g63850.1
  misc_feature (1)..(286): NCBI GI NO: 38230508 NR Description: predicted protein [Populus alba x Populus tremula]
  misc_feature (1)..(224): NCBI GI NO: 15230303 NR Description: putative protein; protein id: At3g50780.1
  misc_feature (251)..(416): NCBI GI NO: 15230303 NR Description: putative protein; protein id: At3g50780.1
MSPPPLPLDKTRSSPTLFDMMANEQDYHPRTAAGIHSIPAPPQPHQLPPARSMDRQMLLQDRIADLIGSCSPGNQFNDADSSDVRLTLSSKDGLSVTLCVHRHILVAHSRFFAAKLSDRWSKQQRTLPHIVEISDCDDVEVYAETLRLMYCKDLRRRLMREDVNKVLGILKVSAAIVFDAGVLSCLEYLEAAPWAEDDDEKVATLLTQLHLENSGAGEVLKRVSLELAPSSLVEEADEGGSCNGGNSSGGEEVLLRLLQVVLEGKDEKARREMKGLVSKMLRENSTSRGGAIGGDLRKESLYSACNGCLSLLCEQFVRASEGDHSEVARIARQADNLHWMLDILVERQIAEDFLRTWATQTELAAMHRKVPAIHRYEVSRVTARLFVGVGKGQILVSKEARCQLLSTWLEPFYEDF

SEQ ID NO: 39529 - protein, 397 aa, Zea mays subsp. mays
  peptide (1)..(397): Ceres Seq. ID no. 12387578
  misc_feature (1)..(397): NCBI GI NO: 32488518 NR Description: OSJNBa0011J08.25
  misc_feature (216)..(397): NCBI GI NO: 15222554 NR Description: hypothetical protein; protein id: At1g63850.1
  misc_feature (1)..(22): NCBI GI NO: 15222554 NR Description: hypothetical protein; protein id: At1g63850.1
  misc_feature (43)..(397): NCBI GI NO: 15238599 NR Description: putative protein; protein id: At5g60050.1
  misc_feature (1)..(11): NCBI GI NO: 15238599 NR Description: putative protein; protein id: At5g60050.1
  misc_feature (193)..(397): NCBI GI NO: 38230508 NR Description: predicted protein [Populus alba x Populus tremula]
  misc_feature (33)..(267): NCBI GI NO: 15222554 NR Description: hypothetical protein; protein id: At1g63850.1
  misc_feature (1)..(267): NCBI GI NO: 38230508 NR Description: predicted protein [Populus alba x Populus tremula]
  misc_feature (1)..(205): NCBI GI NO: 15230303 NR Description: putative protein; protein id: At3g50780.1
  misc_feature (232)..(397): NCBI GI NO: 15230303 NR Description: putative protein; protein id: At3g50780.1
MMANEQDYHPRTAAGIHSIPAPPQPHQLPPARSMDRQMLLQDRIADLIGSCSPGNQFNDADSSDVRLTLSSKDGLSVTLCVHRHILVAHSRFFAAKLSDRWSKQQRTLPHIVEISDCDDVEVYAETLRLMYCKDLRRRLMREDVNKVLGILKVSAAIVFDAGVLSCLEYLEAAPWAEDDDEKVATLLTQLHLENSGAGEVLKRVSLELAPSSLVEEADEGGSCNGGNSSGGEEVLLRLLQVVLEGKDEKARREMKGLVSKMLRENSTSRGGAIGGDLRKESLYSACNGCLSLLCEQFVRASEGDHSEVARIARQADNLHWMLDILVERQIAEDFLRTWATQTELAAMHRKVPAIHRYEVSRVTARLFVGVGKGQILVSKEARCQLLSTWLEPFYEDF

SEQ ID NO: 39530 - DNA, 1446 bp, Zea mays subsp. mays
  misc_feature (1)..(1446): Ceres Seq. ID no. 12415235
  misc_feature (532)..(532): n is a, c, t, g, unknown, or other
gcacgagaccattacctagaacatcctaatccaaaaatatcaatcatccagaaggtcaaactctcccctgtttcgacttggttccctgctcctgccctgaaaggagttgtcttggttccctgcccctgccctgaaagcagcagttggagagtcgaatcgtccttcttctctccggcgggaggaggcgggcggtgggcggtgggcggcggcaggaccgtgatgacgagcagcagcaacaacggcggccggccagacgacggcggcgaggtggtcctggaccacgagtaccaagaggagtacgtgaggaactcgcgggggatgagcctcttcgcatgcagatggctgccggcagttgcaggcaagagggggagggctccagctccaaaggcgctcgtcttcctctgccacggctacgccgtggagtgcagcgtgacgatgcgcggcaccggcgagcgcctggcgcgtgccggctacgccgtctacggcctggactacgagggccacggccgctccgacgggctgcagggctacntgccggatttcgacgcgctggtgctggactgcgacgagtacttcacctcggtggtggcggcggcggcgcagtcgcagtccaaggacgcccaccaacttccccggttcctgctcggggagtccatgggcggcgccgtggctctcctcctccaccgccggcgccccgagtactggagcggcgccgtgctggtggcgcccatgtgcaagatcgccgacgacatgcggcctcacccgctggtggtcaacatcctcagggccatgaccaccatcatcccgacgtggaagatcgtgcccagcaacgacgtcatcgacgcggcgtacaggagccaggagaagagggacgagatccgcagcaacccttactgctacaaggacaagccgcgactcaagaccgcctacgagctgctcaaagtcagcttggacctcgagcacaacctcctccaccaggtgtcgttgccgttcctgatcgtgcacggcggggcagacaaggtgacggacccgtcggtgagcgagctgctgtaccaatcggcggcgagccaggacaagacgctcaagttctatccgggcatgtggcacgccctcacctccggcgagtcgcccgacaacatccaagccgttttccaagacatcatcgcctggctcgaccacaggtcacccgacacggaacaggaggagctggtgtcgtcggaggtggagcagaaggccaagcacgacgaccagcgccaccaggagcagctccaggacggcaacaaatagctagctgcttgcttgcctgctgctttcttctctttacagaacgaaccgtttcatttggtcatgcatggatacacatcatgtctcagtgatacgtaccgactaaattaaattattagatcgaccgcgcttacctagaaattaaacaatcagctgttcgac

SEQ ID NO: 39531 - protein, 428 aa, Zea mays subsp. mays
  peptide (1)..(428): Ceres Seq. ID no. 12415236
  misc_feature (158)..(384): Pfam Name: Pfam Description:  alpha/beta hydrolase fold
  misc_feature (95)..(415): NCBI GI NO: 7487948 NR Description: lysophospholipase homolog F12L6
  misc_feature (95)..(415): NCBI GI NO: 30687883 NR Description: esterase/lipase/thioesterase family
  misc_feature (96)..(416): NCBI GI NO: 15233200 NR Description: lipase -like protein; protein id: At3g55180.1
  misc_feature (93)..(397): NCBI GI NO: 18407407 NR Description: putative phospholipase; protein id: At2g47630
  misc_feature (95)..(398): NCBI GI NO: 30695682 NR Description: esterase/lipase/thioesterase family
  misc_feature (93)..(411): NCBI GI NO: 30687879 NR Description: hydrolase, alpha/beta fold family
  misc_feature (96)..(415): NCBI GI NO: 18405038 NR Description: putative phospholipase; protein id: At2g39400
  misc_feature (100)..(411): NCBI GI NO: 7487947 NR Description: lysophospholipase homolog F12L6
  misc_feature (97)..(395): NCBI GI NO: 34894592 NR Description: phospholipase-like protein
  misc_feature (96)..(394): NCBI GI NO: 15233203 NR Description: lipase -like protein; protein id: At3g55190.1
  misc_feature (178)..(178): Xaa is any aa, unknown or other
ARDHYLEHPNPKISIIQKVKLSPVSTWFPAPALKGVVLVPCPCPESSSWRVESSFFSPAGGGGRWAVGGGRTVMTSSSNNGGRPDDGGEVVLDHEYQEEYVRNSRGMSLFACRWLPAVAGKRGRAPAPKALVFLCHGYAVECSVTMRGTGERLARAGYAVYGLDYEGHGRSDGLQGYXPDFDALVLDCDEYFTSVVAAAAQSQSKDAHQLPRFLLGESMGGAVALLLHRRRPEYWSGAVLVAPMCKIADDMRPHPLVVNILRAMTTIIPTWKIVPSNDVIDAAYRSQEKRDEIRSNPYCYKDKPRLKTAYELLKVSLDLEHNLLHQVSLPFLIVHGGADKVTDPSVSELLYQSAASQDKTLKFYPGMWHALTSGESPDNIQAVFQDIIAWLDHRSPDTEQEELVSSEVEQKAKHDDQRHQEQLQDGNK

SEQ ID NO: 39532 - protein, 355 aa, Zea mays subsp. mays
  peptide (1)..(355): Ceres Seq. ID no. 12415237
  misc_feature (85)..(311): Pfam Name: Pfam Description:  alpha/beta hydrolase fold
  misc_feature (22)..(342): NCBI GI NO: 7487948 NR Description: lysophospholipase homolog F12L6
  misc_feature (22)..(342): NCBI GI NO: 30687883 NR Description: esterase/lipase/thioesterase family
  misc_feature (23)..(343): NCBI GI NO: 15233200 NR Description: lipase -like protein; protein id: At3g55180.1
  misc_feature (20)..(324): NCBI GI NO: 18407407 NR Description: putative phospholipase; protein id: At2g47630
  misc_feature (22)..(325): NCBI GI NO: 30695682 NR Description: esterase/lipase/thioesterase family
  misc_feature (20)..(338): NCBI GI NO: 30687879 NR Description: hydrolase, alpha/beta fold family
  misc_feature (23)..(342): NCBI GI NO: 18405038 NR Description: putative phospholipase; protein id: At2g39400
  misc_feature (27)..(338): NCBI GI NO: 7487947 NR Description: lysophospholipase homolog F12L6
  misc_feature (24)..(322): NCBI GI NO: 34894592 NR Description: phospholipase-like protein
  misc_feature (23)..(321): NCBI GI NO: 15233203 NR Description: lipase -like protein; protein id: At3g55190.1
  misc_feature (105)..(105): Xaa is any aa, unknown or other
MTSSSNNGGRPDDGGEVVLDHEYQEEYVRNSRGMSLFACRWLPAVAGKRGRAPAPKALVFLCHGYAVECSVTMRGTGERLARAGYAVYGLDYEGHGRSDGLQGYXPDFDALVLDCDEYFTSVVAAAAQSQSKDAHQLPRFLLGESMGGAVALLLHRRRPEYWSGAVLVAPMCKIADDMRPHPLVVNILRAMTTIIPTWKIVPSNDVIDAAYRSQEKRDEIRSNPYCYKDKPRLKTAYELLKVSLDLEHNLLHQVSLPFLIVHGGADKVTDPSVSELLYQSAASQDKTLKFYPGMWHALTSGESPDNIQAVFQDIIAWLDHRSPDTEQEELVSSEVEQKAKHDDQRHQEQLQDGNK

SEQ ID NO: 39533 - protein, 347 aa, Zea mays subsp. mays
  peptide (1)..(347): Ceres Seq. ID no. 12415238
  misc_feature (90)..(313): Pfam Name: Pfam Description:  Atrophin-1 family
  misc_feature (1)..(319): NCBI GI NO: 25989121 NR Description: putative PHA synthase [Streptomyces aureofaciens]
  misc_feature (1)..(226): NCBI GI NO: 93505 NR Description: ORF5 protein - Orf virus (strain NZ2)
  misc_feature (67)..(67): Xaa is any aa, unknown or other
MQMAAGSCRQEGEGSSSKGARLPLPRLRRGVQRDDARHRRAPGACRLRRLRPGLRGPRPLRRAAGLXAGFRRAGAGLRRVLHLGGGGGGAVAVQGRPPTSPVPARGVHGRRRGSPPPPPAPRVLERRRAGGAHVQDRRRHAASPAGGQHPQGHDHHHPDVEDRAQQRRHRRGVQEPGEEGRDPQQPLLLQGQAATQDRLRAAQSQLGPRAQPPPPGVVAVPDRARRGRQGDGPVGERAAVPIGGEPGQDAQVLSGHVARPHLRRVARQHPSRFPRHHRLARPQVTRHGTGGAGVVGGGAEGQARRPAPPGAAPGRQQIASCLLACCFLLFTERTVSFGHAWIHIMSQ

SEQ ID NO: 39534 - DNA, 447 bp, Zea mays subsp. mays
  misc_feature (1)..(447): Ceres Seq. ID no. 2120225
  misc_feature (164)..(164): n is a, c, t, g, unknown, or other
cccctctgtcccagaacgcgccccagcctcccacctagaactccgcgcccagcgctttccgtaaccaccacaaccrcagcggraacagtgacaggttgaggagacggccgccatgggagaggaaaagaagacgggcaagggcggcggcggcggcggcggcgacnagaagaaggacgccggcgctggggccgcgccgcagcccatcgtgttgaaggtcgacttgcattgcgccggctgcgccaacaaggtccgcaaggccatcaagcgcgcaccaggcgtggagtcggtgacgccggacatggcggcgggcaaggtggtcgtgaccggtccggcggacgcggtgcagctcaaggagcgcatcgaggctagggccaagaagcccgtgcagatcgtctccgccggcgccggttcgccaagaaggacaaggagaagwawgctgacggcggc

SEQ ID NO: 39535 - protein, 111 aa, Zea mays subsp. mays
  peptide (1)..(111): Ceres Seq. ID no. 2120226
  misc_feature (1)..(101): NCBI GI NO: 37534752 NR Description: putative metal-binding protein
  misc_feature (1)..(95): NCBI GI NO: 22327990 NR Description: expressed protein; protein id: At5g60800.1
  misc_feature (1)..(95): NCBI GI NO: 38344582 NR Description: OSJNBa0053B21.14
  misc_feature (1)..(97): NCBI GI NO: 37534752 NR Description: putative metal-binding protein
  misc_feature (1)..(95): NCBI GI NO: 24417342 NR Description: unknown [Arabidopsis thaliana]
  misc_feature (55)..(101): NCBI GI NO: 29367499 NR Description: unknown [Oryza sativa (japonica cultivar-group)]
  misc_feature (27)..(100): NCBI GI NO: 37534750 NR Description: putative metal-binding protein
  misc_feature (4)..(95): NCBI GI NO: 18404283 NR Description: expressed protein; protein id: At2g36950
  misc_feature (3)..(95): NCBI GI NO: 15241256 NR Description: copper chaperone
  misc_feature (1)..(95): NCBI GI NO: 18424719 NR Description: copper chaperone
  misc_feature (18)..(18): Xaa is any aa, unknown or other
  misc_feature (107)..(107): Xaa is any aa, unknown or other
  misc_feature (108)..(108): Xaa is any aa, unknown or other
MGEEKKTGKGGGGGGGDXKKDAGAGAAPQPIVLKVDLHCAGCANKVRKAIKRAPGVESVTPDMAAGKVVVTGPADAVQLKERIEARAKKPVQIVSAGAGSPRRTRRXXLTA

SEQ ID NO: 39536 - DNA, 1026 bp, Zea mays subsp. mays
  misc_feature (1)..(1026): Ceres Seq. ID no. 12355072
atcgcccacacgtcgaagcaggtgattggcgatccctgtccgtcctcgctcgctagctgatcgacatggccgacgacgacccaagaacgacggcggcgagcagcatgccggacttcaagcagtcggtgaagctcaagtacgtgaagctggggtaccaccacctgatcagccacggcgcgtacctgctgctggccccgctgccggggctcgtggcggcgcacctctccaccttcacggcgcgggacctggcggagctgtggcagagcctgcagtacaacctggcgtccgtgctcgtcgcgaccacggcgctggtcacggccaccgcgtacgcgctgacgcggccgcggcccgtgtacctggtggacttcgcgtgctaccggccccgcgacgagcgcaggtgcagccgcgcgcggttcatgaactgcaccgagtcgctcggcaccttcacgccggagaacgtggagttccagcgccggatcatcgagcggtcggggctgggcgaggacacgtacctcccggaggcggtgctcaacatcccgcccaacccatccatggccagcgcacgggaggaggccgagatggtcatgttcggcgcgctggacgagctgttcgccaagaccggggtgcggcccaaggagatcggcgtgctggtggtgaactgcagcctcttcaacccgacgccgtcgctgtccgccatggtcgtcaaccactacaggctccggggcaacgtcgcgagctacaacctcggcggcatgggctgcagcgcggggatcatcgccgtggacctcgccagggacctgctgcagtgccaccggggcacctacgccgtggtggtcagcacggagaacatcaccctcaactggtacctgggcaacgaccgctccatgctggtgtccaactgcctgttccgcatgggcggcgcggcgctcctgctgtcgaaccgcggctcggcgcggcgccggtccaagtaccagctggtgcacacggtgcgcacgcacagggccgccgacgaccgctgcttcggct

SEQ ID NO: 39537 - protein, 320 aa, Zea mays subsp. mays
  peptide (1)..(320): Ceres Seq. ID no. 12355073
  misc_feature (176)..(289): Pfam Name: Pfam Description:  Chalcone and stilbene synthases
  misc_feature (16)..(319): NCBI GI NO: 9714501 NR Description: putative fatty acid elongase [Zea mays]
  misc_feature (1)..(319): NCBI GI NO: 15225767 NR Description: putative beta-ketoacyl-CoA synthase
  misc_feature (14)..(319): NCBI GI NO: 29417540 NR Description: beta-ketoacyl-CoA-synthase [Marchantia polymorpha]
  misc_feature (9)..(319): NCBI GI NO: 11066477 NR Description: fatty acid elongase 1-like protein
  misc_feature (8)..(319): NCBI GI NO: 1045614 NR Description: beta-ketoacyl-CoA synthase
  misc_feature (12)..(319): NCBI GI NO: 14334714 NR Description: putative beta-ketoacyl-CoA synthase
  misc_feature (12)..(319): NCBI GI NO: 15239981 NR Description: beta-ketoacyl-CoA synthase; protein id:At5g43760
  misc_feature (14)..(319): NCBI GI NO: 15223556 NR Description: very-long-chain fatty acid condensing enzyme CUT1
  misc_feature (14)..(319): NCBI GI NO: 15219676 NR Description: putative beta-ketoacyl-CoA synthase
  misc_feature (14)..(319): NCBI GI NO: 18377979 NR Description: putative beta-ketoacyl-CoA synthase
MADDDPRTTAASSMPDFKQSVKLKYVKLGYHHLISHGAYLLLAPLPGLVAAHLSTFTARDLAELWQSLQYNLASVLVATTALVTATAYALTRPRPVYLVDFACYRPRDERRCSRARFMNCTESLGTFTPENVEFQRRIIERSGLGEDTYLPEAVLNIPPNPSMASAREEAEMVMFGALDELFAKTGVRPKEIGVLVVNCSLFNPTPSLSAMVVNHYRLRGNVASYNLGGMGCSAGIIAVDLARDLLQCHRGTYAVVVSTENITLNWYLGNDRSMLVSNCLFRMGGAALLLSNRGSARRRSKYQLVHTVRTHRAADDRCFG

SEQ ID NO: 39538 - protein, 307 aa, Zea mays subsp. mays
  peptide (1)..(307): Ceres Seq. ID no. 12355074
  misc_feature (163)..(276): Pfam Name: Pfam Description:  Chalcone and stilbene synthases
  misc_feature (3)..(306): NCBI GI NO: 9714501 NR Description: putative fatty acid elongase [Zea mays]
  misc_feature (1)..(306): NCBI GI NO: 15225767 NR Description: putative beta-ketoacyl-CoA synthase
  misc_feature (1)..(306): NCBI GI NO: 29417540 NR Description: beta-ketoacyl-CoA-synthase [Marchantia polymorpha]
  misc_feature (1)..(306): NCBI GI NO: 11066477 NR Description: fatty acid elongase 1-like protein
  misc_feature (1)..(306): NCBI GI NO: 1045614 NR Description: beta-ketoacyl-CoA synthase
  misc_feature (1)..(306): NCBI GI NO: 14334714 NR Description: putative beta-ketoacyl-CoA synthase
  misc_feature (1)..(306): NCBI GI NO: 15239981 NR Description: beta-ketoacyl-CoA synthase; protein id:At5g43760
  misc_feature (1)..(306): NCBI GI NO: 15223556 NR Description: very-long-chain fatty acid condensing enzyme CUT1
  misc_feature (1)..(306): NCBI GI NO: 15219676 NR Description: putative beta-ketoacyl-CoA synthase
  misc_feature (1)..(306): NCBI GI NO: 18377979 NR Description: putative beta-ketoacyl-CoA synthase
MPDFKQSVKLKYVKLGYHHLISHGAYLLLAPLPGLVAAHLSTFTARDLAELWQSLQYNLASVLVATTALVTATAYALTRPRPVYLVDFACYRPRDERRCSRARFMNCTESLGTFTPENVEFQRRIIERSGLGEDTYLPEAVLNIPPNPSMASAREEAEMVMFGALDELFAKTGVRPKEIGVLVVNCSLFNPTPSLSAMVVNHYRLRGNVASYNLGGMGCSAGIIAVDLARDLLQCHRGTYAVVVSTENITLNWYLGNDRSMLVSNCLFRMGGAALLLSNRGSARRRSKYQLVHTVRTHRAADDRCFG

SEQ ID NO: 39539 - protein, 203 aa, Zea mays subsp. mays
  peptide (1)..(203): Ceres Seq. ID no. 12355075
  misc_feature (59)..(172): Pfam Name: Pfam Description:  Chalcone and stilbene synthases
  misc_feature (1)..(202): NCBI GI NO: 9714501 NR Description: putative fatty acid elongase [Zea mays]
  misc_feature (1)..(202): NCBI GI NO: 15225767 NR Description: putative beta-ketoacyl-CoA synthase
  misc_feature (1)..(202): NCBI GI NO: 29417540 NR Description: beta-ketoacyl-CoA-synthase [Marchantia polymorpha]
  misc_feature (1)..(202): NCBI GI NO: 11066477 NR Description: fatty acid elongase 1-like protein
  misc_feature (1)..(202): NCBI GI NO: 1045614 NR Description: beta-ketoacyl-CoA synthase
  misc_feature (1)..(202): NCBI GI NO: 14334714 NR Description: putative beta-ketoacyl-CoA synthase
  misc_feature (1)..(202): NCBI GI NO: 15239981 NR Description: beta-ketoacyl-CoA synthase; protein id:At5g43760
  misc_feature (1)..(202): NCBI GI NO: 15223556 NR Description: very-long-chain fatty acid condensing enzyme CUT1
  misc_feature (1)..(202): NCBI GI NO: 15219676 NR Description: putative beta-ketoacyl-CoA synthase
  misc_feature (1)..(202): NCBI GI NO: 18377979 NR Description: putative beta-ketoacyl-CoA synthase
MNCTESLGTFTPENVEFQRRIIERSGLGEDTYLPEAVLNIPPNPSMASAREEAEMVMFGALDELFAKTGVRPKEIGVLVVNCSLFNPTPSLSAMVVNHYRLRGNVASYNLGGMGCSAGIIAVDLARDLLQCHRGTYAVVVSTENITLNWYLGNDRSMLVSNCLFRMGGAALLLSNRGSARRRSKYQLVHTVRTHRAADDRCFG

SEQ ID NO: 39540 - DNA, 897 bp, Zea mays subsp. mays
  misc_feature (1)..(897): Ceres Seq. ID no. 12359231
ataaacccaaacctcctcgtcctctgtcagactaccactctctccctcgcggactcgcggttgattcctcgcggcggattcgcatcttccgcgtcagggacagggagagtactccgtcggacggttggaggagaacagggagaggagctctgagatggagacggccgcctcggcagcgcgcctggtgaactacccgctcgtcgcggcgcttctcgcgttcgccgtcgcgcagtcctccaagttcttcaccacctggttcaaagatggccggtgggatgccagacagtttatagcttctggagggatgccatcatcccactcagctacagtgacagcactcgcagtggctgtggcgatacaagaaggctttcatagtgcaacctttgcaactgcactagtctttgcatgcgtggttatgcatgatgcttttggagttcggttacatgccggaaagcaggcagaggtgctgaatcaaattgtctatgagctaccagaagaacacccattatcagagacaaagccattgcgtgaaatccttggacatactgttcctcaggttgtggccggttgcatccttggagttctcatggctgccgttatgcacctgtctctcgggagttcttagtcaactgttgttcatggatgtcatgacagatgatcacctaatgtctcgctggtgatggctataaagcatgaagcatgatctccgcatggatctggttgtccaagtgtttggtagtacgaagttctaaccgatttagttctggacagtaggatataggttgtgtagcttgaatcggttactgtaaatctgaaaggttttgctttcaactccaactaccaatcacggtgtaatggaagctttgttatacaatcaacagcagtaaattcattctg

SEQ ID NO: 39541 - protein, 156 aa, Zea mays subsp. mays
  peptide (1)..(156): Ceres Seq. ID no. 12359232
  misc_feature (12)..(151): Pfam Name: Pfam Description:  Divergent PAP2 family
  misc_feature (5)..(156): NCBI GI NO: 38344227 NR Description: OJ991113_30.3
  misc_feature (5)..(141): NCBI GI NO: 29150195 NR Description: putative protein
  misc_feature (1)..(151): NCBI GI NO: 15220480 NR Description: F12A21
  misc_feature (1)..(151): NCBI GI NO: 18395459 NR Description: expressed protein; protein id: At1g24350
  misc_feature (1)..(151): NCBI GI NO: 21555270 NR Description: unknown [Arabidopsis thaliana]
  misc_feature (1)..(135): NCBI GI NO: 12324675 NR Description: unknown protein [Arabidopsis thaliana]
  misc_feature (1)..(156): NCBI GI NO: 7486375 NR Description: hypothetical protein F3I6
  misc_feature (1)..(135): NCBI GI NO: 9743358 NR Description: F21J9.1 [Arabidopsis thaliana]
  misc_feature (1)..(135): NCBI GI NO: 26449729 NR Description: unknown protein [Arabidopsis thaliana]
  misc_feature (12)..(152): NCBI GI NO: 30686309 NR Description: expressed protein [Arabidopsis thaliana]
METAASAARLVNYPLVAALLAFAVAQSSKFFTTWFKDGRWDARQFIASGGMPSSHSATVTALAVAVAIQEGFHSATFATALVFACVVMHDAFGVRLHAGKQAEVLNQIVYELPEEHPLSETKPLREILGHTVPQVVAGCILGVLMAAVMHLSLGSS

SEQ ID NO: 39542 - protein, 106 aa, Zea mays subsp. mays
  peptide (1)..(106): Ceres Seq. ID no. 12359233
  misc_feature (1)..(101): Pfam Name: Pfam Description:  Divergent PAP2 family
  misc_feature (1)..(106): NCBI GI NO: 38344227 NR Description: OJ991113_30.3
  misc_feature (1)..(91): NCBI GI NO: 29150195 NR Description: putative protein
  misc_feature (1)..(101): NCBI GI NO: 15220480 NR Description: F12A21
  misc_feature (1)..(101): NCBI GI NO: 18395459 NR Description: expressed protein; protein id: At1g24350
  misc_feature (1)..(101): NCBI GI NO: 21555270 NR Description: unknown [Arabidopsis thaliana]
  misc_feature (1)..(85): NCBI GI NO: 12324675 NR Description: unknown protein [Arabidopsis thaliana]
  misc_feature (1)..(106): NCBI GI NO: 7486375 NR Description: hypothetical protein F3I6
  misc_feature (1)..(85): NCBI GI NO: 9743358 NR Description: F21J9.1 [Arabidopsis thaliana]
  misc_feature (1)..(85): NCBI GI NO: 26449729 NR Description: unknown protein [Arabidopsis thaliana]
  misc_feature (1)..(102): NCBI GI NO: 30686309 NR Description: expressed protein [Arabidopsis thaliana]
MPSSHSATVTALAVAVAIQEGFHSATFATALVFACVVMHDAFGVRLHAGKQAEVLNQIVYELPEEHPLSETKPLREILGHTVPQVVAGCILGVLMAAVMHLSLGSS

SEQ ID NO: 39543 - DNA, 1688 bp, Zea mays subsp. mays
  misc_feature (1)..(1688): Ceres Seq. ID no. 12415179
cccgcaccgcatcccattccgtgccaccgccgccgcgctgcgtctgcgtgcgtcgcccgcccgcccgcccgcagtgtccgcagccagagccagcgcacgcgctgctccgccgacgccgaagcctcgtccgcgagcgcgtggctaagcaagcactcgagtcgagctccctccagcggcgggcgcagtgcagccaggccgcgcgcgccgcagcatgaacggcgtcggcgacgcgcacgcggccgtggccgcggccgccatggtgcagcagacgctggggatgtcgctgccgatggcggcgttcgtgcccgagcattgcagcgccaataagctggccaggccgccggggctgccgccgctgccgcaggcgttcgtggcccagcagcgcggggacgtgtgcatggaggccgccgaccccgccgctggcccgcgcaaggcgcaccggcgctcccgcagcgacgtcccgttcggctacttcccgccggcgggccaccaccagctcccgccgcccaaggtggaggccggctggggcggccacctccccgccggcggcggcgacgacgacctgttcaacgcgtacctcaacctggaggggctggacgggctcaactcctccgacgaccgcctggacgacggggacagccgcggcagcagcatgaggaccaacggcgccgacagcagcgagaacgagtcggaggagtgcgccgccgacagccgcgccgggatccgcctctgcgccgccgctgccgacaggcgggaggggctcaagagggccgccgctgcgcccgtgccgcgccacgccaggagcctgtccatggacagcctcatcggcaagctcaacttctccgccggcgcgacgggcgccgccagcggcgtcattccggggcccaacaggttcagcctcgagttcggcagtgccgagttttcgccggtcgagatgaagaagatcatggccgacgagaagctggccgagatggcgctcgccgaccccaagcgcgtcaagagggtgctggccaacaggcagtcggcggcgcggtccaaggagcgcaagatgcgatacattggcgagctggagcacaaggtgcagatcctgcagacggaggccaccactctctccgcccagctcacgcttcttcagcgggactccgcggggatcgcgacgcagaacaacgagctcaagttccggctgcaggccatggagcagcaggcgcagctgcgtgacgcattgaatgaggcactgacagccgaggtccaacgcctgaagctcgcgaccgcagagctcggggattcttgctcgtccagcaacctagctcagcagatccaaatcagcgttcaggaccagatgtttcaactgcatcagcagcaggcaacgcctataccgttctaccagctgcagcaggcgcagcagaatggcgcagggaagaagcatgagccgacggaatgatctcagagctgccattatccaccgctgcgtgagcagggggaaaaaaggatcggtttcgatggactgaaagcatttcttttcctaactcattggttttaagtgtcgttaataagcaccgtgcatttttttttccaggtgatgaacctgctgcttgtacctgtttatttattctttggatgattcagttgcttgagttgccaaactgatcaaattgtagccggttaatattcttttatagttgtagtgc

SEQ ID NO: 39544 - protein, 409 aa, Zea mays subsp. mays
  peptide (1)..(409): Ceres Seq. ID no. 12415180
  misc_feature (256)..(320): Pfam Name: Pfam Description:  bZIP transcription factor
  misc_feature (3)..(409): NCBI GI NO: 34902256 NR Description: Putative bZIP transcription factor
  misc_feature (26)..(406): NCBI GI NO: 37536376 NR Description: putative transcription factor
  misc_feature (26)..(406): NCBI GI NO: 22213170 NR Description: putative transcription factor
  misc_feature (89)..(405): NCBI GI NO: 15226487 NR Description: bZIP family transcription factor
  misc_feature (44)..(99): NCBI GI NO: 15226487 NR Description: bZIP family transcription factor
  misc_feature (110)..(401): NCBI GI NO: 1076603 NR Description: vsf-1 protein - tomato
  misc_feature (110)..(401): NCBI GI NO: 1838976 NR Description: vsf-1 [Lycopersicon esculentum]
  misc_feature (110)..(401): NCBI GI NO: 3425907 NR Description: transcription factor VSF-1
  misc_feature (126)..(409): NCBI GI NO: 19423874 NR Description: unknown protein [Arabidopsis thaliana]
  misc_feature (126)..(409): NCBI GI NO: 30692108 NR Description: bZIP protein [Arabidopsis thaliana]
MNGVGDAHAAVAAAAMVQQTLGMSLPMAAFVPEHCSANKLARPPGLPPLPQAFVAQQRGDVCMEAADPAAGPRKAHRRSRSDVPFGYFPPAGHHQLPPPKVEAGWGGHLPAGGGDDDLFNAYLNLEGLDGLNSSDDRLDDGDSRGSSMRTNGADSSENESEECAADSRAGIRLCAAAADRREGLKRAAAAPVPRHARSLSMDSLIGKLNFSAGATGAASGVIPGPNRFSLEFGSAEFSPVEMKKIMADEKLAEMALADPKRVKRVLANRQSAARSKERKMRYIGELEHKVQILQTEATTLSAQLTLLQRDSAGIATQNNELKFRLQAMEQQAQLRDALNEALTAEVQRLKLATAELGDSCSSSNLAQQIQISVQDQMFQLHQQQATPIPFYQLQQAQQNGAGKKHEPTE

SEQ ID NO: 39545 - protein, 394 aa, Zea mays subsp. mays
  peptide (1)..(394): Ceres Seq. ID no. 12415181
  misc_feature (241)..(305): Pfam Name: Pfam Description:  bZIP transcription factor
  misc_feature (1)..(394): NCBI GI NO: 34902256 NR Description: Putative bZIP transcription factor
  misc_feature (11)..(391): NCBI GI NO: 37536376 NR Description: putative transcription factor
  misc_feature (11)..(391): NCBI GI NO: 22213170 NR Description: putative transcription factor
  misc_feature (74)..(390): NCBI GI NO: 15226487 NR Description: bZIP family transcription factor
  misc_feature (29)..(84): NCBI GI NO: 15226487 NR Description: bZIP family transcription factor
  misc_feature (95)..(386): NCBI GI NO: 1076603 NR Description: vsf-1 protein - tomato
  misc_feature (95)..(386): NCBI GI NO: 1838976 NR Description: vsf-1 [Lycopersicon esculentum]
  misc_feature (95)..(386): NCBI GI NO: 3425907 NR Description: transcription factor VSF-1
  misc_feature (111)..(394): NCBI GI NO: 19423874 NR Description: unknown protein [Arabidopsis thaliana]
  misc_feature (111)..(394): NCBI GI NO: 30692108 NR Description: bZIP protein [Arabidopsis thaliana]
MVQQTLGMSLPMAAFVPEHCSANKLARPPGLPPLPQAFVAQQRGDVCMEAADPAAGPRKAHRRSRSDVPFGYFPPAGHHQLPPPKVEAGWGGHLPAGGGDDDLFNAYLNLEGLDGLNSSDDRLDDGDSRGSSMRTNGADSSENESEECAADSRAGIRLCAAAADRREGLKRAAAAPVPRHARSLSMDSLIGKLNFSAGATGAASGVIPGPNRFSLEFGSAEFSPVEMKKIMADEKLAEMALADPKRVKRVLANRQSAARSKERKMRYIGELEHKVQILQTEATTLSAQLTLLQRDSAGIATQNNELKFRLQAMEQQAQLRDALNEALTAEVQRLKLATAELGDSCSSSNLAQQIQISVQDQMFQLHQQQATPIPFYQLQQAQQNGAGKKHEPTE

SEQ ID NO: 39546 - protein, 387 aa, Zea mays subsp. mays
  peptide (1)..(387): Ceres Seq. ID no. 12415182
  misc_feature (234)..(298): Pfam Name: Pfam Description:  bZIP transcription factor
  misc_feature (1)..(387): NCBI GI NO: 34902256 NR Description: Putative bZIP transcription factor
  misc_feature (4)..(384): NCBI GI NO: 37536376 NR Description: putative transcription factor
  misc_feature (4)..(384): NCBI GI NO: 22213170 NR Description: putative transcription factor
  misc_feature (67)..(383): NCBI GI NO: 15226487 NR Description: bZIP family transcription factor
  misc_feature (22)..(77): NCBI GI NO: 15226487 NR Description: bZIP family transcription factor
  misc_feature (88)..(379): NCBI GI NO: 1076603 NR Description: vsf-1 protein - tomato
  misc_feature (88)..(379): NCBI GI NO: 1838976 NR Description: vsf-1 [Lycopersicon esculentum]
  misc_feature (88)..(379): NCBI GI NO: 3425907 NR Description: transcription factor VSF-1
  misc_feature (104)..(387): NCBI GI NO: 19423874 NR Description: unknown protein [Arabidopsis thaliana]
  misc_feature (104)..(387): NCBI GI NO: 30692108 NR Description: bZIP protein [Arabidopsis thaliana]
MSLPMAAFVPEHCSANKLARPPGLPPLPQAFVAQQRGDVCMEAADPAAGPRKAHRRSRSDVPFGYFPPAGHHQLPPPKVEAGWGGHLPAGGGDDDLFNAYLNLEGLDGLNSSDDRLDDGDSRGSSMRTNGADSSENESEECAADSRAGIRLCAAAADRREGLKRAAAAPVPRHARSLSMDSLIGKLNFSAGATGAASGVIPGPNRFSLEFGSAEFSPVEMKKIMADEKLAEMALADPKRVKRVLANRQSAARSKERKMRYIGELEHKVQILQTEATTLSAQLTLLQRDSAGIATQNNELKFRLQAMEQQAQLRDALNEALTAEVQRLKLATAELGDSCSSSNLAQQIQISVQDQMFQLHQQQATPIPFYQLQQAQQNGAGKKHEPTE

SEQ ID NO: 39547 - DNA, 1570 bp, Zea mays subsp. mays
  misc_feature (1)..(1570): Ceres Seq. ID no. 12363375
gcacgagaccattacctagaacatcctaatcaaaaatatataaaataatgtcctactcctaccccgccaccacgccgcggcagcacaagcccctctccgcccccagccagccctcctcagatctcaatcccggcgctccctccctccctcctcgcctcgggacagcgagcgccgccgtccgccgtccatggagcacgacgccgaggcgcgccgcgggttcgccaggatgggcttcgggtgcaagcactaccggaggcggtgccggatccgcgcgccctgctgcggcgacgtcttccactgccgccattgccacaacgagtccacgaaagacgggcacgagctggatcggcacgacgtccaatcggttatctgcctcgtctgtgacaccgagcagccgatcgcgcaggtgtgctgcaactgcggcgtctgcatgggggagtacttctgcgcagcctgcaacttcttggacgatgacgttgacaaggagcagttccattgcgacgattgcggcatctgcaggtgcgtgcgtgcgtgtgtctgtccctcttttttttgtttcttgttttcttttcttccttccattgcggtcactgagttacaggatctgagtcgccgcgcacaaatcgcgattttagtaggaaccccccccctctgattaactaactaagctactactacctattgatgatgatccaacaaagctgacagaaactgtggtgcatttgcatttgttcgaacagagtaggaggaaaggagaacttcttccactgccaaaagtgtggtaaaaaaataaacaaatccatcaccagccatattcaccacccgaggatgttctggtttcccatcaccagccatacatcatcctgttgttttttttctttacacacgcaggatcctgctactcgacgacccttcgcgacaggcactgctgcatcgagaactcgatgaagaacaactgccccatctgctacgaggcagtacctgttcgattcgctgagggagacgtcggtgctccgctgcggccacaccatgcacctggagtgcttccacgagatgttgaagcacgacaagttctcgtgccccatatgcgccacgcccatcttcgacatggacaagttcttcaaggccctcgacgcagagatggaggcaagctacttgtacacgggaaagggatgggtcgtgtgcaacgactgcagggacacgacgcaggtcttctccggcgtggcgggccacaagtgctgccactgccagtcccacaacacctgccgggtggcaccccccgtccttccgtagccaccaccaacaccacatcattgttgttggaattggatgcagccagccaagatacccccccagcagctacgctattattaccagtagcgcctgcgcttttacacaccgctccgttccagtccatgatgaactgcataatttcgtgccatgcaggtatgtacgtacactgtttggagatcggaagatttatccgactcgggacgtattatttgtaccacaacaaaacacgtgttactattgtaataccagatccggatatatacgaaactatttttag

SEQ ID NO: 39548 - protein, 208 aa, Zea mays subsp. mays
  peptide (1)..(208): Ceres Seq. ID no. 12363376
  misc_feature (1)..(12): NCBI GI NO: 4105798 NR Description: PGPD14 [Petunia x hybrida]
  misc_feature (1)..(12): NCBI GI NO: 13925695 NR Description: zinc finger protein [Danio rerio]
  misc_feature (1)..(12): NCBI GI NO: 18606337 NR Description: RIKEN cDNA 6720407C15 gene [Mus musculus]
  misc_feature (1)..(12): NCBI GI NO: 13386058 NR Description: androgen receptor N-terminal-interacting protein
  misc_feature (1)..(12): NCBI GI NO: 15419088 NR Description: CH-rich interacting match of PLAG1 [Mus musculus]
  misc_feature (1)..(12): NCBI GI NO: 24308061 NR Description: zinc finger protein 363
  misc_feature (1)..(12): NCBI GI NO: 28703891 NR Description: Similar to zinc finger protein 363 [Homo sapiens]
MKNNCPICYEAVPVRFAEGDVGAPLRPHHAPGVLPRDVEARQVLVPHMRHAHLRHGQVLQGPRRRDGGKLLVHGKGMGRVQRLQGHDAGLLRRGGPQVLPLPVPQHLPGGTPRPSVATTNTTSLLLELDAASQDTPPAATLLLPVAPALLHTAPFQSMMNCIISCHAGMYVHCLEIGRFIRLGTYYLYHNKTRVTIVIPDPDIYETIF

SEQ ID NO: 39549 - protein, 186 aa, Zea mays subsp. mays
  peptide (1)..(186): Ceres Seq. ID no. 12363377
  misc_feature (17)..(159): Pfam Name: Pfam Description:  Equine herpesvirus glycoprotein gp2
  misc_feature (14)..(166): NCBI GI NO: 11360494 NR Description: antifreeze glycopeptide AFGP polyprotein precursor
  misc_feature (4)..(164): NCBI GI NO: 17221114 NR Description: glycoprotein gp2 [Equine herpesvirus 1]
  misc_feature (8)..(166): NCBI GI NO: 11360494 NR Description: antifreeze glycopeptide AFGP polyprotein precursor
  misc_feature (4)..(164): NCBI GI NO: 17221106 NR Description: glycoprotein gp2 [Equine herpesvirus 1]
  misc_feature (7)..(156): NCBI GI NO: 11360494 NR Description: antifreeze glycopeptide AFGP polyprotein precursor
  misc_feature (4)..(159): NCBI GI NO: 17221114 NR Description: glycoprotein gp2 [Equine herpesvirus 1]
  misc_feature (4)..(159): NCBI GI NO: 17221106 NR Description: glycoprotein gp2 [Equine herpesvirus 1]
  misc_feature (2)..(159): NCBI GI NO: 13592175 NR Description: ppg3 [Leishmania major]
  misc_feature (17)..(159): NCBI GI NO: 17221106 NR Description: glycoprotein gp2 [Equine herpesvirus 1]
  misc_feature (7)..(157): NCBI GI NO: 11360494 NR Description: antifreeze glycopeptide AFGP polyprotein precursor
MSYSYPATTPRQHKPLSAPSQPSSDLNPGAPSLPPRLGTASAAVRRPWSTTPRRAAGSPGWASGASTTGGGAGSARPAAATSSTAAIATTSPRKTGTSWIGTTSNRLSASSVTPSSRSRRCAATAASAWGSTSAQPATSWTMTLTRSSSIATIAASAGACVRVSVPLFFVSCFLFFLPLRSLSYRI

SEQ ID NO: 39550 - protein, 161 aa, Zea mays subsp. mays
  peptide (1)..(161): Ceres Seq. ID no. 12363378
MRHAHLRHGQVLQGPRRRDGGKLLVHGKGMGRVQRLQGHDAGLLRRGGPQVLPLPVPQHLPGGTPRPSVATTNTTSLLLELDAASQDTPPAATLLLPVAPALLHTAPFQSMMNCIISCHAGMYVHCLEIGRFIRLGTYYLYHNKTRVTIVIPDPDIYETIF

SEQ ID NO: 39551 - protein, 155 aa, Zea mays subsp. mays
  peptide (1)..(155): Ceres Seq. ID no. 12363379
  misc_feature (18)..(94): Pfam Name: Pfam Description:  CHY zinc finger
  misc_feature (1)..(111): NCBI GI NO: 15238890 NR Description: putative protein; protein id: At5g18650
  misc_feature (9)..(111): NCBI GI NO: 30102616 NR Description: At3g62970 [Arabidopsis thaliana]
  misc_feature (9)..(111): NCBI GI NO: 30695702 NR Description: expressed protein [Arabidopsis thaliana]
  misc_feature (9)..(111): NCBI GI NO: 11358168 NR Description: hypothetical protein T20O10
  misc_feature (3)..(111): NCBI GI NO: 15237169 NR Description: PGPD14 protein; protein id: At5g22920
  misc_feature (16)..(111): NCBI GI NO: 21593716 NR Description: PGPD14 protein [Arabidopsis thaliana]
  misc_feature (1)..(111): NCBI GI NO: 4105798 NR Description: PGPD14 [Petunia x hybrida]
  misc_feature (17)..(111): NCBI GI NO: 37535002 NR Description: putative PGPD14 protein
  misc_feature (14)..(111): NCBI GI NO: 34910658 NR Description: putative PGPD14 protein
  misc_feature (17)..(111): NCBI GI NO: 13925695 NR Description: zinc finger protein [Danio rerio]
MEHDAEARRGFARMGFGCKHYRRRCRIRAPCCGDVFHCRHCHNESTKDGHELDRHDVQSVICLVCDTEQPIAQVCCNCGVCMGEYFCAACNFLDDDVDKEQFHCDDCGICRCVRACVCPSFFCFLFSFLPSIAVTELQDLSRRAQIAILVGTPPL

SEQ ID NO: 39552 - DNA, 1396 bp, Zea mays subsp. mays
  misc_feature (1)..(1396): Ceres Seq. ID no. 12369569
gcacgagaccattacctagaacatcctaatcgaaaagagttggaggagtcccctctctctctctatacctttcttgcccaagcagtcaatcaagctgggaaacttaaacagaaagcgaagaaattaaaggccaccaccgccttcacttgttccttttggttattttcctcttgctgtggcttaacttgacaagaagaagaggaagaagatgctacgtcggcaaggccgaggtggaaaatttctggaggaggtgctcatcgtcggcgggctcctgctggtgcagtgcgtgctctccggctacgtggtcttcaccgaccacctgctcgccctcggcgccgacccgctggccgtcgtcgtcgtcgccggagccgcctacgccgccttctgctttcccttcgccttcgccctcgagaggaagcgatggccttccacggtttcggggactctggtggcgcaatacctgctcattgctcttggagggacaatcgcgttccaagcgctgatgctgctggggatcaagaagaccacgccggccatcgcatccgccatgcccaacctcagccccggcctcatcttcatcgtcgcagcctgtttcaggctggagaggttcgacagggcgtgcaagtacacgcaggcgaagatggcggggacggtggtgtgcctggcgggagcgctggccatgggcttcctgcacagcccaacttctacgtcctcctctctgcaggcagcagcaggaggtggcgactactactacgactggatcctcggctgctgctgcctcgtcgccgccgtcaccgtcttcgcgctcgtcaccgtcctgcaggccgccacgctcgccgccttccccgcgccgctcaccatgtgctgcgccacctccgcgacgggcgccgctctcaccgccgtcctgcggctcgtcctggaagggaggttcctcggcatggggtcgcccaggatcgacgccacgctcgtcgcggggatcgtcgtcctcggcggggccgcggtgggcgcgtgcatggcgttccaggcgtggtgcctgggcaggaagggcccgctgttcgtctccgtcttcgggcccgtccagaccgtctgcaccgccatcctctccgcggctctcctccgccaagtcctcagcctgggaagcctcgcagggatcgtgctcatgttcactgggctctacattgtcctatggggccaagagcaacgagatctcggctgacgacgaggaacagtcgttgcagggtggcgacgacgccgagaaggcactcctagcctagcctagcaaaatccagagcgaatatcactgcacgctctgtatttgtaaaaatggaatggtgtctacgtacctgtatacatactcgagaggatttagagaaaaaggacatggctacgtttgttc

SEQ ID NO: 39553 - protein, 335 aa, Zea mays subsp. mays
  peptide (1)..(335): Ceres Seq. ID no. 12369570
  misc_feature (26)..(160): Pfam Name: Pfam Description:  Integral membrane protein DUF6
  misc_feature (1)..(260): NCBI GI NO: 34897744 NR Description: Similar to Arabidopsis thaliana DNA chromosome 4
  misc_feature (10)..(329): NCBI GI NO: 15238103 NR Description: nodulin-like protein; protein id: At5g47470.1
  misc_feature (13)..(260): NCBI GI NO: 22775675 NR Description: nodulin-like protein
  misc_feature (1)..(310): NCBI GI NO: 7488131 NR Description: probable membrane protein - Arabidopsis thaliana
  misc_feature (12)..(310): NCBI GI NO: 22328726 NR Description: membrane protein homolog; protein id: At4g16620.1
  misc_feature (156)..(260): NCBI GI NO: 6002778 NR Description: membrane protein homolog [Oryza sativa]
  misc_feature (12)..(69): NCBI GI NO: 6002778 NR Description: membrane protein homolog [Oryza sativa]
  misc_feature (99)..(130): NCBI GI NO: 6002778 NR Description: membrane protein homolog [Oryza sativa]
  misc_feature (1)..(331): NCBI GI NO: 34895316 NR Description: putative nodulin
  misc_feature (1)..(334): NCBI GI NO: 9294076 NR Description: nodulin-like protein [Arabidopsis thaliana]
MLRRQGRGGKFLEEVLIVGGLLLVQCVLSGYVVFTDHLLALGADPLAVVVVAGAAYAAFCFPFAFALERKRWPSTVSGTLVAQYLLIALGGTIAFQALMLLGIKKTTPAIASAMPNLSPGLIFIVAACFRLERFDRACKYTQAKMAGTVVCLAGALAMGFLHSPTSTSSSLQAAAGGGDYYYDWILGCCCLVAAVTVFALVTVLQAATLAAFPAPLTMCCATSATGAALTAVLRLVLEGRFLGMGSPRIDATLVAGIVVLGGAAVGACMAFQAWCLGRKGPLFVSVFGPVQTVCTAILSAALLRQVLSLGSLAGIVLMFTGLYIVLWGQEQRDLG

SEQ ID NO: 39554 - protein, 282 aa, Zea mays subsp. mays
  peptide (1)..(282): Ceres Seq. ID no. 12369571
MAFHGFGDSGGAIPAHCSWRDNRVPSADAAGDQEDHAGHRIRHAQPQPRPHLHRRSLFQAGEVRQGVQVHAGEDGGDGGVPGGSAGHGLPAQPNFYVLLSAGSSRRWRLLLRLDPRLLLPRRRRHRLRARHRPAGRHARRLPRAAHHVLRHLRDGRRSHRRPAARPGREVPRHGVAQDRRHARRGDRRPRRGRGGRVHGVPGVVPGQEGPAVRLRLRARPDRLHRHPLRGSPPPSPQPGKPRRDRAHVHWALHCPMGPRATRSRLTTRNSRCRVATTPRRHS

SEQ ID NO: 39555 - protein, 237 aa, Zea mays subsp. mays
  peptide (1)..(237): Ceres Seq. ID no. 12369572
  misc_feature (1)..(62): Pfam Name: Pfam Description:  Integral membrane protein DUF6
  misc_feature (1)..(162): NCBI GI NO: 34897744 NR Description: Similar to Arabidopsis thaliana DNA chromosome 4
  misc_feature (1)..(231): NCBI GI NO: 15238103 NR Description: nodulin-like protein; protein id: At5g47470.1
  misc_feature (1)..(162): NCBI GI NO: 22775675 NR Description: nodulin-like protein
  misc_feature (1)..(212): NCBI GI NO: 7488131 NR Description: probable membrane protein - Arabidopsis thaliana
  misc_feature (1)..(212): NCBI GI NO: 22328726 NR Description: membrane protein homolog; protein id: At4g16620.1
  misc_feature (58)..(162): NCBI GI NO: 6002778 NR Description: membrane protein homolog [Oryza sativa]
  misc_feature (1)..(32): NCBI GI NO: 6002778 NR Description: membrane protein homolog [Oryza sativa]
  misc_feature (1)..(233): NCBI GI NO: 34895316 NR Description: putative nodulin
  misc_feature (1)..(236): NCBI GI NO: 9294076 NR Description: nodulin-like protein [Arabidopsis thaliana]
  misc_feature (1)..(236): NCBI GI NO: 15229596 NR Description: integral membrane protein, putative
MLLGIKKTTPAIASAMPNLSPGLIFIVAACFRLERFDRACKYTQAKMAGTVVCLAGALAMGFLHSPTSTSSSLQAAAGGGDYYYDWILGCCCLVAAVTVFALVTVLQAATLAAFPAPLTMCCATSATGAALTAVLRLVLEGRFLGMGSPRIDATLVAGIVVLGGAAVGACMAFQAWCLGRKGPLFVSVFGPVQTVCTAILSAALLRQVLSLGSLAGIVLMFTGLYIVLWGQEQRDLG

SEQ ID NO: 39556 - DNA, 1633 bp, Zea mays subsp. mays
  misc_feature (1)..(1633): Ceres Seq. ID no. 12363380
gcacgagaccattacctagaacatcctaatcgaaaaaatatagaaccctgttcccaccggcgctcactgcaccttccccagcggccaccacccgaggccggtccccgctgacccgcctccgtggaccggggacacgcggcggcgaccggcgaggcggtccctgcttcctctttctactcctcacaagtatgtatgacacgcaccacccgcaccgcacccacccaccaacccgaccttccgctgctctcacacacacacacacactctacacgcgagcgagaccacgcgccggaccgccgcaagccggtcgccgccgccgcgacctggagcttgcgagctagctctggcctcgctgcctgcgccgactgagatggacccgcggtttccgctgccggccgcggcggcgccgtccacgggcggcggcggcggcgccagagggcaccaccggcgggcccactcggagacgttcctcagcttccacgacgcggacctgctcctcgacccggacggcgacttcttctccgacctcgacttcccctccctctccgacgactctccggccgccttcgaccccaccccgccgccgcatccgcagcagcagccgccgcaggcttccccggccccacgtccgcccggcgggacccacacgcggagcctctccctcgacgccgccttcttcgagggcctcgcgtttcagggacccagtgggagcgccgggggtggaggtgggcccggccacaagaggagcggctcgatggatggggacacctcgccgttcgagggcgagtcggcgctctccagcggcctgccggactacgccaagaaggccatgcccgccgagaggatcgccgagctcgcgctcatcgaccccaagcgcgcaaagaggattctggcgaacaggcagtcggcagcgaggtcaaaggagaggaagatcatgtacactagtgaactggagaagaaggtccagactctgcaaacggaggccactacgctgtcagcacagctgaccctgctccagagggatacaactggtttaactgccgaaaacagagagctcaagcttcggttgcagtccatggaagagcaagctaaactgcgggacgctttgaatgaagccctgcgagaagaagtccagcgacttaagatagccgcaggacaagtcgggaacatgaatgggaaccccttcaatggtggactccagcagcagattccatcctatttcgtgcagcagcagcagatgccgtacttcggtggccaccaggctcagcatcacagtcaaaatcaaaaccatcgtcaccagatctcatcaaatgtggggcagacgctcagtggtcagtccctaaacgactccatggatttcatgtgaggagtacaatatcagggccagtactacatcgtataccgactgcatttcagcactgtaaagatagctaaatgtacaatgtatgcatgtgcctcattggtagtgtgtagttagctcttctttgtatcattattctgaaaatggctcgtgtatgtcaaaatgatgtctcttttctttgctggtttctggagtaatgtgttagactgactagctacctttaacaatttattatgtaaatctttagctttttttaatggtggaaggttcttc

SEQ ID NO: 39557 - protein, 331 aa, Zea mays subsp. mays
  peptide (1)..(331): Ceres Seq. ID no. 12363381
  misc_feature (166)..(228): Pfam Name: Pfam Description:  bZIP transcription factor
  misc_feature (129)..(331): NCBI GI NO: 29367343 NR Description: bZIP-like protein
  misc_feature (144)..(331): NCBI GI NO: 19401702 NR Description: susceptibility transcription factor RVS1
  misc_feature (33)..(330): NCBI GI NO: 8777512 NR Description: bZIP transcriptional activator RSG
  misc_feature (63)..(310): NCBI GI NO: 2921823 NR Description: shoot-forming PKSF1 [Paulownia kawakamii]
  misc_feature (62)..(304): NCBI GI NO: 21553989 NR Description: VirE2-interacting protein VIP1
  misc_feature (62)..(304): NCBI GI NO: 18400998 NR Description: VirE2-interacting protein VIP1
  misc_feature (78)..(304): NCBI GI NO: 7258340 NR Description: VirE2-interacting protein VIP1
  misc_feature (100)..(325): NCBI GI NO: 34394739 NR Description: putative transcription activator RF2a
  misc_feature (1)..(317): NCBI GI NO: 21740783 NR Description: OSJNBa0067K08.24
  misc_feature (25)..(310): NCBI GI NO: 15221391 NR Description: bZIP protein; protein id: At1g06070
MDPRFPLPAAAAPSTGGGGGARGHHRRAHSETFLSFHDADLLLDPDGDFFSDLDFPSLSDDSPAAFDPTPPPHPQQQPPQASPAPRPPGGTHTRSLSLDAAFFEGLAFQGPSGSAGGGGGPGHKRSGSMDGDTSPFEGESALSSGLPDYAKKAMPAERIAELALIDPKRAKRILANRQSAARSKERKIMYTSELEKKVQTLQTEATTLSAQLTLLQRDTTGLTAENRELKLRLQSMEEQAKLRDALNEALREEVQRLKIAAGQVGNMNGNPFNGGLQQQIPSYFVQQQQMPYFGGHQAQHHSQNQNHRHQISSNVGQTLSGQSLNDSMDFM

SEQ ID NO: 39558 - protein, 203 aa, Zea mays subsp. mays
  peptide (1)..(203): Ceres Seq. ID no. 12363382
  misc_feature (38)..(100): Pfam Name: Pfam Description:  bZIP transcription factor
  misc_feature (1)..(203): NCBI GI NO: 29367343 NR Description: bZIP-like protein
  misc_feature (16)..(203): NCBI GI NO: 19401702 NR Description: susceptibility transcription factor RVS1
  misc_feature (1)..(202): NCBI GI NO: 8777512 NR Description: bZIP transcriptional activator RSG
  misc_feature (1)..(182): NCBI GI NO: 2921823 NR Description: shoot-forming PKSF1 [Paulownia kawakamii]
  misc_feature (1)..(176): NCBI GI NO: 21553989 NR Description: VirE2-interacting protein VIP1
  misc_feature (1)..(176): NCBI GI NO: 18400998 NR Description: VirE2-interacting protein VIP1
  misc_feature (1)..(176): NCBI GI NO: 7258340 NR Description: VirE2-interacting protein VIP1
  misc_feature (1)..(197): NCBI GI NO: 34394739 NR Description: putative transcription activator RF2a
  misc_feature (1)..(189): NCBI GI NO: 21740783 NR Description: OSJNBa0067K08.24
  misc_feature (1)..(182): NCBI GI NO: 15221391 NR Description: bZIP protein; protein id: At1g06070
MDGDTSPFEGESALSSGLPDYAKKAMPAERIAELALIDPKRAKRILANRQSAARSKERKIMYTSELEKKVQTLQTEATTLSAQLTLLQRDTTGLTAENRELKLRLQSMEEQAKLRDALNEALREEVQRLKIAAGQVGNMNGNPFNGGLQQQIPSYFVQQQQMPYFGGHQAQHHSQNQNHRHQISSNVGQTLSGQSLNDSMDFM

SEQ ID NO: 39559 - protein, 178 aa, Zea mays subsp. mays
  peptide (1)..(178): Ceres Seq. ID no. 12363383
  misc_feature (13)..(75): Pfam Name: Pfam Description:  bZIP transcription factor
  misc_feature (1)..(178): NCBI GI NO: 29367343 NR Description: bZIP-like protein
  misc_feature (1)..(178): NCBI GI NO: 19401702 NR Description: susceptibility transcription factor RVS1
  misc_feature (1)..(177): NCBI GI NO: 8777512 NR Description: bZIP transcriptional activator RSG
  misc_feature (1)..(157): NCBI GI NO: 2921823 NR Description: shoot-forming PKSF1 [Paulownia kawakamii]
  misc_feature (1)..(151): NCBI GI NO: 21553989 NR Description: VirE2-interacting protein VIP1
  misc_feature (1)..(151): NCBI GI NO: 18400998 NR Description: VirE2-interacting protein VIP1
  misc_feature (1)..(151): NCBI GI NO: 7258340 NR Description: VirE2-interacting protein VIP1
  misc_feature (1)..(172): NCBI GI NO: 34394739 NR Description: putative transcription activator RF2a
  misc_feature (1)..(164): NCBI GI NO: 21740783 NR Description: OSJNBa0067K08.24
  misc_feature (1)..(157): NCBI GI NO: 15221391 NR Description: bZIP protein; protein id: At1g06070
MPAERIAELALIDPKRAKRILANRQSAARSKERKIMYTSELEKKVQTLQTEATTLSAQLTLLQRDTTGLTAENRELKLRLQSMEEQAKLRDALNEALREEVQRLKIAAGQVGNMNGNPFNGGLQQQIPSYFVQQQQMPYFGGHQAQHHSQNQNHRHQISSNVGQTLSGQSLNDSMDFM

SEQ ID NO: 39560 - DNA, 918 bp, Zea mays subsp. mays
  misc_feature (1)..(918): Ceres Seq. ID no. 12415286
aactagtggatcccccgggctgcaggaattcgcacgagaccattacctagaacatcctaatcgaaaaagtgaggagccccaaatccacttcaacgatggaggaaagcctgtgcgccgtggagaagcgcgggcgggtgcacgtcatcagccctcaccggcgcgggggagcaccgcctcagcccggccctgctctccgccctccgctccgcggtcgcagccgcccgccgcgcctcccccggtgcgctcgtcctggccggcgagggcaagttcttcagcaacggctacgacctcgcgtgggcgcgcgcggggccggccccggcgccggagcaccgcctctccacgatgcgcgccgcgttccgcggcctcgtcgccgacctgctcgcgctccccgtgccaacggtcgcggccgtcacgggccacgcagcgggcgctggctgcgcgctcgcgctggcgcacgacgccgtcgccatgcgcgcctcccgcgggttcctctacattagcgaggtcgacgccgggatcaagatcgtcgattttgtcggcgagctggttcggcagaaggtccccgacgcggccgctaggagggacctggtgatgaagggggagaagatgacggccgcgcaggccgcgcgccgaggcatcgtggatgcggccgtggacggcggcgtggaggacgtcgtggccgcggcggtcgccatggctgaggagctcgctgccagagactgggacggagagaacctggccgccatcaggaaggacgcatggccggttttgtggagcaaggtcaaggactacggctgcgatgtgccggccaggccgcgtctgtaacggcctgcttgcgaatttcggtcgtttctgtgacttgccatttggtcgttatcaacaatctgaaagcaatgatccttggccttgggaatgtgc

SEQ ID NO: 39561 - protein, 196 aa, Zea mays subsp. mays
  peptide (1)..(196): Ceres Seq. ID no. 12415287
  misc_feature (50)..(172): Pfam Name: Pfam Description:  Atrophin-1 family
  misc_feature (4)..(196): NCBI GI NO: 30354095 NR Description: Similar to serine/arginine repetitive matrix 2
  misc_feature (38)..(196): NCBI GI NO: 30424862 NR Description: RIKEN cDNA 5033413A03 [Mus musculus]
TSGSPGLQEFARDHYLEHPNRKSEEPQIHFNDGGKPVRRGEARAGARHQPSPARGSTASARPCSPPSAPRSQPPAAPPPVRSSWPARASSSATATTSRGRARGRPRRRSTASPRCAPRSAASSPTCSRSPCQRSRPSRATQRALAARSRWRTTPSPCAPPAGSSTLARSTPGSRSSILSASWFGRRSPTRPLGGTW

SEQ ID NO: 39562 - protein, 160 aa, Zea mays subsp. mays
  peptide (1)..(160): Ceres Seq. ID no. 12415288
  misc_feature (1)..(105): Pfam Name: Pfam Description:  Enoyl-CoA hydratase/isomerase family
  misc_feature (1)..(158): NCBI GI NO: 34903766 NR Description: unnamed protein product
  misc_feature (1)..(160): NCBI GI NO: 21555734 NR Description: carnitine racemase like protein
  misc_feature (1)..(143): NCBI GI NO: 15236498 NR Description: carnitine racemase like protein
  misc_feature (1)..(143): NCBI GI NO: 15236499 NR Description: carnitine racemase like protein
  misc_feature (1)..(137): NCBI GI NO: 15218713 NR Description: hypothetical protein; protein id: At1g65520.1
  misc_feature (1)..(126): NCBI GI NO: 15828352 NR Description: possible enoyl-CoA hydratase
  misc_feature (1)..(136): NCBI GI NO: 23017142 NR Description: hypothetical protein [Thermobifida fusca]
  misc_feature (1)..(137): NCBI GI NO: 23016771 NR Description: hypothetical protein
  misc_feature (1)..(140): NCBI GI NO: 40739395 NR Description: hypothetical protein AN6767.2
  misc_feature (1)..(126): NCBI GI NO: 8896103 NR Description: enoyl-CoA hydratase-like protein
MRAAFRGLVADLLALPVPTVAAVTGHAAGAGCALALAHDAVAMRASRGFLYISEVDAGIKIVDFVGELVRQKVPDAAARRDLVMKGEKMTAAQAARRGIVDAAVDGGVEDVVAAAVAMAEELAARDWDGENLAAIRKDAWPVLWSKVKDYGCDVPARPRL

SEQ ID NO: 39563 - protein, 134 aa, Zea mays subsp. mays
  peptide (1)..(134): Ceres Seq. ID no. 12415289
  misc_feature (19)..(112): Pfam Name: Pfam Description:  HlyD family secretion protein
  misc_feature (21)..(134): NCBI GI NO: 22956890 NR Description: hypothetical protein [Rhodobacter sphaeroides]
  misc_feature (5)..(134): NCBI GI NO: 29247944 NR Description: GLP_26_54603_52153 [Giardia lamblia ATCC 50803]
  misc_feature (1)..(134): NCBI GI NO: 5821145 NR Description: RNA binding protein [Homo sapiens]
  misc_feature (1)..(134): NCBI GI NO: 5821143 NR Description: RNA binding protein [Homo sapiens]
  misc_feature (1)..(134): NCBI GI NO: 30424862 NR Description: RIKEN cDNA 5033413A03 [Mus musculus]
  misc_feature (1)..(134): NCBI GI NO: 6649242 NR Description: splicing coactivator subunit SRm300 [Homo sapiens]
  misc_feature (1)..(134): NCBI GI NO: 19923466 NR Description: splicing coactivator subunit SRm300
  misc_feature (80)..(134): NCBI GI NO: 29828813 NR Description: hypothetical protein
MEESLCAVEKRGRVHVISPHRRGGAPPQPGPALRPPLRGRSRPPRLPRCARPGRRGQVLQQRLRPRVGARGAGPGAGAPPLHDARRVPRPRRRPARAPRANGRGRHGPRSGRWLRARAGARRRRHARLPRVPLH

SEQ ID NO: 39564 - DNA, 1597 bp, Zea mays subsp. mays; identical to SEQ ID NO: 35273
  misc_feature (1)..(1597): Ceres Seq. ID no. 12411213

SEQ ID NO: 39565 - protein, 460 aa, Zea mays subsp. mays; identical to SEQ ID NO: 35274
  peptide (1)..(460): Ceres Seq. ID no. 12411214
  misc_feature (82)..(431): Pfam Name: Pfam Description:  NADH:flavin oxidoreductase / NADH oxidase family
  misc_feature (71)..(453): NCBI GI NO: 12056507 NR Description: 12-oxophytodienoate reductase 3
  misc_feature (81)..(460): NCBI GI NO: 6707797 NR Description: 12-oxo-phytodienoate reductase
  misc_feature (81)..(460): NCBI GI NO: 5059115 NR Description: OPDA-reductase homolog [Arabidopsis thaliana]
  misc_feature (81)..(460): NCBI GI NO: 10242314 NR Description: 12-oxo-phytodienoate reductase
  misc_feature (81)..(460): NCBI GI NO: 7688991 NR Description: 12-oxo-phytodienoate reductase
  misc_feature (81)..(460): NCBI GI NO: 15225045 NR Description: 12-oxophytodienoate reductase
  misc_feature (69)..(453): NCBI GI NO: 23495288 NR Description: 12-oxophytodienoic acid reductase [Oryza sativa]
  misc_feature (74)..(453): NCBI GI NO: 40645459 NR Description: LEDI-5c protein [Lithospermum erythrorhizon]
  misc_feature (62)..(453): NCBI GI NO: 7449901 NR Description: probable 12-oxophytodienoate reductase (EC1
  misc_feature (73)..(453): NCBI GI NO: 14277800 NR Description: Chain A

SEQ ID NO: 39566 - protein, 399 aa, Zea mays subsp. mays; identical to SEQ ID NO: 35275
  peptide (1)..(399): Ceres Seq. ID no. 12411215
  misc_feature (21)..(370): Pfam Name: Pfam Description:  NADH:flavin oxidoreductase / NADH oxidase family
  misc_feature (10)..(392): NCBI GI NO: 12056507 NR Description: 12-oxophytodienoate reductase 3
  misc_feature (20)..(399): NCBI GI NO: 6707797 NR Description: 12-oxo-phytodienoate reductase
  misc_feature (20)..(399): NCBI GI NO: 5059115 NR Description: OPDA-reductase homolog [Arabidopsis thaliana]
  misc_feature (20)..(399): NCBI GI NO: 10242314 NR Description: 12-oxo-phytodienoate reductase
  misc_feature (20)..(399): NCBI GI NO: 7688991 NR Description: 12-oxo-phytodienoate reductase
  misc_feature (20)..(399): NCBI GI NO: 15225045 NR Description: 12-oxophytodienoate reductase
  misc_feature (8)..(392): NCBI GI NO: 23495288 NR Description: 12-oxophytodienoic acid reductase [Oryza sativa]
  misc_feature (13)..(392): NCBI GI NO: 40645459 NR Description: LEDI-5c protein [Lithospermum erythrorhizon]
  misc_feature (1)..(392): NCBI GI NO: 7449901 NR Description: probable 12-oxophytodienoate reductase (EC1
  misc_feature (12)..(392): NCBI GI NO: 14277800 NR Description: Chain A

SEQ ID NO: 39567 - protein, 373 aa, Zea mays subsp. mays; identical to SEQ ID NO: 35276
  peptide (1)..(373): Ceres Seq. ID no. 12411216
  misc_feature (1)..(344): Pfam Name: Pfam Description:  NADH:flavin oxidoreductase / NADH oxidase family
  misc_feature (1)..(366): NCBI GI NO: 12056507 NR Description: 12-oxophytodienoate reductase 3
  misc_feature (1)..(373): NCBI GI NO: 6707797 NR Description: 12-oxo-phytodienoate reductase
  misc_feature (1)..(373): NCBI GI NO: 5059115 NR Description: OPDA-reductase homolog [Arabidopsis thaliana]
  misc_feature (1)..(373): NCBI GI NO: 10242314 NR Description: 12-oxo-phytodienoate reductase
  misc_feature (1)..(373): NCBI GI NO: 7688991 NR Description: 12-oxo-phytodienoate reductase
  misc_feature (1)..(373): NCBI GI NO: 15225045 NR Description: 12-oxophytodienoate reductase
  misc_feature (1)..(366): NCBI GI NO: 23495288 NR Description: 12-oxophytodienoic acid reductase [Oryza sativa]
  misc_feature (1)..(366): NCBI GI NO: 40645459 NR Description: LEDI-5c protein [Lithospermum erythrorhizon]
  misc_feature (1)..(366): NCBI GI NO: 7449901 NR Description: probable 12-oxophytodienoate reductase (EC1
  misc_feature (1)..(366): NCBI GI NO: 14277800 NR Description: Chain A

SEQ ID NO: 39568 - DNA, 718 bp, Zea mays subsp. mays
  misc_feature (1)..(718): Ceres Seq. ID no. 12549392
  misc_feature (492)..(492): n is a, c, t, g, unknown, or other
  misc_feature (589)..(589): n is a, c, t, g, unknown, or other
  misc_feature (684)..(684): n is a, c, t, g, unknown, or other
  misc_feature (699)..(699): n is a, c, t, g, unknown, or other
aacgctgcacgacgctagaggaaaacgcactgccaacggacaacggagtcaggtgcggcgggaggtagcatgagggagcagcaggattccggcgacgtgacggggcgccggggcggggtcatcaggtcgctgctgggcgtcgagcgccggctcgcggagggcgacgcggacgccgagggggcgctcggagcctcctcggagaagcagcatttggccgcggacagcggcgaggagaggaaggcggtggtgagggtggtggcggctgacatgccgcccgcgctgcagcgccgcgcgttccgctgcgcccgcgacgagctcgcggcgatgccgcacttcccgcgccggctcgagcccaagcgcctcgcgctggcgctcaagaaggagtttgatactgcttacgggccagcttggcactgcatcgtggggacgagtttcggttcgtatgtcacgcacgcccggggcggtttcttgtatttttccgtcgataaggtntacatcctgctcttcaggacagccgtggagccctctaatcattgacggccaccggcctgccagcaatggacaaatggctcataaaaacgcgcagttnttgggacagcttgcaccaaattcagttgttcagtcagctaggccgagcccttgtaacttgtaaatcgcattgtttcttggtaggcaaatgtaaantactccttatgcttntgataaaatttaacatttc

SEQ ID NO: 39569 - protein, 155 aa, Zea mays subsp. mays
  peptide (1)..(155): Ceres Seq. ID no. 12549393
  misc_feature (60)..(149): Pfam Name: Pfam Description:  Dynein light chain type 1
  misc_feature (52)..(155): NCBI GI NO: 38567715 NR Description: B1358B12.13
  misc_feature (39)..(152): NCBI GI NO: 15220678 NR Description: dynein light subunit lc6, flagellar outer arm
  misc_feature (25)..(154): NCBI GI NO: 15241269 NR Description: dynein light chain - like protein
  misc_feature (60)..(150): NCBI GI NO: 34913978 NR Description: dynein light chain - like protein
  misc_feature (55)..(148): NCBI GI NO: 2811014 NR Description: DYNEIN LIGHT CHAIN LC6, FLAGELLAR OUTER ARM
  misc_feature (55)..(148): NCBI GI NO: 34785679 NR Description: Unknown (protein for MGC:68763) [Xenopus laevis]
  misc_feature (55)..(148): NCBI GI NO: 30961847 NR Description: neuronal nitric oxidse synthase protein inhibitor
  misc_feature (26)..(148): NCBI GI NO: 34902908 NR Description: unnamed protein product
  misc_feature (55)..(148): NCBI GI NO: 18087731 NR Description: dynein light chain 2; RIKEN cDNA 1700064A15 gene
  misc_feature (57)..(147): NCBI GI NO: 28829295 NR Description: similar to Anthocidaris crassispina (Sea urchin)
  misc_feature (141)..(141): Xaa is any aa, unknown or other
MREQQDSGDVTGRRGGVIRSLLGVERRLAEGDADAEGALGASSEKQHLAADSGEERKAVVRVVAADMPPALQRRAFRCARDELAAMPHFPRRLEPKRLALALKKEFDTAYGPAWHCIVGTSFGSYVTHARGGFLYFSVDKXYILLFRTAVEPSNH

SEQ ID NO: 39570 - protein, 89 aa, Zea mays subsp. mays
  peptide (1)..(89): Ceres Seq. ID no. 12549394
  misc_feature (1)..(83): Pfam Name: Pfam Description:  Dynein light chain type 1
  misc_feature (1)..(89): NCBI GI NO: 38567715 NR Description: B1358B12.13
  misc_feature (1)..(86): NCBI GI NO: 15220678 NR Description: dynein light subunit lc6, flagellar outer arm
  misc_feature (1)..(88): NCBI GI NO: 15241269 NR Description: dynein light chain - like protein
  misc_feature (1)..(84): NCBI GI NO: 34913978 NR Description: dynein light chain - like protein
  misc_feature (1)..(82): NCBI GI NO: 2811014 NR Description: DYNEIN LIGHT CHAIN LC6, FLAGELLAR OUTER ARM
  misc_feature (1)..(82): NCBI GI NO: 34785679 NR Description: Unknown (protein for MGC:68763) [Xenopus laevis]
  misc_feature (1)..(82): NCBI GI NO: 30961847 NR Description: neuronal nitric oxidse synthase protein inhibitor
  misc_feature (1)..(82): NCBI GI NO: 34902908 NR Description: unnamed protein product
  misc_feature (1)..(82): NCBI GI NO: 18087731 NR Description: dynein light chain 2; RIKEN cDNA 1700064A15 gene
  misc_feature (1)..(81): NCBI GI NO: 28829295 NR Description: similar to Anthocidaris crassispina (Sea urchin)
  misc_feature (75)..(75): Xaa is any aa, unknown or other
MPPALQRRAFRCARDELAAMPHFPRRLEPKRLALALKKEFDTAYGPAWHCIVGTSFGSYVTHARGGFLYFSVDKXYILLFRTAVEPSNH

SEQ ID NO: 39571 - DNA, 1288 bp, Zea mays subsp. mays
  misc_feature (1)..(1288): Ceres Seq. ID no. 12364285
gcacgagaccattacctagaacatcctaatcgaaaaagagacatcgatcagctagctagctgctgccaagagctagccaggggacagagcagcagcttgaagttggtcaccaatgctaaggatgggccgcgccagcgccacagcaggtgtgttgcgcttcgtcagggcgttcgccctctgcgtggctacggcatgcctcctcctggcggccggcatgccctcgcctgtggcggcgcaggacccgtcgaagctgagcctgcagtactactccaagacgtgccccaacgtggagcacgtcgtccggacggagatggagtgcgcggtgcgcgccgacacgcgcaacgccgcgctcatgctccgcctccatttccatgactgcttcgtgcagggctgcgacgggtcggtgctgctcgacgacacggcaaccatgatcggagagaagcaggcggagcagaacgtcaactcgctgaaagggttcgatctggttgacaagatcaaggagaagctggaagccgagtgccctggaaccgtctcctgcgcagacctgctggcgattgcagctagggatgcggttgtgctggttggtgggccttactgggatgtcccagtaggaagactggactccaagaaggcgagcctggacctagcaaacagcgacatccctacggcccagcaaggcctcctcacgctcattgccaagttctgggagaagggccttgatgccactgacatggtggccctcgtcggatcccacacgatcggattcgctaggtgcgagaatttccgggacagaatctacggcgacttcgagatgacgtccaagtacaacccgtcgtccgaggcctacctgagcaagctgaaggaggtgtgcccgcgggacggcggcgacgacaacatcagcgccatggacagccacacctccgacgtgttcgacaaacgcctacttcgagaccctcatcaagggcgagggcctgctcaactccgaccaggcgatgtggtccagcatcgcgggctactccacctccgacacagtcaacaagtactgggccgaccccgaggccttcttcaagcagttctccgactccatggtgaagatgggcaacatcaccaaccctgccggcggcgaggtcaggaagacctgcagatttgtcaacacataggatatgataatatatataggatgctcgagactgcaggagaaactcggtggttgtgattgtactttacgcctgcaccttctttcgatggcttgtttagggtggcttggaaaataaaaaacccctttgcc

SEQ ID NO: 39572 - protein, 367 aa, Zea mays subsp. mays
  peptide (1)..(367): Ceres Seq. ID no. 12364286
  misc_feature (63)..(286): Pfam Name: Pfam Description:  Peroxidase
  misc_feature (12)..(286): NCBI GI NO: 11862958 NR Description: putative peroxidase
  misc_feature (93)..(286): NCBI GI NO: 34898676 NR Description: putative peroxidase
  misc_feature (12)..(70): NCBI GI NO: 34898676 NR Description: putative peroxidase
  misc_feature (47)..(286): NCBI GI NO: 18409140 NR Description: peroxidase, putative; protein id: At1g68850.1
  misc_feature (29)..(286): NCBI GI NO: 15234394 NR Description: peroxidase, putative; protein id: At4g36430
  misc_feature (43)..(286): NCBI GI NO: 15224116 NR Description: peroxidase, putative; protein id: At2g18150
  misc_feature (43)..(286): NCBI GI NO: 21537275 NR Description: putative peroxidase [Arabidopsis thaliana]
  misc_feature (51)..(286): NCBI GI NO: 15224114 NR Description: peroxidase, putative; protein id: At2g18140.1
  misc_feature (47)..(274): NCBI GI NO: 7658147 NR Description: peroxidase [Asparagus officinalis]
  misc_feature (21)..(286): NCBI GI NO: 34903038 NR Description: unnamed protein product
MLRMGRASATAGVLRFVRAFALCVATACLLLAAGMPSPVAAQDPSKLSLQYYSKTCPNVEHVVRTEMECAVRADTRNAALMLRLHFHDCFVQGCDGSVLLDDTATMIGEKQAEQNVNSLKGFDLVDKIKEKLEAECPGTVSCADLLAIAARDAVVLVGGPYWDVPVGRLDSKKASLDLANSDIPTAQQGLLTLIAKFWEKGLDATDMVALVGSHTIGFARCENFRDRIYGDFEMTSKYNPSSEAYLSKLKEVCPRDGGDDNISAMDSHTSDVFDKRLLRDPHQGRGPAQLRPGDVVQHRGLLHLRHSQQVLGRPRGLLQAVLRLHGEDGQHHQPCRRRGQEDLQICQHIGYDNIYRMLETAGETRWL

SEQ ID NO: 39573 - protein, 364 aa, Zea mays subsp. mays
  peptide (1)..(364): Ceres Seq. ID no. 12364287
  misc_feature (60)..(283): Pfam Name: Pfam Description:  Peroxidase
  misc_feature (9)..(283): NCBI GI NO: 11862958 NR Description: putative peroxidase
  misc_feature (90)..(283): NCBI GI NO: 34898676 NR Description: putative peroxidase
  misc_feature (9)..(67): NCBI GI NO: 34898676 NR Description: putative peroxidase
  misc_feature (44)..(283): NCBI GI NO: 18409140 NR Description: peroxidase, putative; protein id: At1g68850.1
  misc_feature (26)..(283): NCBI GI NO: 15234394 NR Description: peroxidase, putative; protein id: At4g36430
  misc_feature (40)..(283): NCBI GI NO: 15224116 NR Description: peroxidase, putative; protein id: At2g18150
  misc_feature (40)..(283): NCBI GI NO: 21537275 NR Description: putative peroxidase [Arabidopsis thaliana]
  misc_feature (48)..(283): NCBI GI NO: 15224114 NR Description: peroxidase, putative; protein id: At2g18140.1
  misc_feature (44)..(271): NCBI GI NO: 7658147 NR Description: peroxidase [Asparagus officinalis]
  misc_feature (18)..(283): NCBI GI NO: 34903038 NR Description: unnamed protein product
MGRASATAGVLRFVRAFALCVATACLLLAAGMPSPVAAQDPSKLSLQYYSKTCPNVEHVVRTEMECAVRADTRNAALMLRLHFHDCFVQGCDGSVLLDDTATMIGEKQAEQNVNSLKGFDLVDKIKEKLEAECPGTVSCADLLAIAARDAVVLVGGPYWDVPVGRLDSKKASLDLANSDIPTAQQGLLTLIAKFWEKGLDATDMVALVGSHTIGFARCENFRDRIYGDFEMTSKYNPSSEAYLSKLKEVCPRDGGDDNISAMDSHTSDVFDKRLLRDPHQGRGPAQLRPGDVVQHRGLLHLRHSQQVLGRPRGLLQAVLRLHGEDGQHHQPCRRRGQEDLQICQHIGYDNIYRMLETAGETRWL

SEQ ID NO: 39574 - protein, 333 aa, Zea mays subsp. mays
  peptide (1)..(333): Ceres Seq. ID no. 12364288
  misc_feature (29)..(252): Pfam Name: Pfam Description:  Peroxidase
  misc_feature (1)..(252): NCBI GI NO: 11862958 NR Description: putative peroxidase
  misc_feature (59)..(252): NCBI GI NO: 34898676 NR Description: putative peroxidase
  misc_feature (1)..(36): NCBI GI NO: 34898676 NR Description: putative peroxidase
  misc_feature (13)..(252): NCBI GI NO: 18409140 NR Description: peroxidase, putative; protein id: At1g68850.1
  misc_feature (1)..(252): NCBI GI NO: 15234394 NR Description: peroxidase, putative; protein id: At4g36430
  misc_feature (9)..(252): NCBI GI NO: 15224116 NR Description: peroxidase, putative; protein id: At2g18150
  misc_feature (9)..(252): NCBI GI NO: 21537275 NR Description: putative peroxidase [Arabidopsis thaliana]
  misc_feature (17)..(252): NCBI GI NO: 15224114 NR Description: peroxidase, putative; protein id: At2g18140.1
  misc_feature (13)..(240): NCBI GI NO: 7658147 NR Description: peroxidase [Asparagus officinalis]
  misc_feature (1)..(252): NCBI GI NO: 34903038 NR Description: unnamed protein product
MPSPVAAQDPSKLSLQYYSKTCPNVEHVVRTEMECAVRADTRNAALMLRLHFHDCFVQGCDGSVLLDDTATMIGEKQAEQNVNSLKGFDLVDKIKEKLEAECPGTVSCADLLAIAARDAVVLVGGPYWDVPVGRLDSKKASLDLANSDIPTAQQGLLTLIAKFWEKGLDATDMVALVGSHTIGFARCENFRDRIYGDFEMTSKYNPSSEAYLSKLKEVCPRDGGDDNISAMDSHTSDVFDKRLLRDPHQGRGPAQLRPGDVVQHRGLLHLRHSQQVLGRPRGLLQAVLRLHGEDGQHHQPCRRRGQEDLQICQHIGYDNIYRMLETAGETRWL

SEQ ID NO: 39575 - DNA, 1726 bp, Zea mays subsp. mays
  misc_feature (1)..(1726): Ceres Seq. ID no. 12381349
gcacgagaccattacctagaacatcctaatcgaaaaggaactgaatactacaatggagctctcgtgggacgaatgggatgtcattatactggctgcctgcagcttcctcatccctctcgtgttcctctgcaatgctacgaagcggcggcggcggcgcgcgccccctggcccggccaccgtacccatcatcgggaacctggcgtggctaacgttgcgcgacgggttgggtgagctggacatcctgcgacgactgcactcgcgctttggcccgctgctgtcggtccgcttgggttcatcggagcaggtgaacgtggcggaccgccgtctcgcacacgccttgctcgtggagcgtggcgccgctgtggctgaccgctcgccgctgctggtgtccaccgagaggttcggggccttcggctctttcagcatacacgtgtccagctacggcccacgctggagtgttctccgccgcaacttcgcggcggaggtcgtgagcccagcgcggttccggcagatggcggcctcgcgggagctggcgcttgccgacctcatccggaagctgaagctgcaggagggcgtcgtcgtctgcagggacgcgttccagcacgccatgtccagcctcttcatcgccatgtgcttcggcaaggtcctcgacgactcgtccgtggacagcatcggcgtcgcgctgcgcgacttcgtcctccacggcggcgcgtcggggatggggatggcgctattcttgttcctccctgctctcaccacgcgactcttccgtggcctcctgcggtctaaggaggccaagcgccagaagctcgaaaacgtgtactgcctgccattgatccatgagcggagagagcgcaggaagacgaagcagctgacgcaggagcacccgcactgctacgttgacacgttgctcgacctcaggctcgacgaggaacaggatggtggccgccttctcacagaccacgagatagcaagcctgtgcatcgagatcctcatcgttggctcggagctaccggcgacggcgctggagtggatcatggcggagctagtaaagaacccaggcgtgcaggacaagctctacgaggagatgatggtgaaagccaaagccaccactgacgcttctgctggcgtgctcccgttctcggaggatgacttgcccaagataccctacctgagagcggtggtgctggagggtctccggcgccatccgccggggcaccagatgccgccacgcagggtgagggaggacgtggaggtgggtgactacgtggtgcccaagggctcagcgatcaacttcatgctgtacgacctgggcatggacgacgccacgtgggaccgcccagcagtgttcatgccggagaggttcctgcccggcggggaagccgaggcgctggacatcaccggcaccaaggagatgaagatgataccgtttggggcgggcagaaggatctgcccgggcctcaggatcgctctcctgctcctcgagtacttcgtcgccaacctcgtagcgaccttccactggaaagaggtggaagagggcgacgtcgatgtcaccaccgaggacgctcagctcaccgtcctcatggggaagccgctccgggcgcgcctgcttccaagactgcattcgtctgcttaattttcttcatcatcatggtgtatgtcagtgtgtcaccgaataattaattaatgcgaataaagatcaagcttcaaagactcttcaccgttc

SEQ ID NO: 39576 - protein, 527 aa, Zea mays subsp. mays
  peptide (1)..(527): Ceres Seq. ID no. 12381350
  misc_feature (37)..(521): Pfam Name: Pfam Description:  Cytochrome P450
  misc_feature (1)..(522): NCBI GI NO: 37530946 NR Description: putative cytochrome P450
  misc_feature (6)..(522): NCBI GI NO: 37536044 NR Description: putative cytochrome P450
  misc_feature (6)..(516): NCBI GI NO: 37536046 NR Description: putative cytochrome P450
  misc_feature (7)..(522): NCBI GI NO: 37536034 NR Description: putative cytochrome P450
  misc_feature (8)..(522): NCBI GI NO: 15217771 NR Description: cytochrome p450, putative; protein id: At1g64900
  misc_feature (22)..(524): NCBI GI NO: 15224379 NR Description: cytochrome p450, putative; protein id: At2g12190.1
  misc_feature (281)..(509): NCBI GI NO: 28971943 NR Description: putative cytochrome P450
  misc_feature (55)..(523): NCBI GI NO: 15228331 NR Description: cytochrome p450, putative; protein id: At3g10570.1
  misc_feature (55)..(523): NCBI GI NO: 28393336 NR Description: putative cytochrome p450 [Arabidopsis thaliana]
  misc_feature (279)..(525): NCBI GI NO: 13661764 NR Description: putative cytochrome P450 [Lolium rigidum]
MELSWDEWDVIILAACSFLIPLVFLCNATKRRRRRAPPGPATVPIIGNLAWLTLRDGLGELDILRRLHSRFGPLLSVRLGSSEQVNVADRRLAHALLVERGAAVADRSPLLVSTERFGAFGSFSIHVSSYGPRWSVLRRNFAAEVVSPARFRQMAASRELALADLIRKLKLQEGVVVCRDAFQHAMSSLFIAMCFGKVLDDSSVDSIGVALRDFVLHGGASGMGMALFLFLPALTTRLFRGLLRSKEAKRQKLENVYCLPLIHERRERRKTKQLTQEHPHCYVDTLLDLRLDEEQDGGRLLTDHEIASLCIEILIVGSELPATALEWIMAELVKNPGVQDKLYEEMMVKAKATTDASAGVLPFSEDDLPKIPYLRAVVLEGLRRHPPGHQMPPRRVREDVEVGDYVVPKGSAINFMLYDLGMDDATWDRPAVFMPERFLPGGEAEALDITGTKEMKMIPFGAGRRICPGLRIALLLLEYFVANLVATFHWKEVEEGDVDVTTEDAQLTVLMGKPLRARLLPRLHSSA

SEQ ID NO: 39577 - protein, 374 aa, Zea mays subsp. mays
  peptide (1)..(374): Ceres Seq. ID no. 12381351
  misc_feature (1)..(368): Pfam Name: Pfam Description:  Cytochrome P450
  misc_feature (1)..(369): NCBI GI NO: 37530946 NR Description: putative cytochrome P450
  misc_feature (1)..(369): NCBI GI NO: 37536044 NR Description: putative cytochrome P450
  misc_feature (1)..(363): NCBI GI NO: 37536046 NR Description: putative cytochrome P450
  misc_feature (1)..(369): NCBI GI NO: 37536034 NR Description: putative cytochrome P450
  misc_feature (1)..(369): NCBI GI NO: 15217771 NR Description: cytochrome p450, putative; protein id: At1g64900
  misc_feature (1)..(371): NCBI GI NO: 15224379 NR Description: cytochrome p450, putative; protein id: At2g12190.1
  misc_feature (128)..(356): NCBI GI NO: 28971943 NR Description: putative cytochrome P450
  misc_feature (1)..(370): NCBI GI NO: 15228331 NR Description: cytochrome p450, putative; protein id: At3g10570.1
  misc_feature (1)..(370): NCBI GI NO: 28393336 NR Description: putative cytochrome p450 [Arabidopsis thaliana]
  misc_feature (126)..(372): NCBI GI NO: 13661764 NR Description: putative cytochrome P450 [Lolium rigidum]
MAASRELALADLIRKLKLQEGVVVCRDAFQHAMSSLFIAMCFGKVLDDSSVDSIGVALRDFVLHGGASGMGMALFLFLPALTTRLFRGLLRSKEAKRQKLENVYCLPLIHERRERRKTKQLTQEHPHCYVDTLLDLRLDEEQDGGRLLTDHEIASLCIEILIVGSELPATALEWIMAELVKNPGVQDKLYEEMMVKAKATTDASAGVLPFSEDDLPKIPYLRAVVLEGLRRHPPGHQMPPRRVREDVEVGDYVVPKGSAINFMLYDLGMDDATWDRPAVFMPERFLPGGEAEALDITGTKEMKMIPFGAGRRICPGLRIALLLLEYFVANLVATFHWKEVEEGDVDVTTEDAQLTVLMGKPLRARLLPRLHSSA

SEQ ID NO: 39578 - protein, 342 aa, Zea mays subsp. mays
  peptide (1)..(342): Ceres Seq. ID no. 12381352
  misc_feature (1)..(336): Pfam Name: Pfam Description:  Cytochrome P450
  misc_feature (1)..(337): NCBI GI NO: 37530946 NR Description: putative cytochrome P450
  misc_feature (1)..(337): NCBI GI NO: 37536044 NR Description: putative cytochrome P450
  misc_feature (1)..(331): NCBI GI NO: 37536046 NR Description: putative cytochrome P450
  misc_feature (1)..(337): NCBI GI NO: 37536034 NR Description: putative cytochrome P450
  misc_feature (1)..(337): NCBI GI NO: 15217771 NR Description: cytochrome p450, putative; protein id: At1g64900
  misc_feature (1)..(339): NCBI GI NO: 15224379 NR Description: cytochrome p450, putative; protein id: At2g12190.1
  misc_feature (96)..(324): NCBI GI NO: 28971943 NR Description: putative cytochrome P450
  misc_feature (1)..(338): NCBI GI NO: 15228331 NR Description: cytochrome p450, putative; protein id: At3g10570.1
  misc_feature (1)..(338): NCBI GI NO: 28393336 NR Description: putative cytochrome p450 [Arabidopsis thaliana]
  misc_feature (94)..(340): NCBI GI NO: 13661764 NR Description: putative cytochrome P450 [Lolium rigidum]
MSSLFIAMCFGKVLDDSSVDSIGVALRDFVLHGGASGMGMALFLFLPALTTRLFRGLLRSKEAKRQKLENVYCLPLIHERRERRKTKQLTQEHPHCYVDTLLDLRLDEEQDGGRLLTDHEIASLCIEILIVGSELPATALEWIMAELVKNPGVQDKLYEEMMVKAKATTDASAGVLPFSEDDLPKIPYLRAVVLEGLRRHPPGHQMPPRRVREDVEVGDYVVPKGSAINFMLYDLGMDDATWDRPAVFMPERFLPGGEAEALDITGTKEMKMIPFGAGRRICPGLRIALLLLEYFVANLVATFHWKEVEEGDVDVTTEDAQLTVLMGKPLRARLLPRLHSSA

SEQ ID NO: 39579 - DNA, 1251 bp, Zea mays subsp. mays
  misc_feature (1)..(1251): Ceres Seq. ID no. 12359009
aaaattactgattgattgaattgcgaagcatatatatggcggccttctcctccagcaacggcgtgccgccgggcttccggttccacccgaccgacgaggagctgctgctatactacctcaagaagaaggtcggattcgagaagttcgaactcgaggtcatcagggaggtcgacctcaacaagatcgagccatgggagctgcaagagacgtgccggatcgggtcggcgccgcagaacgagtggtacttcttcagccacaaggaccgcaagtacccgacggggtcgaggacgaaccgcgccacgacggccggcttctggaaggccacgggccgggacaagtgcatccggaccagctaccgcaagatcggcatgcgaaagacgctcgtcttctaccgcggccgcgcccctcacggccagaagaccgactggatcatgcacgagtaccgcctcgaggacgccgacgacgacgcccagggcggcacccagcgaggacggatgggtggtgtgccgcgtgttcaagaagaagtgcttcttcaagattggcggaggcgaagggagcaccaccagcagccagggcgcggatgccggcggccacctggccaccatgtcgccgccgctcggcggacaccacgacctggcgtacatgcacccgcacccgtactaccaccacgccgcctcctactactcccagatgcagaccccggggccgcacgccaccgcatactcgcaccacgtgcaggtccaggacctcctcaccaaccaccgacccacggacgacgacggcgccggcaccggctacgacttctccggcctgcatgtcgagcatcaacccggtggcggccttgacgtcggcagcagcgatggcgtcgccacagacgacggtggccagctggccggcgaaaggagggatcagaccaccggtacagccgcagatcatcagtggcaggcgatggatggtttcagcaacggcgggagcgccgaggtgcagcaaatgaccggcgcccaacgaggcggggagatggatttgtggggttacggaaggtaaaaacttgatgaccaccacctatacgatcgaaaacatggacgtcaagtgagcatctttcatgcatacatgatcgaagatatggtgcaaattgatgcatgcgttcattgggagtttatatatagcttgatgacttgtttggactagttttggtgtttacgatgtgtttgtatatgttggttaatttgttggtacaataagagccaaagg

SEQ ID NO: 39580 - protein, 269 aa, Zea mays subsp. mays
  peptide (1)..(269): Ceres Seq. ID no. 12359010
  misc_feature (10)..(139): Pfam Name: NAM Pfam Description: No apical meristem
  misc_feature (5)..(152): NCBI GI NO: 15235031 NR Description: NAM/NAP like protein; protein id: At4g10350.1
  misc_feature (5)..(144): NCBI GI NO: 15217491 NR Description: unknown protein; protein id: At1g33280.1
  misc_feature (1)..(146): NCBI GI NO: 15219419 NR Description: NAM
  misc_feature (6)..(140): NCBI GI NO: 15223299 NR Description: OsNAC7 protein, putative; protein id: At1g32770.1
  misc_feature (1)..(145): NCBI GI NO: 15234325 NR Description: NAM like protein; protein id: At4g36160.1
  misc_feature (7)..(145): NCBI GI NO: 15227958 NR Description: putative NAM
  misc_feature (10)..(145): NCBI GI NO: 34902254 NR Description: Putative NAM-like protein
  misc_feature (6)..(140): NCBI GI NO: 6006373 NR Description: Similar to NAM like protein (AC005310)
  misc_feature (10)..(142): NCBI GI NO: 24413978 NR Description: NAM-like protein
  misc_feature (10)..(264): NCBI GI NO: 6730944 NR Description: OsNAC7 protein [Oryza sativa]
MAAFSSSNGVPPGFRFHPTDEELLLYYLKKKVGFEKFELEVIREVDLNKIEPWELQETCRIGSAPQNEWYFFSHKDRKYPTGSRTNRATTAGFWKATGRDKCIRTSYRKIGMRKTLVFYRGRAPHGQKTDWIMHEYRLEDADDDAQGGTQRGRMGGVPRVQEEVLLQDWRRRREHHQQPGRGCRRPPGHHVAAARRTPRPGVHAPAPVLPPRRLLLLPDADPGAARHRILAPRAGPGPPHQPPTHGRRRRRHRLRLLRPACRASTRWRP

SEQ ID NO: 39581 - protein, 267 aa, Zea mays subsp. mays
  peptide (1)..(267): Ceres Seq. ID no. 12359011
  misc_feature (112)..(236): Pfam Name: Pfam Description:  Equine herpesvirus glycoprotein gp2
  misc_feature (69)..(243): NCBI GI NO: 6649242 NR Description: splicing coactivator subunit SRm300 [Homo sapiens]
  misc_feature (78)..(229): NCBI GI NO: 6649242 NR Description: splicing coactivator subunit SRm300 [Homo sapiens]
  misc_feature (98)..(235): NCBI GI NO: 28574039 NR Description: Salivary gland secretion 1 CG3047-PA
  misc_feature (115)..(235): NCBI GI NO: 28574039 NR Description: Salivary gland secretion 1 CG3047-PA
  misc_feature (132)..(246): NCBI GI NO: 28574039 NR Description: Salivary gland secretion 1 CG3047-PA
  misc_feature (109)..(207): NCBI GI NO: 28574039 NR Description: Salivary gland secretion 1 CG3047-PA
  misc_feature (128)..(247): NCBI GI NO: 28574039 NR Description: Salivary gland secretion 1 CG3047-PA
  misc_feature (143)..(230): NCBI GI NO: 28574039 NR Description: Salivary gland secretion 1 CG3047-PA
  misc_feature (98)..(230): NCBI GI NO: 28574039 NR Description: Salivary gland secretion 1 CG3047-PA
  misc_feature (143)..(267): NCBI GI NO: 28574039 NR Description: Salivary gland secretion 1 CG3047-PA
MGAARDVPDRVGAAERVVLLQPQGPQVPDGVEDEPRHDGRLLEGHGPGQVHPDQLPQDRHAKDARLLPRPRPSRPEDRLDHARVPPRGRRRRRPGRHPARTDGWCAACSRRSASSRLAEAKGAPPAARARMPAATWPPCRRRSADTTTWRTCTRTRTTTTPPPTTPRCRPRGRTPPHTRTTCRSRTSSPTTDPRTTTAPAPATTSPACMSSINPVAALTSAAAMASPQTTVASWPAKGGIRPPVQPQIISGRRWMVSATAGAPRCSK

SEQ ID NO: 39582 - protein, 158 aa, Zea mays subsp. mays
  peptide (1)..(158): Ceres Seq. ID no. 12359012
  misc_feature (1)..(41): NCBI GI NO: 15235031 NR Description: NAM/NAP like protein; protein id: At4g10350.1
  misc_feature (1)..(33): NCBI GI NO: 15217491 NR Description: unknown protein; protein id: At1g33280.1
  misc_feature (1)..(35): NCBI GI NO: 15219419 NR Description: NAM
  misc_feature (1)..(29): NCBI GI NO: 15223299 NR Description: OsNAC7 protein, putative; protein id: At1g32770.1
  misc_feature (1)..(34): NCBI GI NO: 15234325 NR Description: NAM like protein; protein id: At4g36160.1
  misc_feature (1)..(34): NCBI GI NO: 15227958 NR Description: putative NAM
  misc_feature (1)..(34): NCBI GI NO: 34902254 NR Description: Putative NAM-like protein
  misc_feature (1)..(29): NCBI GI NO: 6006373 NR Description: Similar to NAM like protein (AC005310)
  misc_feature (1)..(31): NCBI GI NO: 24413978 NR Description: NAM-like protein
  misc_feature (1)..(153): NCBI GI NO: 6730944 NR Description: OsNAC7 protein [Oryza sativa]
MRKTLVFYRGRAPHGQKTDWIMHEYRLEDADDDAQGGTQRGRMGGVPRVQEEVLLQDWRRRREHHQQPGRGCRRPPGHHVAAARRTPRPGVHAPAPVLPPRRLLLLPDADPGAARHRILAPRAGPGPPHQPPTHGRRRRRHRLRLLRPACRASTRWRP

SEQ ID NO: 39583 - DNA, 579 bp, Zea mays subsp. mays
  misc_feature (1)..(579): Ceres Seq. ID no. 13622385
  misc_feature (546)..(546): n is a, c, t, g, unknown, or other
  misc_feature (545)..(545): n is a, c, t, g, unknown, or other
  misc_feature (544)..(544): n is a, c, t, g, unknown, or other
aattgtcgttgccatccatcactcacctggccgcggaaactgatccatgatctgatcccacggcaccagcagcaacggccgaccgccgggccggccggccggcgcgcacgcgcggtggcaaataaagagcttagagccgccggccgggatctatggggcgcgaggcggcagcgacgaggccgcccaagctgcggaggggcctgtggtcgccggaggaggacgagaagctgtacaatcacatcatccgatatggcgtcggctgctgtagctcacccccaaagctcgctggcttggagagatgcggcaagagctgcaggctgagatggatcaactacctgcggcctgacctcaagaggggcagcttctcccagcaggaggaggatctcatcgtcagcctccacaagatactaggcaacaggtggtcccagatcgcgtcgcagctgccggggaggacggacaacgagatcaaaaacttctggaactcgtgcatcaagaagaagctccggcagcatggcatcgaccccgccacccacaagccgctcannnacgacgacaacgttgctgctgccgctgctgcgg

SEQ ID NO: 39584 - protein, 142 aa, Zea mays subsp. mays
  peptide (1)..(142): Ceres Seq. ID no. 13622386
  misc_feature (15)..(62): Pfam Name: Pfam Description:  Myb-like DNA-binding domain
  misc_feature (1)..(139): NCBI GI NO: 34913750 NR Description: OSJNBa0051H17.23
  misc_feature (1)..(141): NCBI GI NO: 19059 NR Description: MybHv33 [Hordeum vulgare subsp. vulgare]
  misc_feature (1)..(141): NCBI GI NO: 547958 NR Description: Myb-related protein Hv33
  misc_feature (1)..(141): NCBI GI NO: 34911526 NR Description: putative myb-related protein
  misc_feature (12)..(141): NCBI GI NO: 28927688 NR Description: putative Myb-like DNA-binding protein
  misc_feature (1)..(130): NCBI GI NO: 34913340 NR Description: contains ESTsAU101387
  misc_feature (1)..(138): NCBI GI NO: 34902542 NR Description: putative transcription factor (myb)
  misc_feature (1)..(134): NCBI GI NO: 2280530 NR Description: ATMYB4 [Arabidopsis thaliana]
  misc_feature (1)..(134): NCBI GI NO: 30690317 NR Description: myb transcription factor (ATMYB4)
  misc_feature (12)..(130): NCBI GI NO: 28628949 NR Description: MYB2 [Dendrobium sp. XMW-2002-2]
  misc_feature (131)..(131): Xaa is any aa, unknown or other
  misc_feature (132)..(132): Xaa is any aa, unknown or other
MGREAAATRPPKLRRGLWSPEEDEKLYNHIIRYGVGCCSSPPKLAGLERCGKSCRLRWINYLRPDLKRGSFSQQEEDLIVSLHKILGNRWSQIASQLPGRTDNEIKNFWNSCIKKKLRQHGIDPATHKPLXXDDNVAAAAAA

SEQ ID NO: 39585 - protein, 106 aa, Zea mays subsp. mays
  peptide (1)..(106): Ceres Seq. ID no. 13622387
NCRCHPSLTWPRKLIHDLIPRHQQQRPTAGPAGRRARAVANKELRAAGRDLWGARRQRRGRPSCGGACGRRRRTRSCTITSSDMASAAVAHPQSSLAWRDAARAAG

SEQ ID NO: 39586 - DNA, 1117 bp, Zea mays subsp. mays
  misc_feature (1)..(1117): Ceres Seq. ID no. 12350716
atgagctgcttccagcccggaaccgaggctaactccgccagccgactcggaccggtggtggtgtcgtggaagctgcgcagccacgggcgggcctgttcgctgttcgcagccgtgcctcgatcgccgcccgtgccagaggtctctctccaatggcggtgacgagcgccgcagcccgccgcttcctcgcgctcgcgcccgcccggggaccccgcgccttctggtcggcctcgtgtccacccgaccccgacgcaccttccgcctcgtcgacgtctaccgacaacaacagcaggaggaagaagaaggagccgtccgggtccgcccaccaccgcctcgccgccgtcatggacgccgtcaacgagcgcaagctcccacccgagctcagtgggcgcggcaacgcagtaaggtctgaaactgacattgtaaatgtcgttgaacaaagaatatggcattcaatggaggaagggcactttgaaaatctaccagggaagggcaaacccttaaacctcacttcaaatcctcatgccgatcctgccgaagacaccctttacaggatactttcaaagaatggttgtgcacctgaatgggttgaactgaataaggaaattcgtggcatgatcttgagctggaggtcggcattaaggaaagcatgggcaaaccgctctgaagatgatgattctaactggagtgatgacagcagggctctccaggagcgaattcgccagataaatgataaggttttccggtacaacctgatagtaccctttgggcgtcagttgtttggtctgaactgggacaaggagctggacaagttgaaggaagaataaaggacaaagaggtggacacattggtgaacatagcatggaggacttttgttgtatcaaaatgacctgtaactaggaatacctgataggacatacacatacttaagaaaaaccatgaaagctgagtataggtatttacacgtaggcttttattagtttatatatttttggagaaccaagttttccggtgtttccggtgctgtagccgattttgtgataaaactctgtcacatgggtaaaacctgagataatttcttagcggtaaaactcgatctatgccacatgggctaagctcc

SEQ ID NO: 39587 - protein, 224 aa, Zea mays subsp. mays
  peptide (1)..(224): Ceres Seq. ID no. 12350717
  misc_feature (22)..(223): NCBI GI NO: 18414270 NR Description: putative protein; protein id: At5g03560
  misc_feature (85)..(223): NCBI GI NO: 11357378 NR Description: hypothetical protein F12E4
  misc_feature (22)..(92): NCBI GI NO: 11357378 NR Description: hypothetical protein F12E4
  misc_feature (90)..(223): NCBI GI NO: 20149746 NR Description: cDNA sequence BC020175; cDNA, sequence BC020175
  misc_feature (90)..(223): NCBI GI NO: 26349033 NR Description: unnamed protein product [Mus musculus]
  misc_feature (80)..(224): NCBI GI NO: 24582398 NR Description: CG13776-PA [Drosophila melanogaster]
  misc_feature (90)..(218): NCBI GI NO: 40254908 NR Description: chromosome 21 open reading frame 55 [Homo sapiens]
  misc_feature (112)..(223): NCBI GI NO: 13542805 NR Description: Unknown (protein for IMAGE:3483507) [Mus musculus]
  misc_feature (90)..(204): NCBI GI NO: 7020577 NR Description: unnamed protein product [Homo sapiens]
  misc_feature (93)..(224): NCBI GI NO: 31233474 NR Description: ENSANGP00000015813 [Anopheles gambiae]
MAVTSAAARRFLALAPARGPRAFWSASCPPDPDAPSASSTSTDNNSRRKKKEPSGSAHHRLAAVMDAVNERKLPPELSGRGNAVRSETDIVNVVEQRIWHSMEEGHFENLPGKGKPLNLTSNPHADPAEDTLYRILSKNGCAPEWVELNKEIRGMILSWRSALRKAWANRSEDDDSNWSDDSRALQERIRQINDKVFRYNLIVPFGRQLFGLNWDKELDKLKEE

SEQ ID NO: 39588 - protein, 160 aa, Zea mays subsp. mays
  peptide (1)..(160): Ceres Seq. ID no. 12350718
  misc_feature (1)..(159): NCBI GI NO: 18414270 NR Description: putative protein; protein id: At5g03560
  misc_feature (21)..(159): NCBI GI NO: 11357378 NR Description: hypothetical protein F12E4
  misc_feature (1)..(28): NCBI GI NO: 11357378 NR Description: hypothetical protein F12E4
  misc_feature (26)..(159): NCBI GI NO: 20149746 NR Description: cDNA sequence BC020175; cDNA, sequence BC020175
  misc_feature (26)..(159): NCBI GI NO: 26349033 NR Description: unnamed protein product [Mus musculus]
  misc_feature (16)..(160): NCBI GI NO: 24582398 NR Description: CG13776-PA [Drosophila melanogaster]
  misc_feature (26)..(154): NCBI GI NO: 40254908 NR Description: chromosome 21 open reading frame 55 [Homo sapiens]
  misc_feature (48)..(159): NCBI GI NO: 13542805 NR Description: Unknown (protein for IMAGE:3483507) [Mus musculus]
  misc_feature (26)..(140): NCBI GI NO: 7020577 NR Description: unnamed protein product [Homo sapiens]
  misc_feature (29)..(160): NCBI GI NO: 31233474 NR Description: ENSANGP00000015813 [Anopheles gambiae]
MDAVNERKLPPELSGRGNAVRSETDIVNVVEQRIWHSMEEGHFENLPGKGKPLNLTSNPHADPAEDTLYRILSKNGCAPEWVELNKEIRGMILSWRSALRKAWANRSEDDDSNWSDDSRALQERIRQINDKVFRYNLIVPFGRQLFGLNWDKELDKLKEE

SEQ ID NO: 39589 - protein, 123 aa, Zea mays subsp. mays
  peptide (1)..(123): Ceres Seq. ID no. 12350719
  misc_feature (1)..(122): NCBI GI NO: 18414270 NR Description: putative protein; protein id: At5g03560
  misc_feature (1)..(122): NCBI GI NO: 11357378 NR Description: hypothetical protein F12E4
  misc_feature (1)..(122): NCBI GI NO: 20149746 NR Description: cDNA sequence BC020175; cDNA, sequence BC020175
  misc_feature (1)..(122): NCBI GI NO: 26349033 NR Description: unnamed protein product [Mus musculus]
  misc_feature (1)..(123): NCBI GI NO: 24582398 NR Description: CG13776-PA [Drosophila melanogaster]
  misc_feature (1)..(117): NCBI GI NO: 40254908 NR Description: chromosome 21 open reading frame 55 [Homo sapiens]
  misc_feature (11)..(122): NCBI GI NO: 13542805 NR Description: Unknown (protein for IMAGE:3483507) [Mus musculus]
  misc_feature (1)..(103): NCBI GI NO: 7020577 NR Description: unnamed protein product [Homo sapiens]
  misc_feature (1)..(123): NCBI GI NO: 31233474 NR Description: ENSANGP00000015813 [Anopheles gambiae]
  misc_feature (1)..(103): NCBI GI NO: 20810277 NR Description: Unknown (protein for MGC:33722) [Homo sapiens]
MEEGHFENLPGKGKPLNLTSNPHADPAEDTLYRILSKNGCAPEWVELNKEIRGMILSWRSALRKAWANRSEDDDSNWSDDSRALQERIRQINDKVFRYNLIVPFGRQLFGLNWDKELDKLKEE

SEQ ID NO: 39590 - DNA, 1321 bp, Zea mays subsp. mays
  misc_feature (1)..(1321): Ceres Seq. ID no. 12360757
gcacgagaccattacctagaacatcctaacaaaatcttttttttttgttcctgtgatgaactgagagagttggtttttgagttctgcaggctattgaagtttcgaagcgccaaatgaaactaagagaggcgtctggaaatagtgatatggtttcaaggctagaagcagctgagtcaaagctgcaagagttgaaatcgaatatgggggtattgggcaaagaagctgttgcagcaatgactgccgttgaggcccaacagcaaagattgaccttgcagcgtcttattgcattggtacattatttgtctagttgggtgatttgggccacttgactttttgtttgtttgtcttgaagttgtctattgtgtctcataacatttgtggacttaattgaaggttgaatcagagagaaactaccaccaaaaggtcctacaaattcttgatcaacttgagagagaggtctgatggtttcacatccacatcctttccatccttgcccattgtgctaaagaaagtttacaacttcaagaaaaatctggtcggttatgttatcttgattgagctttcttattttttttctagatggtatctgagcgccaaagaatcgaaggagcacctccggtggttgagagttccatgcctccaccgcctgcatatgaagaagtcaatggtatattcatgagaaatacagttgcagaattggtcgagactgtggagtatttcttggctgaggcaatccagtcataccaagccgaaagcgataccgagctcaacctttcaactggtgactacatagtggtccgaaaggtagtgctttcagatttctcttacacgtcatttacgaattgctcatgtagtcatgttatgctgcggccagcttcacacatattggttgcccatttcatgagtatctcaatcacatttcacattgtacccgaacttgattaccgaatttacataaaaaaccctttcctaatcaggtgtcgaacaatggatgggccgaaggtgaatgcagggggaaagctggttggttcccctacgactacatcgagaaacgggagcgtgtgcttgcaagtaaagtcggccaagttttctaagtcttccgctgagccatgtagtatatccccggggttgtacactgtgtgttgtttatgcttgtcatcttcagagaatcagaggagatctgtaattttgctgaaagctgcctgttgggtggtttgtttctgcctggccgccttaattgttcaaattcatgtggcaggaactgaatatattcattcttcagttatcctgtcaatatatataatttttttgtttgaagcac

SEQ ID NO: 39591 - protein, 247 aa, Zea mays subsp. mays
  peptide (1)..(247): Ceres Seq. ID no. 12360758
  misc_feature (1)..(76): NCBI GI NO: 37535998 NR Description: unknown protein
  misc_feature (1)..(76): NCBI GI NO: 38344978 NR Description: OSJNBa0011L07.8
  misc_feature (1)..(82): NCBI GI NO: 18418491 NR Description: putative protein; protein id: At4g34660
  misc_feature (1)..(77): NCBI GI NO: 7487662 NR Description: hypothetical protein T4L20
  misc_feature (42)..(76): NCBI GI NO: 21928139 NR Description: AT4g18060/F15J5_30 [Arabidopsis thaliana]
  misc_feature (42)..(76): NCBI GI NO: 22328762 NR Description: putative protein; protein id: At4g18060
  misc_feature (42)..(76): NCBI GI NO: 7485521 NR Description: hypothetical protein F15J5
  misc_feature (42)..(76): NCBI GI NO: 16974680 NR Description: SH3 domain-containing protein 3
  misc_feature (42)..(76): NCBI GI NO: 22093679 NR Description: putative SH3
  misc_feature (16)..(82): NCBI GI NO: 15221714 NR Description: unknown protein; protein id: At1g31440
MVSERQRIEGAPPVVESSMPPPPAYEEVNGIFMRNTVAELVETVEYFLAEAIQSYQAESDTELNLSTGDYIVVRKVVLSDFSYTSFTNCSCSHVMLRPASHILVAHFMSISITFHIVPELDYRIYIKNPFLIRCRTMDGPKVNAGGKLVGSPTTTSRNGSVCLQVKSAKFSKSSAEPCSISPGLYTVCCLCLSSSENQRRSVILLKAACWVVCFCLAALIVQIHVAGTEYIHSSVILSIYIIFLFEA

SEQ ID NO: 39592 - protein, 229 aa, Zea mays subsp. mays
  peptide (1)..(229): Ceres Seq. ID no. 12360759
  misc_feature (1)..(58): NCBI GI NO: 37535998 NR Description: unknown protein
  misc_feature (1)..(58): NCBI GI NO: 38344978 NR Description: OSJNBa0011L07.8
  misc_feature (1)..(64): NCBI GI NO: 18418491 NR Description: putative protein; protein id: At4g34660
  misc_feature (1)..(59): NCBI GI NO: 7487662 NR Description: hypothetical protein T4L20
  misc_feature (24)..(58): NCBI GI NO: 21928139 NR Description: AT4g18060/F15J5_30 [Arabidopsis thaliana]
  misc_feature (24)..(58): NCBI GI NO: 22328762 NR Description: putative protein; protein id: At4g18060
  misc_feature (24)..(58): NCBI GI NO: 7485521 NR Description: hypothetical protein F15J5
  misc_feature (24)..(58): NCBI GI NO: 16974680 NR Description: SH3 domain-containing protein 3
  misc_feature (24)..(58): NCBI GI NO: 22093679 NR Description: putative SH3
  misc_feature (1)..(64): NCBI GI NO: 15221714 NR Description: unknown protein; protein id: At1g31440
MPPPPAYEEVNGIFMRNTVAELVETVEYFLAEAIQSYQAESDTELNLSTGDYIVVRKVVLSDFSYTSFTNCSCSHVMLRPASHILVAHFMSISITFHIVPELDYRIYIKNPFLIRCRTMDGPKVNAGGKLVGSPTTTSRNGSVCLQVKSAKFSKSSAEPCSISPGLYTVCCLCLSSSENQRRSVILLKAACWVVCFCLAALIVQIHVAGTEYIHSSVILSIYIIFLFEA

SEQ ID NO: 39593 - protein, 215 aa, Zea mays subsp. mays
  peptide (1)..(215): Ceres Seq. ID no. 12360760
  misc_feature (1)..(44): NCBI GI NO: 37535998 NR Description: unknown protein
  misc_feature (1)..(44): NCBI GI NO: 38344978 NR Description: OSJNBa0011L07.8
  misc_feature (1)..(50): NCBI GI NO: 18418491 NR Description: putative protein; protein id: At4g34660
  misc_feature (1)..(45): NCBI GI NO: 7487662 NR Description: hypothetical protein T4L20
  misc_feature (10)..(44): NCBI GI NO: 21928139 NR Description: AT4g18060/F15J5_30 [Arabidopsis thaliana]
  misc_feature (10)..(44): NCBI GI NO: 22328762 NR Description: putative protein; protein id: At4g18060
  misc_feature (10)..(44): NCBI GI NO: 7485521 NR Description: hypothetical protein F15J5
  misc_feature (10)..(44): NCBI GI NO: 16974680 NR Description: SH3 domain-containing protein 3
  misc_feature (10)..(44): NCBI GI NO: 22093679 NR Description: putative SH3
  misc_feature (1)..(50): NCBI GI NO: 15221714 NR Description: unknown protein; protein id: At1g31440
MRNTVAELVETVEYFLAEAIQSYQAESDTELNLSTGDYIVVRKVVLSDFSYTSFTNCSCSHVMLRPASHILVAHFMSISITFHIVPELDYRIYIKNPFLIRCRTMDGPKVNAGGKLVGSPTTTSRNGSVCLQVKSAKFSKSSAEPCSISPGLYTVCCLCLSSSENQRRSVILLKAACWVVCFCLAALIVQIHVAGTEYIHSSVILSIYIIFLFEA

SEQ ID NO: 39594 - DNA, 1051 bp, Zea mays subsp. mays
  misc_feature (1)..(1051): Ceres Seq. ID no. 12359310
acacacacacgactagcaggcacagcagcaccgactagtcaatctctacttgcctacacagcagaaggaaccagacagggaagtagggaaccagagaaagcatagcaatggtgcggaagccgatccacgctgacgacgccggcgctaagagcacggaggcgagcaaggagaggaaggggttgtggtcgccggaggaggacgagcggctcttcacccacatcacctaccacgtcgtctccacctggagctccgtcgcgcagctagcaggcctgcggaggagcggcaagagctgccggctgcggtggctgaactacctgcgcccggacctcaagaaggagcccatctccaagcgcgaggaggagaccatcatctccctgcagcagtcgctcggcaaccggtggtcgactatcgcggcgaggatgccaggcaggacggacaacgagatcaagaactactggaactcccgcatcaggaagcgcctcaacgccgccgcctccagagctgcaggctgcggcgacggcggtgacagcgcggccgagccatcgggggccgcggccgcgggaggaaaggaggattcggccaacgctgcgccgccgccagcggcccagcctacgcccatcccggcgcggttcccggtcttcgggtgccagctgcccgacggagccggcggcggcatttcgtctcccggcagcggcaagagtccacagtcgtcgactactgcgagtatgcggcagaacgcgggtgacgagagcgatgcgagcgacggtggcggtggcgacagcgacatggtccatttcctctcgttcgatgatctggattatcccggggatttgctcattgatgtgccgggcgccatggacgcgtgggagagccaactgtgctatgcgaatccgatgatgagctcgctctgttgatccacactaccaattgcatatagcacagccattgtcttgttcccgctaatcatatataggttgtatgaattgtttatgtgaaatttcactgggttttttggagaaggaatgcatgatgacgtgtgggtattcctatt

SEQ ID NO: 39595 - protein, 268 aa, Zea mays subsp. mays
  peptide (1)..(268): Ceres Seq. ID no. 12359311
  misc_feature (76)..(121): Pfam Name: Pfam Description:  Myb-like DNA-binding domain
  misc_feature (53)..(261): NCBI GI NO: 34896170 NR Description: hypothetical protein
  misc_feature (1)..(49): NCBI GI NO: 34896170 NR Description: hypothetical protein
  misc_feature (4)..(225): NCBI GI NO: 19072768 NR Description: typical P-type R2R3 Myb protein [Oryza sativa]
  misc_feature (4)..(225): NCBI GI NO: 34896174 NR Description: putative transcription factor (myb)
  misc_feature (10)..(144): NCBI GI NO: 34913750 NR Description: OSJNBa0051H17.23
  misc_feature (22)..(253): NCBI GI NO: 7438336 NR Description: myb protein homolog - rice
  misc_feature (22)..(253): NCBI GI NO: 33087073 NR Description: myb-related protein
  misc_feature (20)..(194): NCBI GI NO: 34911526 NR Description: putative myb-related protein
  misc_feature (20)..(178): NCBI GI NO: 19059 NR Description: MybHv33 [Hordeum vulgare subsp. vulgare]
  misc_feature (20)..(178): NCBI GI NO: 547958 NR Description: Myb-related protein Hv33
MVRKPIHADDAGAKSTEASKERKGLWSPEEDERLFTHITYHVVSTWSSVAQLAGLRRSGKSCRLRWLNYLRPDLKKEPISKREEETIISLQQSLGNRWSTIAARMPGRTDNEIKNYWNSRIRKRLNAAASRAAGCGDGGDSAAEPSGAAAAGGKEDSANAAPPPAAQPTPIPARFPVFGCQLPDGAGGGISSPGSGKSPQSSTTASMRQNAGDESDASDGGGGDSDMVHFLSFDDLDYPGDLLIDVPGAMDAWESQLCYANPMMSSLC

SEQ ID NO: 39596 - protein, 164 aa, Zea mays subsp. mays
  peptide (1)..(164): Ceres Seq. ID no. 12359312
  misc_feature (1)..(157): NCBI GI NO: 34896170 NR Description: hypothetical protein
  misc_feature (1)..(121): NCBI GI NO: 19072768 NR Description: typical P-type R2R3 Myb protein [Oryza sativa]
  misc_feature (1)..(121): NCBI GI NO: 34896174 NR Description: putative transcription factor (myb)
  misc_feature (1)..(40): NCBI GI NO: 34913750 NR Description: OSJNBa0051H17.23
  misc_feature (1)..(149): NCBI GI NO: 7438336 NR Description: myb protein homolog - rice
  misc_feature (1)..(149): NCBI GI NO: 33087073 NR Description: myb-related protein
  misc_feature (1)..(90): NCBI GI NO: 34911526 NR Description: putative myb-related protein
  misc_feature (1)..(74): NCBI GI NO: 19059 NR Description: MybHv33 [Hordeum vulgare subsp. vulgare]
  misc_feature (1)..(74): NCBI GI NO: 547958 NR Description: Myb-related protein Hv33
  misc_feature (1)..(100): NCBI GI NO: 28927688 NR Description: putative Myb-like DNA-binding protein
MPGRTDNEIKNYWNSRIRKRLNAAASRAAGCGDGGDSAAEPSGAAAAGGKEDSANAAPPPAAQPTPIPARFPVFGCQLPDGAGGGISSPGSGKSPQSSTTASMRQNAGDESDASDGGGGDSDMVHFLSFDDLDYPGDLLIDVPGAMDAWESQLCYANPMMSSLC

SEQ ID NO: 39597 - DNA, 852 bp, Zea mays subsp. mays
  misc_feature (1)..(852): Ceres Seq. ID no. 12391900
ctcgcctcccgtcgcgttcttatccatccaccccgtccggcacccatttatatcctgtcgtccctccctccctccttcggccacaccgtgtcacaccgctgcttgcttgcttgcgatcgggtttggatttggggagcatcatggaggcctacttcttgttccacagcgggagggcgcacgagttcgcgtacgcggagcaggaggaggacatcggctcgccgtcggattccgaacccccgtccacgtccacgtcgagggagtccgcgggctcgtcggcggagctcgacgacgacgccacctcctccggctccggctccggctcggaccgcttcgagatgtccgccctcatgacgcagctccctcccttcaagcggggcctgtccaggttcttcgacggcaagtcgcagtccttcgcctcgctcgccgccgtggggtcgctagaggacctggccaagccggcccggaagcgcctcaagccgtcgcggagctgcggcggcgccctcgacgcgcaccgcggacgcctcctctcgccgcgcgaggcattattgcaccaagcccaccgctaggattaggaaggcagccgcgaggagcggcacgttgtcggttctcgcggccggcgcgccgaggatgccgccggcggtggcgagggccgagggcgtggccgccaaggttctgatcgtcagttgagccgcggatcggcctgcctgagctcaacatcgacgcacacactcgcaggcacagctagtacggaccgccgcatccacccctctgcctgaagctgttcggttttctttttgtttcccaatgcgtctgtgatctgatctctttgtaatgaaaacgcgcagctcaatt

SEQ ID NO: 39598 - protein, 224 aa, Zea mays subsp. mays
  peptide (1)..(224): Ceres Seq. ID no. 12391901
SPPVAFLSIHPVRHPFISCRPSLPPSATPCHTAACLLAIGFGFGEHHGGLLLVPQREGARVRVRGAGGGHRLAVGFRTPVHVHVEGVRGLVGGARRRRHLLRLRLRLGPLRDVRPHDAAPSLQAGPVQVLRRQVAVLRLARRRGVARGPGQAGPEAPQAVAELRRRPRRAPRTPPLAARGIIAPSPPLGLGRQPRGAARCRFSRPARRGCRRRWRGPRAWPPRF

SEQ ID NO: 39599 - protein, 187 aa, Zea mays subsp. mays
  peptide (1)..(187): Ceres Seq. ID no. 12391902
  misc_feature (47)..(187): NCBI GI NO: 38346806 NR Description: OSJNBa0088A01.13
  misc_feature (65)..(187): NCBI GI NO: 15241248 NR Description: putative protein; protein id: At5g56550.1
  misc_feature (65)..(171): NCBI GI NO: 34909358 NR Description: P0638D12.11
RLPSRSYPSTPSGTHLYPVVPPSLLRPHRVTPLLACLRSGLDLGSIMEAYFLFHSGRAHEFAYAEQEEDIGSPSDSEPPSTSTSRESAGSSAELDDDATSSGSGSGSDRFEMSALMTQLPPFKRGLSRFFDGKSQSFASLAAVGSLEDLAKPARKRLKPSRSCGGALDAHRGRLLSPREALLHQAHR

SEQ ID NO: 39600 - protein, 141 aa, Zea mays subsp. mays
  peptide (1)..(141): Ceres Seq. ID no. 12391903
  misc_feature (1)..(141): NCBI GI NO: 38346806 NR Description: OSJNBa0088A01.13
  misc_feature (19)..(141): NCBI GI NO: 15241248 NR Description: putative protein; protein id: At5g56550.1
  misc_feature (19)..(125): NCBI GI NO: 34909358 NR Description: P0638D12.11
MEAYFLFHSGRAHEFAYAEQEEDIGSPSDSEPPSTSTSRESAGSSAELDDDATSSGSGSGSDRFEMSALMTQLPPFKRGLSRFFDGKSQSFASLAAVGSLEDLAKPARKRLKPSRSCGGALDAHRGRLLSPREALLHQAHR

SEQ ID NO: 39601 - DNA, 1004 bp, Zea mays subsp. mays
  misc_feature (1)..(1004): Ceres Seq. ID no. 12383275
gaaaagtcgaaatccaaacccgctggtcagcttatccccttcgcaggagccaggacggacgaactgcgagtacacgagagaggagagaggagaggagacacaggcgacacgcgccatttgggagagggaaaggaatggagctgacgtcttcttcccgctccgtgctctcctcctgcaaccggccggtcgctcgtgctctttgcaggacggcgtacccgggtgcaaggaggaaggagaagggaatagtatgtatcttgagcgaggagaaagaagtggtacaaaggacgatccggaggcgagctgccttttctttgttgctggcttcgccggtgctatcagtggcgttctcggcctatgggaagagtaaaaccatgaacccttacgatgaaaggcgtctgcttcagcagaataagaagattcaggaagccaaccgtgcccctgaggatttcccaaacttcatcagagaaggcttccaggtcaaagtagtgacaccggacaactatattacacgggcctctggactaatgtatgaggacattaaagtcggtacaggcgactctccaaaggatggtcagcagattatattccattatgtgggctacaatgaagcaggacgaagaatagatagcacctatattcagggttcccctgcaaaaattcggttagggaacggaacactagttccaggttttgaagaaggcatacgggacatgaaaccaggtggtaagagaagaattataatacctccagagcttggtcctcctgttgggccttcgacgttcttcagtgcgaagcagttcgaagtgttcgatgtggagttactggcggtgcaggactgccagcggaggacgatagcattttactctgatgtcgtgtgcagctgaacttcggtttgtctagtcttccgcctatggcacatcgcagcagcatcctgcacttttggctgctggtctgagttgccgtccaattgtgtgtatgtatatagccagctgttgttactgcgg

SEQ ID NO: 39602 - protein, 293 aa, Zea mays subsp. mays
  peptide (1)..(293): Ceres Seq. ID no. 12383276
  misc_feature (182)..(229): Pfam Name: Pfam Description:  FKBP-type peptidyl-prolyl cis-trans isomerase
  misc_feature (45)..(293): NCBI GI NO: 33146997 NR Description: putative FKBP-type peptidyl-prolyl cis-transisomerase
  misc_feature (53)..(293): NCBI GI NO: 30695188 NR Description: immunophilin / FKBP-type peptidyl-prolyl cis-transisomerase
  misc_feature (95)..(229): NCBI GI NO: 11283515 NR Description: hypothetical protein T8B10
  misc_feature (262)..(293): NCBI GI NO: 11283515 NR Description: hypothetical protein T8B10
  misc_feature (168)..(276): NCBI GI NO: 39997372 NR Description: FKBP-type peptidyl-prolyl cis-trans isomerase
  misc_feature (163)..(277): NCBI GI NO: 37520410 NR Description: FKBP-type peptidyl-prolyl cis-trans isomerase
  misc_feature (166)..(277): NCBI GI NO: 23129112 NR Description: hypothetical protein [Nostoc punctiforme]
  misc_feature (168)..(277): NCBI GI NO: 22298646 NR Description: FKBP-type peptidyl-prolyl cis-trans isomerase
  misc_feature (164)..(274): NCBI GI NO: 23053670 NR Description: hypothetical protein [Geobacter metallireducens]
  misc_feature (163)..(277): NCBI GI NO: 27377516 NR Description: Peptidylprolyl isomerase
KVEIQTRWSAYPLRRSQDGRTASTRERREERRHRRHAPFGRGKGMELTSSSRSVLSSCNRPVARALCRTAYPGARRKEKGIVCILSEEKEVVQRTIRRRAAFSLLLASPVLSVAFSAYGKSKTMNPYDERRLLQQNKKIQEANRAPEDFPNFIREGFQVKVVTPDNYITRASGLMYEDIKVGTGDSPKDGQQIIFHYVGYNEAGRRIDSTYIQGSPAKIRLGNGTLVPGFEEGIRDMKPGGKRRIIIPPELGPPVGPSTFFSAKQFEVFDVELLAVQDCQRRTIAFYSDVVCS

SEQ ID NO: 39603 - protein, 249 aa, Zea mays subsp. mays
  peptide (1)..(249): Ceres Seq. ID no. 12383277
  misc_feature (138)..(185): Pfam Name: Pfam Description:  FKBP-type peptidyl-prolyl cis-trans isomerase
  misc_feature (1)..(249): NCBI GI NO: 33146997 NR Description: putative FKBP-type peptidyl-prolyl cis-transisomerase
  misc_feature (9)..(249): NCBI GI NO: 30695188 NR Description: immunophilin / FKBP-type peptidyl-prolyl cis-transisomerase
  misc_feature (51)..(185): NCBI GI NO: 11283515 NR Description: hypothetical protein T8B10
  misc_feature (218)..(249): NCBI GI NO: 11283515 NR Description: hypothetical protein T8B10
  misc_feature (124)..(232): NCBI GI NO: 39997372 NR Description: FKBP-type peptidyl-prolyl cis-trans isomerase
  misc_feature (119)..(233): NCBI GI NO: 37520410 NR Description: FKBP-type peptidyl-prolyl cis-trans isomerase
  misc_feature (122)..(233): NCBI GI NO: 23129112 NR Description: hypothetical protein [Nostoc punctiforme]
  misc_feature (124)..(233): NCBI GI NO: 22298646 NR Description: FKBP-type peptidyl-prolyl cis-trans isomerase
  misc_feature (120)..(230): NCBI GI NO: 23053670 NR Description: hypothetical protein [Geobacter metallireducens]
  misc_feature (119)..(233): NCBI GI NO: 27377516 NR Description: Peptidylprolyl isomerase
MELTSSSRSVLSSCNRPVARALCRTAYPGARRKEKGIVCILSEEKEVVQRTIRRRAAFSLLLASPVLSVAFSAYGKSKTMNPYDERRLLQQNKKIQEANRAPEDFPNFIREGFQVKVVTPDNYITRASGLMYEDIKVGTGDSPKDGQQIIFHYVGYNEAGRRIDSTYIQGSPAKIRLGNGTLVPGFEEGIRDMKPGGKRRIIIPPELGPPVGPSTFFSAKQFEVFDVELLAVQDCQRRTIAFYSDVVCS

SEQ ID NO: 39604 - protein, 170 aa, Zea mays subsp. mays
  peptide (1)..(170): Ceres Seq. ID no. 12383278
  misc_feature (59)..(106): Pfam Name: Pfam Description:  FKBP-type peptidyl-prolyl cis-trans isomerase
  misc_feature (1)..(170): NCBI GI NO: 33146997 NR Description: putative FKBP-type peptidyl-prolyl cis-transisomerase
  misc_feature (1)..(170): NCBI GI NO: 30695188 NR Description: immunophilin / FKBP-type peptidyl-prolyl cis-transisomerase
  misc_feature (1)..(106): NCBI GI NO: 11283515 NR Description: hypothetical protein T8B10
  misc_feature (139)..(170): NCBI GI NO: 11283515 NR Description: hypothetical protein T8B10
  misc_feature (45)..(153): NCBI GI NO: 39997372 NR Description: FKBP-type peptidyl-prolyl cis-trans isomerase
  misc_feature (40)..(154): NCBI GI NO: 37520410 NR Description: FKBP-type peptidyl-prolyl cis-trans isomerase
  misc_feature (43)..(154): NCBI GI NO: 23129112 NR Description: hypothetical protein [Nostoc punctiforme]
  misc_feature (45)..(154): NCBI GI NO: 22298646 NR Description: FKBP-type peptidyl-prolyl cis-trans isomerase
  misc_feature (41)..(151): NCBI GI NO: 23053670 NR Description: hypothetical protein [Geobacter metallireducens]
  misc_feature (40)..(154): NCBI GI NO: 27377516 NR Description: Peptidylprolyl isomerase
MNPYDERRLLQQNKKIQEANRAPEDFPNFIREGFQVKVVTPDNYITRASGLMYEDIKVGTGDSPKDGQQIIFHYVGYNEAGRRIDSTYIQGSPAKIRLGNGTLVPGFEEGIRDMKPGGKRRIIIPPELGPPVGPSTFFSAKQFEVFDVELLAVQDCQRRTIAFYSDVVCS

SEQ ID NO: 39605 - DNA, 429 bp, Zea mays subsp. mays
  misc_feature (1)..(429): Ceres Seq. ID no. 1676685
ctttctacccccagggtcgcggcgagcgcgcctatgacatctactcgcggctgctgcgggagcgcatcgtgtgcgtcatgggcccgatcgatgacagcgttgccagccttgttatcgcacagctcctcttcctgcaatccgagagcaacaagaagcccatccacatgtacatcaacagccctggtggtgtggtgaccgcgggcctggccatctacgacacgatgcagtacatcctcaacccgatctgcacctggtgcgtgggccaggccgccagcatgggctccctgcttctcgccgccggcaccccaggcatgcccactcgctcctcctctccagaatcatgtggaggggccagaggctgccagacccccagctgggccctgctcaccccttgttgctgggcttggaggggcctcttgaggaactttt

SEQ ID NO: 39606 - protein, 142 aa, Zea mays subsp. mays
  peptide (1)..(142): Ceres Seq. ID no. 1676686
  misc_feature (5)..(122): Pfam Name: Pfam Description:  Clp protease
  misc_feature (5)..(122): NCBI GI NO: 5174419 NR Description: endopeptidase Clp precursor
  misc_feature (5)..(122): NCBI GI NO: 8393156 NR Description: caseinolytic protease
  misc_feature (5)..(122): NCBI GI NO: 34882298 NR Description: similar to ClpP protease [Rattus norvegicus]
  misc_feature (5)..(122): NCBI GI NO: 31238393 NR Description: ENSANGP00000017225 [Anopheles gambiae]
  misc_feature (5)..(122): NCBI GI NO: 20129427 NR Description: CG5045-PA [Drosophila melanogaster]
  misc_feature (26)..(122): NCBI GI NO: 26324293 NR Description: unnamed protein product [Mus musculus]
  misc_feature (4)..(119): NCBI GI NO: 39589096 NR Description: Hypothetical protein CBG00853
  misc_feature (4)..(119): NCBI GI NO: 17538017 NR Description: Clp protease [Caenorhabditis elegans]
  misc_feature (6)..(119): NCBI GI NO: 38344435 NR Description: OSJNBa0038O10.7
  misc_feature (5)..(122): NCBI GI NO: 23474550 NR Description: hypothetical protein
FYPQGRGERAYDIYSRLLRERIVCVMGPIDDSVASLVIAQLLFLQSESNKKPIHMYINSPGGVVTAGLAIYDTMQYILNPICTWCVGQAASMGSLLLAAGTPGMPTRSSSPESCGGARGCQTPSWALLTPCCWAWRGLLRNF

SEQ ID NO: 39607 - protein, 117 aa, Zea mays subsp. mays
  peptide (1)..(117): Ceres Seq. ID no. 1676687
  misc_feature (1)..(97): Pfam Name: Pfam Description:  Clp protease
  misc_feature (1)..(97): NCBI GI NO: 5174419 NR Description: endopeptidase Clp precursor
  misc_feature (1)..(97): NCBI GI NO: 8393156 NR Description: caseinolytic protease
  misc_feature (1)..(97): NCBI GI NO: 34882298 NR Description: similar to ClpP protease [Rattus norvegicus]
  misc_feature (1)..(97): NCBI GI NO: 31238393 NR Description: ENSANGP00000017225 [Anopheles gambiae]
  misc_feature (1)..(97): NCBI GI NO: 20129427 NR Description: CG5045-PA [Drosophila melanogaster]
  misc_feature (1)..(97): NCBI GI NO: 26324293 NR Description: unnamed protein product [Mus musculus]
  misc_feature (1)..(94): NCBI GI NO: 39589096 NR Description: Hypothetical protein CBG00853
  misc_feature (1)..(94): NCBI GI NO: 17538017 NR Description: Clp protease [Caenorhabditis elegans]
  misc_feature (1)..(94): NCBI GI NO: 38344435 NR Description: OSJNBa0038O10.7
  misc_feature (1)..(97): NCBI GI NO: 23474550 NR Description: hypothetical protein
MGPIDDSVASLVIAQLLFLQSESNKKPIHMYINSPGGVVTAGLAIYDTMQYILNPICTWCVGQAASMGSLLLAAGTPGMPTRSSSPESCGGARGCQTPSWALLTPCCWAWRGLLRNF

SEQ ID NO: 39608 - protein, 88 aa, Zea mays subsp. mays
  peptide (1)..(88): Ceres Seq. ID no. 1676688
  misc_feature (1)..(68): Pfam Name: Pfam Description:  Clp protease
  misc_feature (1)..(68): NCBI GI NO: 5174419 NR Description: endopeptidase Clp precursor
  misc_feature (1)..(68): NCBI GI NO: 8393156 NR Description: caseinolytic protease
  misc_feature (1)..(68): NCBI GI NO: 34882298 NR Description: similar to ClpP protease [Rattus norvegicus]
  misc_feature (1)..(68): NCBI GI NO: 31238393 NR Description: ENSANGP00000017225 [Anopheles gambiae]
  misc_feature (1)..(68): NCBI GI NO: 20129427 NR Description: CG5045-PA [Drosophila melanogaster]
  misc_feature (1)..(68): NCBI GI NO: 26324293 NR Description: unnamed protein product [Mus musculus]
  misc_feature (1)..(65): NCBI GI NO: 39589096 NR Description: Hypothetical protein CBG00853
  misc_feature (1)..(65): NCBI GI NO: 17538017 NR Description: Clp protease [Caenorhabditis elegans]
  misc_feature (1)..(65): NCBI GI NO: 38344435 NR Description: OSJNBa0038O10.7
  misc_feature (1)..(68): NCBI GI NO: 23474550 NR Description: hypothetical protein
MYINSPGGVVTAGLAIYDTMQYILNPICTWCVGQAASMGSLLLAAGTPGMPTRSSSPESCGGARGCQTPSWALLTPCCWAWRGLLRNF

SEQ ID NO: 39609 - DNA, 1211 bp, Zea mays subsp. mays
  misc_feature (1)..(1211): Ceres Seq. ID no. 12415232
  misc_feature (1207)..(1207): n is a, c, t, g, unknown, or other
  misc_feature (1206)..(1206): n is a, c, t, g, unknown, or other
gcacgagaccattacctagaacatcctaatcgaaaaagggtgccgtgcgagtacaagcacaggaacctgtcggtgagggtgcaggagaagaggcgctccccggggggccctggcgacctcgccatcaggtttctctaccagggcggccagaccgacatcgtcgccgtcgacgtcgcgcaggtgggctcgtccaactggaagtccatgacgcgccacagcggcgggccggcgtggagcacgaggcaggcgccggcggggccgctccagctcagggtggtggtgacgggcggctacgacggcaagtgggtgtgggcggagcgcgaggtgctgccgcggcggcggcgcgccggcgaggtctacgacacgggcgtccagatcaccgacgtcgccccaacccgcagggctccttccactacggcgccatcccgacttccaggacgctggtgctggccagctccgcttccctcgacggcgccggccgtaggcgctgcgcctgtcaacgcagtgtccttcgtcgtgcccgacacgccgctcaagctcgccgacagatacgacatcgccggcgtcatcgactgggacggcctccccgcgcggctcgacggcgccgcggcggtgccgcgcgccgggacgcccgtgctcaggctcggcctgcacgagttcgtggaggtggtgttccagaacacggaggaggagctgcagtcgtggcacctcgatggatacgacttctgggttgtagggtacggcgatggccagtggaatgagacgcagcggcagacgtacaacttggtggacgcgcaggcaagacacaccgttcaggtgtaccccaacgggtggtcggcgatcctggtgtcgctggacaaccaggggatgtggaacctgcggtcggcgatgtgggaccggcattacctcgggcagcagctctacctcagggtgtggacgccggagcagagcctctccaacgagtacgccatccccgccaacgccatcctctgcgggaaggccgccgccctcccacactgacacgacgacgttcagcagccatactactgcctgctccattcgaccaaccaagtgaaagaagaagaggagaatctatttttgttgctgcaagaattaatgtgaaaaaaaacacaattactgccactggtatacgtatctcctaactcctaattgtccagcaacagttacagcgtttttttatgcaannctgc

SEQ ID NO: 39610 - protein, 339 aa, Zea mays subsp. mays
  peptide (1)..(339): Ceres Seq. ID no. 12415233
  misc_feature (23)..(111): Pfam Name: Pfam Description:  Pollen allergen
  misc_feature (154)..(339): NCBI GI NO: 33146556 NR Description: putative pollen-specific protein NTP303 precursor
  misc_feature (154)..(339): NCBI GI NO: 34915400 NR Description: contains ESTsD23897
  misc_feature (166)..(334): NCBI GI NO: 21536987 NR Description: pectinesterase-like protein [Arabidopsis thaliana]
  misc_feature (166)..(334): NCBI GI NO: 9758142 NR Description: pectinesterase like protein [Arabidopsis thaliana]
  misc_feature (166)..(334): NCBI GI NO: 18425129 NR Description: pectinesterase
  misc_feature (166)..(334): NCBI GI NO: 15235448 NR Description: pectinesterase
  misc_feature (166)..(335): NCBI GI NO: 15222981 NR Description: pectinesterase
  misc_feature (166)..(335): NCBI GI NO: 15982771 NR Description: At1g76160/T23E18_10 [Arabidopsis thaliana]
  misc_feature (166)..(335): NCBI GI NO: 34394659 NR Description: putative PS60
  misc_feature (166)..(334): NCBI GI NO: 18400335 NR Description: pectinesterase
ARDHYLEHPNRKRVPCEYKHRNLSVRVQEKRRSPGGPGDLAIRFLYQGGQTDIVAVDVAQVGSSNWKSMTRHSGGPAWSTRQAPAGPLQLRVVVTGGYDGKWVWAEREVLPRRRRAGEVYDTGVQITDVAPTRRAPSTTAPSRLPGRWCWPAPLPSTAPAVGAAPVNAVSFVVPDTPLKLADRYDIAGVIDWDGLPARLDGAAAVPRAGTPVLRLGLHEFVEVVFQNTEEELQSWHLDGYDFWVVGYGDGQWNETQRQTYNLVDAQARHTVQVYPNGWSAILVSLDNQGMWNLRSAMWDRHYLGQQLYLRVWTPEQSLSNEYAIPANAILCGKAAALPH

SEQ ID NO: 39611 - protein, 271 aa, Zea mays subsp. mays
  peptide (1)..(271): Ceres Seq. ID no. 12415234
  misc_feature (86)..(271): NCBI GI NO: 33146556 NR Description: putative pollen-specific protein NTP303 precursor
  misc_feature (86)..(271): NCBI GI NO: 34915400 NR Description: contains ESTsD23897
  misc_feature (98)..(266): NCBI GI NO: 21536987 NR Description: pectinesterase-like protein [Arabidopsis thaliana]
  misc_feature (98)..(266): NCBI GI NO: 9758142 NR Description: pectinesterase like protein [Arabidopsis thaliana]
  misc_feature (98)..(266): NCBI GI NO: 18425129 NR Description: pectinesterase
  misc_feature (98)..(266): NCBI GI NO: 15235448 NR Description: pectinesterase
  misc_feature (98)..(267): NCBI GI NO: 15222981 NR Description: pectinesterase
  misc_feature (98)..(267): NCBI GI NO: 15982771 NR Description: At1g76160/T23E18_10 [Arabidopsis thaliana]
  misc_feature (98)..(267): NCBI GI NO: 34394659 NR Description: putative PS60
  misc_feature (98)..(266): NCBI GI NO: 18400335 NR Description: pectinesterase
MTRHSGGPAWSTRQAPAGPLQLRVVVTGGYDGKWVWAEREVLPRRRRAGEVYDTGVQITDVAPTRRAPSTTAPSRLPGRWCWPAPLPSTAPAVGAAPVNAVSFVVPDTPLKLADRYDIAGVIDWDGLPARLDGAAAVPRAGTPVLRLGLHEFVEVVFQNTEEELQSWHLDGYDFWVVGYGDGQWNETQRQTYNLVDAQARHTVQVYPNGWSAILVSLDNQGMWNLRSAMWDRHYLGQQLYLRVWTPEQSLSNEYAIPANAILCGKAAALPH

SEQ ID NO: 39612 - DNA, 1362 bp, Zea mays subsp. mays
  misc_feature (1)..(1362): Ceres Seq. ID no. 12368239
gcacgagaccattacctagaacatcctaatcgaaaacccagaacccagagctccaaacctaggccggagccgcggtgcaagcagctacgtggattggacttggacgtctggctctggaggtcccaagttcccaacgcttgctggagttgagatctggtgggcttccggaggagacgccgacggtttgcgaggtttgctggctccgtggcgtcgcggaaggtcatggagcaccgcgccttcgactgcagcgggagtgatgatgatctccctccaacatatcaaattagagtaccgagaatgcatttcagtgggaacagaaggccattagcaggcgcattttctcagccaagaccacacaacaagttggatagcgatatacatcagattgagcaacaggcatatactggtgttcttagagcattcaaaatgcaatcggatgccctgacatgggaaaaagaaagtctaattactgaactaagaagagagttgaaagtctctgatgtggaacacaggatgctattaaacatggtcaatgaagaggaggctatccatacaataaggcagtcaaggcagggatgtggaatgcaatctagcttgccttataatagcgtagttgatcacaaccttggacctatcaagcggcagaagaaatcacatcccatctattcactccctgtggatccccattcacccagcatgcctttgaaagcattggtgggcaacaagacatatacactggcacctgaaaacataagacggggatctgcctatcaaacccttccacatcaggttggttggctgggcatctgatggtgctacgaaaggtatggatgggagaagcggaaggtatcacacgaacgagtattatgcttcacataatgacatggggcttttgaacttcaatcgtactgacatacctgatactgaaactcttgtgaaaaaggtggagagggtattatcccggccagatgtgtatgcaattgaaagggcaaaggaactgcttataggccaagagcagtcattgcttgatgcaattgccaaacttgatgaagcatctgaccatgaaagcgatgatatgctagttgggagccggatacacgccaccattgggtgacgcgggcagcacgcctctgacacggggcgatgctttggagttcagacctctggcagcaggcggagaggcaacgatatgtgaaatagtgctgtgtattgtaaaacgctacctgttttagtccggtagtagcctagtaggttaggttcttttggcagcctggcaaatctgtgcatgcgccatgcagtgtgatgggaatatatgtcttgagcaccatcacatgtgatgtgatgctgtctcgtttcatctcc

SEQ ID NO: 39613 - protein, 195 aa, Zea mays subsp. mays
  peptide (1)..(195): Ceres Seq. ID no. 12368240
  misc_feature (48)..(120): Pfam Name: Pfam Description:  ENT domain
  misc_feature (1)..(184): NCBI GI NO: 28411871 NR Description: OSJNBa0016N23.23
  misc_feature (6)..(160): NCBI GI NO: 19387275 NR Description: unknown [Oryza sativa (japonica cultivar-group)]
  misc_feature (1)..(159): NCBI GI NO: 11358228 NR Description: hypothetical protein T24H18
  misc_feature (1)..(174): NCBI GI NO: 38637206 NR Description: unknown protein
  misc_feature (1)..(159): NCBI GI NO: 30684221 NR Description: expressed protein [Arabidopsis thaliana]
  misc_feature (48)..(149): NCBI GI NO: 15229958 NR Description: unknown protein; protein id: At3g12140.1
  misc_feature (45)..(176): NCBI GI NO: 15240146 NR Description: putative protein; protein id: At5g06780
  misc_feature (48)..(176): NCBI GI NO: 21553685 NR Description: unknown [Arabidopsis thaliana]
  misc_feature (48)..(149): NCBI GI NO: 9294111 NR Description: emb|CAB88266
  misc_feature (48)..(180): NCBI GI NO: 15224878 NR Description: hypothetical protein; protein id: At2g44440.1
MEHRAFDCSGSDDDLPPTYQIRVPRMHFSGNRRPLAGAFSQPRPHNKLDSDIHQIEQQAYTGVLRAFKMQSDALTWEKESLITELRRELKVSDVEHRMLLNMVNEEEAIHTIRQSRQGCGMQSSLPYNSVVDHNLGPIKRQKKSHPIYSLPVDPHSPSMPLKALVGNKTYTLAPENIRRGSAYQTLPHQVGWLGI

SEQ ID NO: 39614 - protein, 170 aa, Zea mays subsp. mays
  peptide (1)..(170): Ceres Seq. ID no. 12368241
  misc_feature (23)..(95): Pfam Name: Pfam Description:  ENT domain
  misc_feature (1)..(159): NCBI GI NO: 28411871 NR Description: OSJNBa0016N23.23
  misc_feature (1)..(135): NCBI GI NO: 19387275 NR Description: unknown [Oryza sativa (japonica cultivar-group)]
  misc_feature (1)..(134): NCBI GI NO: 11358228 NR Description: hypothetical protein T24H18
  misc_feature (1)..(149): NCBI GI NO: 38637206 NR Description: unknown protein
  misc_feature (1)..(134): NCBI GI NO: 30684221 NR Description: expressed protein [Arabidopsis thaliana]
  misc_feature (23)..(124): NCBI GI NO: 15229958 NR Description: unknown protein; protein id: At3g12140.1
  misc_feature (20)..(151): NCBI GI NO: 15240146 NR Description: putative protein; protein id: At5g06780
  misc_feature (23)..(151): NCBI GI NO: 21553685 NR Description: unknown [Arabidopsis thaliana]
  misc_feature (23)..(124): NCBI GI NO: 9294111 NR Description: emb|CAB88266
  misc_feature (23)..(155): NCBI GI NO: 15224878 NR Description: hypothetical protein; protein id: At2g44440.1
MHFSGNRRPLAGAFSQPRPHNKLDSDIHQIEQQAYTGVLRAFKMQSDALTWEKESLITELRRELKVSDVEHRMLLNMVNEEEAIHTIRQSRQGCGMQSSLPYNSVVDHNLGPIKRQKKSHPIYSLPVDPHSPSMPLKALVGNKTYTLAPENIRRGSAYQTLPHQVGWLGI

SEQ ID NO: 39615 - protein, 127 aa, Zea mays subsp. mays
  peptide (1)..(127): Ceres Seq. ID no. 12368242
  misc_feature (1)..(52): Pfam Name: Pfam Description:  ENT domain
  misc_feature (1)..(116): NCBI GI NO: 28411871 NR Description: OSJNBa0016N23.23
  misc_feature (1)..(92): NCBI GI NO: 19387275 NR Description: unknown [Oryza sativa (japonica cultivar-group)]
  misc_feature (1)..(91): NCBI GI NO: 11358228 NR Description: hypothetical protein T24H18
  misc_feature (1)..(106): NCBI GI NO: 38637206 NR Description: unknown protein
  misc_feature (1)..(91): NCBI GI NO: 30684221 NR Description: expressed protein [Arabidopsis thaliana]
  misc_feature (1)..(81): NCBI GI NO: 15229958 NR Description: unknown protein; protein id: At3g12140.1
  misc_feature (1)..(108): NCBI GI NO: 15240146 NR Description: putative protein; protein id: At5g06780
  misc_feature (1)..(108): NCBI GI NO: 21553685 NR Description: unknown [Arabidopsis thaliana]
  misc_feature (1)..(81): NCBI GI NO: 9294111 NR Description: emb|CAB88266
  misc_feature (1)..(112): NCBI GI NO: 15224878 NR Description: hypothetical protein; protein id: At2g44440.1
MQSDALTWEKESLITELRRELKVSDVEHRMLLNMVNEEEAIHTIRQSRQGCGMQSSLPYNSVVDHNLGPIKRQKKSHPIYSLPVDPHSPSMPLKALVGNKTYTLAPENIRRGSAYQTLPHQVGWLGI

SEQ ID NO: 39616 - DNA, 790 bp, Zea mays subsp. mays
  misc_feature (1)..(790): Ceres Seq. ID no. 12359021
acaccggcattctgctctgcactccattgctagctgcaacgcactgcaagaaagagctagctagctcaccgtcgttacgaagatgatcaagctgaggtaccctaagaagctgttcaggaggagctcctccaagggcagcagcactaccaccaccaccagcagcagcagcagcgacggtgatgccgccggcagcgcccgcggcggggagatcgagtgggaggtgcggccgggcggcatgctggtgcagaagagggacggcagggggcacgtggacgtcatcaccgtgagggtcgccaccggcttctcctggcacgacgtctccgtcgtggctacctgcacttttggtgagctgaaggcggtgctgtggaagatgacagggctggagcctcgggagcagaggctcctgttcaggggcaaggagagggaggacggcgaccacctccacatgatcggggtgagggacatggacaaggtgctgctcctggaggaccctgccctcaaggacatgaagctccgggccggcctcacggcggcgtatcgtcagactttcatcagggtgtagtagtaggcttaggcttgccgcccccgccccctaattaactgtgatgcatgatatatatagagagagtaaaacgaaccagtatcgtgttttcggctgctctcggtcggtgaacgactgcctgcctgttgaagagaagccactgcttgtttttgtttatgtttagctgtgtcttttgtcatttttgtagggtagagagatgaatcacgtacgctgagtttttactggcct

SEQ ID NO: 39617 - protein, 159 aa, Zea mays subsp. mays
  peptide (1)..(159): Ceres Seq. ID no. 12359022
  misc_feature (66)..(138): Pfam Name: Pfam Description:  Ubiquitin family
  misc_feature (1)..(150): NCBI GI NO: 32488469 NR Description: OSJNBa0081L15.2
  misc_feature (1)..(146): NCBI GI NO: 20804881 NR Description: P0497A05.5
  misc_feature (1)..(144): NCBI GI NO: 15241381 NR Description: putative protein; protein id: At5g14360.1
  misc_feature (12)..(143): NCBI GI NO: 15237460 NR Description: putative protein; protein id: At5g40630.1
  misc_feature (82)..(146): NCBI GI NO: 34907972 NR Description: P0446G04.18
  misc_feature (29)..(92): NCBI GI NO: 34907972 NR Description: P0446G04.18
  misc_feature (10)..(137): NCBI GI NO: 38344334 NR Description: OSJNBa0058K23.16
  misc_feature (13)..(137): NCBI GI NO: 6624711 NR Description: hypothetical protein
  misc_feature (34)..(144): NCBI GI NO: 34898024 NR Description: ESTs AU082174
  misc_feature (36)..(144): NCBI GI NO: 21553443 NR Description: unknown [Arabidopsis thaliana]
MIKLRYPKKLFRRSSSKGSSTTTTTSSSSSDGDAAGSARGGEIEWEVRPGGMLVQKRDGRGHVDVITVRVATGFSWHDVSVVATCTFGELKAVLWKMTGLEPREQRLLFRGKEREDGDHLHMIGVRDMDKVLLLEDPALKDMKLRAGLTAAYRQTFIRV

SEQ ID NO: 39618 - protein, 108 aa, Zea mays subsp. mays
  peptide (1)..(108): Ceres Seq. ID no. 12359023
  misc_feature (15)..(87): Pfam Name: Pfam Description:  Ubiquitin family
  misc_feature (1)..(99): NCBI GI NO: 32488469 NR Description: OSJNBa0081L15.2
  misc_feature (1)..(95): NCBI GI NO: 20804881 NR Description: P0497A05.5
  misc_feature (1)..(93): NCBI GI NO: 15241381 NR Description: putative protein; protein id: At5g14360.1
  misc_feature (1)..(92): NCBI GI NO: 15237460 NR Description: putative protein; protein id: At5g40630.1
  misc_feature (31)..(95): NCBI GI NO: 34907972 NR Description: P0446G04.18
  misc_feature (1)..(41): NCBI GI NO: 34907972 NR Description: P0446G04.18
  misc_feature (1)..(86): NCBI GI NO: 38344334 NR Description: OSJNBa0058K23.16
  misc_feature (1)..(86): NCBI GI NO: 6624711 NR Description: hypothetical protein
  misc_feature (1)..(93): NCBI GI NO: 34898024 NR Description: ESTs AU082174
  misc_feature (1)..(93): NCBI GI NO: 21553443 NR Description: unknown [Arabidopsis thaliana]
MLVQKRDGRGHVDVITVRVATGFSWHDVSVVATCTFGELKAVLWKMTGLEPREQRLLFRGKEREDGDHLHMIGVRDMDKVLLLEDPALKDMKLRAGLTAAYRQTFIRV

SEQ ID NO: 39619 - DNA, 1887 bp, Zea mays subsp. mays
  misc_feature (1)..(1887): Ceres Seq. ID no. 12374668
gcttgcaaacgccgcattctcgacagacgacagatgctttgcaacatagacgccgatgcacccgtcaccctgcaagaaaagaaatctacaggaagactctcagctcgccggtgatcgagtggcatggatgtgccaaacgcaagcgtggaggccgagccactgctcgtgccacgcagctccaccgaaggtggctcggcggcggcaaccgagtcgaagagactgctgcggctcgctgggccactggtcctgagcttcatcctgcggaacgccgtccagatggtgtccgtcatgtttgtcggccacctcgggaagctccccctcgccggtgcctccctggcctcgtcgctcgccaacgtcacgggcttcagcctggtcgccggcatggccggcgccctcgacacgctgtgcgggcaggcgttcggggcgcggcggtacgcgctgctgggcgtctacaagcagcgctccatgctggtgctagcgctcgccagcctccccgtcgtgctgacgtgggtgttcgtggagcagctcctcctgaccatcggcgaggacccggacatcgccgcggaggccggcgcgtacgcgcggtggctgatcccgtccctcgccgcgttcgtgcccctcacctgccacatgaggttcctgcagacgcagagcgtcgtggtgcccgtcatggccagctccggcgtcacggcgctcgcccacgtcctgctgtgctacacgctggtgtacaaggtgggcatggggagcaagggcgccgcgctcggcgccgccgtctcctacagcgtcaacttggccgtgctcgctctttacgtcaggctgtccagcgcttgcaaggcaacatggacagggttctccaccgaggccttctctttctctgggctgcgggagtacgcgaagctcgccgtcccgtcggcgatgatggtttgcttggagtggtggtcgtttgagctgctcgttcttctctctgggtttttgccaaaccctaaactcgagacttccgtcctgtcaatatgcgtcaacaccgctattctgctgtacatggtaccgctgggccttggcacatctgcaagtacacgcgtctccaatgagctcggcgcagggcagcctgaagcagcaaggctagcagcgcgagttgtggtctgcatgaccttgtgtggaggggtggtgttggcaaccatcatgattctcctgcgcaacatctggggatacgcatacagcagcgaggaggatgtggtggcatacattgccagaatgcttcccatccttgctgtttccttcttcgtcgacggccttaacggttctctttcaggggtaatcataggatgtggcaaacagaagattggagcacgcgtaaacctcggcgccttttacatggttggcattccaacagggctgttgcttgcgtttgtgttcaaactaaatggaatgggtctttggcttggcattgtgtgcggtagcatcagcaaactggcgttgctcctgtggattgcactgcgcatagattgggagagcgaagctatcaaggccaagaacagggtcctccgttcgtcagggcaaacataatgatgagggtctcctacctttgtcgcataaccatatgtcatatgtcagggatatttagtggtaaggatccgtttggcattgctgaaccacccaatctcagtctcagctctacttcaaagccttcatcatgaagttagagaaggggaaaaaaggcgtgcaactttgacgttaactccagctactgccggtcctgcttttaagggcatgcgtgtatttttatactatgttccagcaagtgtgtgtattttttatataccatctaatttttattgtctcctagtttacttttaaactacaacacgataaataaaaaagaattgagag

SEQ ID NO: 39620 - protein, 479 aa, Zea mays subsp. mays
  peptide (1)..(479): Ceres Seq. ID no. 12374669
  misc_feature (262)..(425): Pfam Name: Pfam Description:  MatE
  misc_feature (1)..(476): NCBI GI NO: 37533146 NR Description: putative integral membrane protein
  misc_feature (21)..(476): NCBI GI NO: 37533148 NR Description: putative transmembrane protein
  misc_feature (1)..(467): NCBI GI NO: 37533130 NR Description: putative integral membrane protein
  misc_feature (7)..(476): NCBI GI NO: 38346676 NR Description: OSJNBa0069D17.7
  misc_feature (6)..(474): NCBI GI NO: 22138480 NR Description: hypothetical protein
  misc_feature (24)..(476): NCBI GI NO: 15237158 NR Description: MATE efflux family protein, putative
  misc_feature (12)..(472): NCBI GI NO: 15219524 NR Description: putative integral membrane protein
  misc_feature (12)..(472): NCBI GI NO: 21537267 NR Description: putative integral membrane protein
  misc_feature (36)..(475): NCBI GI NO: 16797803 NR Description: hypothetical membrane protein-1
  misc_feature (29)..(464): NCBI GI NO: 15226290 NR Description: hypothetical protein; protein id: At2g34360.1
MDVPNASVEAEPLLVPRSSTEGGSAAATESKRLLRLAGPLVLSFILRNAVQMVSVMFVGHLGKLPLAGASLASSLANVTGFSLVAGMAGALDTLCGQAFGARRYALLGVYKQRSMLVLALASLPVVLTWVFVEQLLLTIGEDPDIAAEAGAYARWLIPSLAAFVPLTCHMRFLQTQSVVVPVMASSGVTALAHVLLCYTLVYKVGMGSKGAALGAAVSYSVNLAVLALYVRLSSACKATWTGFSTEAFSFSGLREYAKLAVPSAMMVCLEWWSFELLVLLSGFLPNPKLETSVLSICVNTAILLYMVPLGLGTSASTRVSNELGAGQPEAARLAARVVVCMTLCGGVVLATIMILLRNIWGYAYSSEEDVVAYIARMLPILAVSFFVDGLNGSLSGVIIGCGKQKIGARVNLGAFYMVGIPTGLLLAFVFKLNGMGLWLGIVCGSISKLALLLWIALRIDWESEAIKAKNRVLRSSGQT

SEQ ID NO: 39621 - protein, 428 aa, Zea mays subsp. mays
  peptide (1)..(428): Ceres Seq. ID no. 12374670
  misc_feature (211)..(374): Pfam Name: Pfam Description:  MatE
  misc_feature (1)..(425): NCBI GI NO: 37533146 NR Description: putative integral membrane protein
  misc_feature (1)..(425): NCBI GI NO: 37533148 NR Description: putative transmembrane protein
  misc_feature (1)..(416): NCBI GI NO: 37533130 NR Description: putative integral membrane protein
  misc_feature (1)..(425): NCBI GI NO: 38346676 NR Description: OSJNBa0069D17.7
  misc_feature (1)..(423): NCBI GI NO: 22138480 NR Description: hypothetical protein
  misc_feature (1)..(425): NCBI GI NO: 15237158 NR Description: MATE efflux family protein, putative
  misc_feature (1)..(421): NCBI GI NO: 15219524 NR Description: putative integral membrane protein
  misc_feature (1)..(421): NCBI GI NO: 21537267 NR Description: putative integral membrane protein
  misc_feature (1)..(424): NCBI GI NO: 16797803 NR Description: hypothetical membrane protein-1
  misc_feature (1)..(413): NCBI GI NO: 15226290 NR Description: hypothetical protein; protein id: At2g34360.1
MVSVMFVGHLGKLPLAGASLASSLANVTGFSLVAGMAGALDTLCGQAFGARRYALLGVYKQRSMLVLALASLPVVLTWVFVEQLLLTIGEDPDIAAEAGAYARWLIPSLAAFVPLTCHMRFLQTQSVVVPVMASSGVTALAHVLLCYTLVYKVGMGSKGAALGAAVSYSVNLAVLALYVRLSSACKATWTGFSTEAFSFSGLREYAKLAVPSAMMVCLEWWSFELLVLLSGFLPNPKLETSVLSICVNTAILLYMVPLGLGTSASTRVSNELGAGQPEAARLAARVVVCMTLCGGVVLATIMILLRNIWGYAYSSEEDVVAYIARMLPILAVSFFVDGLNGSLSGVIIGCGKQKIGARVNLGAFYMVGIPTGLLLAFVFKLNGMGLWLGIVCGSISKLALLLWIALRIDWESEAIKAKNRVLRSSGQT

SEQ ID NO: 39622 - protein, 424 aa, Zea mays subsp. mays
  peptide (1)..(424): Ceres Seq. ID no. 12374671
  misc_feature (207)..(370): Pfam Name: Pfam Description:  MatE
  misc_feature (1)..(421): NCBI GI NO: 37533146 NR Description: putative integral membrane protein
  misc_feature (1)..(421): NCBI GI NO: 37533148 NR Description: putative transmembrane protein
  misc_feature (1)..(412): NCBI GI NO: 37533130 NR Description: putative integral membrane protein
  misc_feature (1)..(421): NCBI GI NO: 38346676 NR Description: OSJNBa0069D17.7
  misc_feature (1)..(419): NCBI GI NO: 22138480 NR Description: hypothetical protein
  misc_feature (1)..(421): NCBI GI NO: 15237158 NR Description: MATE efflux family protein, putative
  misc_feature (1)..(417): NCBI GI NO: 15219524 NR Description: putative integral membrane protein
  misc_feature (1)..(417): NCBI GI NO: 21537267 NR Description: putative integral membrane protein
  misc_feature (1)..(420): NCBI GI NO: 16797803 NR Description: hypothetical membrane protein-1
  misc_feature (1)..(409): NCBI GI NO: 15226290 NR Description: hypothetical protein; protein id: At2g34360.1
MFVGHLGKLPLAGASLASSLANVTGFSLVAGMAGALDTLCGQAFGARRYALLGVYKQRSMLVLALASLPVVLTWVFVEQLLLTIGEDPDIAAEAGAYARWLIPSLAAFVPLTCHMRFLQTQSVVVPVMASSGVTALAHVLLCYTLVYKVGMGSKGAALGAAVSYSVNLAVLALYVRLSSACKATWTGFSTEAFSFSGLREYAKLAVPSAMMVCLEWWSFELLVLLSGFLPNPKLETSVLSICVNTAILLYMVPLGLGTSASTRVSNELGAGQPEAARLAARVVVCMTLCGGVVLATIMILLRNIWGYAYSSEEDVVAYIARMLPILAVSFFVDGLNGSLSGVIIGCGKQKIGARVNLGAFYMVGIPTGLLLAFVFKLNGMGLWLGIVCGSISKLALLLWIALRIDWESEAIKAKNRVLRSSGQT

SEQ ID NO: 39623 - DNA, 2125 bp, Zea mays subsp. mays
  misc_feature (1)..(2125): Ceres Seq. ID no. 12383484
cgcaattaaccctcactaaagggaacaaaagctggagctccaccgcggtggcggccgctctagaactagtggatcccccgggctgcaggaattcgcacgagaccattacctagaacatcctaatcgaaaaactcgatcgtcgtgcacgcccccccaccggccggatcgacagcaccgatcaccctgaccgtctgcgcgcggcggctctcactccggtgacacgcagggcgcgcataggcgagggcctccccccccggcgagggatggtgtggtcggctgggatggcaacaatgcgaggcgcctccgccgccgcgctactggtgctggcgctcgccgccgccgtggcgcgcgcggaggacccctaccacttcttcgagtggaaggtgacgtacgggacgaggaccatcatggggacggcgcagcaggtgatcctcatcaacgacatgttcccgggccctaccatcaactgctcatccaacaacaacatcctcgtcaacgtcttcaacatgctcgaccagccgctcctcttcacctggcacgggatccagcagaggaagaactcgtggcaggacggcatgccgggcaccatgtgcccgatccagcccaacaccaacttcacgtaccactggcagcccaaggaccagatcggcagcttcttctactaccccagcaccggcatgcagcgggcggcgggcgcctacgggctgatcagcgtccacagccgtgacctgatcccggtgcccttcgacacgccggccgacgacttcccggtgctcatcggcgactggtacaccaaggaccacgccgtgctggccaagaacctggacgccggcaaggggatcgggcggccggcggggctggtgatcaacggcaagaacgagaaggacgcgtcgaacccgcccatgtacaacgtggaggccggcaagacgtaccggttccgcgtgtgcaacgtgggcatcaaggcgtccttcaacgtccgcatccaggaccacatcatgaagctggtggagatggaggggtcccacaccatgcagaacgactacgactcgctggacctccacatcgggcagtgcctgtcgttcctggtgaccgcggaccagaagcccggcgactacctgctggtggcgtccacccggttcatcaaggagaagagcagcaccacggccgtgatccgctacaagggctccagcgccccgccgccggccaagctgccggagggccccagcgggtgggcgtggtccatcaaccagtgcaggtccttccgctggaacctgacggccagcgcggcgcggcccaacccgcaggggtcgtaccactacggccagatcaacatcacccgcaccatcaagctcgccatgggccgcggcaaggtcgacggcaaggagaggttcggcttcaacggcgtgtcgcacgtggacccggaaacccccgtgaagctcgccgagtacttcaacgccagcgacggcgtgttcaagtacaacctcatcggggacgtgccgccctccaacacggcccccaccaagatggcacccaacgtcatcagcgccgagttccgcacgttcattgaggtggtcttcgagaaccccgagaagagcatcgacaccatccacatcgacggctacgccttcttcgccgtcggcatggggcccggcaaatggacggcagcgtcgcggagtacgtacaacctcctggacacggtgagccggcacacgatccaggtgtacccaaggtcgtggacggcggtgatgatgacgttcgacaacgcgggcatgtggagcgtccgctccaacatctgggagaggcagtacctcggcgagcagctgtacgtgagcgtcatctcgccggagcggtcgctcagggacgagtacaacatgccggagaccagcctccgctgcggcaaggtcgtcggcctgccgatgccaccgtcctaccgcgccgtctagagcgtcgaccgatcgcgcacggtgctgtacacaactaaaggagagcgagaggggactttttctcgcgtttccttctctagccagccttgtctgtccccccctcgtttattctctctctcttttttttcgttcgcttccgaggaataatacccaaacaaaaaaaacaaaggggctcaagactc

SEQ ID NO: 39624 - protein, 559 aa, Zea mays subsp. mays
  peptide (1)..(559): Ceres Seq. ID no. 12383485
  misc_feature (10)..(553): NCBI GI NO: 114268 NR Description: L-ascorbate oxidase homolog precursor (Ascorbase)
  misc_feature (10)..(553): NCBI GI NO: 99809 NR Description: pollen-specific protein Bp10
  misc_feature (10)..(556): NCBI GI NO: 15231228 NR Description: pectinesterase
  misc_feature (10)..(553): NCBI GI NO: 99808 NR Description: pollen-specific protein Bp10
  misc_feature (15)..(556): NCBI GI NO: 15222747 NR Description: pectinesterase
  misc_feature (10)..(553): NCBI GI NO: 99807 NR Description: pollen-specific protein Bp10
  misc_feature (10)..(556): NCBI GI NO: 15231231 NR Description: pectinesterase
  misc_feature (10)..(556): NCBI GI NO: 18405425 NR Description: pectinesterase
  misc_feature (19)..(558): NCBI GI NO: 128592 NR Description: POLLEN-SPECIFIC PROTEIN NTP303 PRECURSOR
  misc_feature (4)..(553): NCBI GI NO: 27817921 NR Description: putative pectinesterase
MVWSAGMATMRGASAAALLVLALAAAVARAEDPYHFFEWKVTYGTRTIMGTAQQVILINDMFPGPTINCSSNNNILVNVFNMLDQPLLFTWHGIQQRKNSWQDGMPGTMCPIQPNTNFTYHWQPKDQIGSFFYYPSTGMQRAAGAYGLISVHSRDLIPVPFDTPADDFPVLIGDWYTKDHAVLAKNLDAGKGIGRPAGLVINGKNEKDASNPPMYNVEAGKTYRFRVCNVGIKASFNVRIQDHIMKLVEMEGSHTMQNDYDSLDLHIGQCLSFLVTADQKPGDYLLVASTRFIKEKSSTTAVIRYKGSSAPPPAKLPEGPSGWAWSINQCRSFRWNLTASAARPNPQGSYHYGQINITRTIKLAMGRGKVDGKERFGFNGVSHVDPETPVKLAEYFNASDGVFKYNLIGDVPPSNTAPTKMAPNVISAEFRTFIEVVFENPEKSIDTIHIDGYAFFAVGMGPGKWTAASRSTYNLLDTVSRHTIQVYPRSWTAVMMTFDNAGMWSVRSNIWERQYLGEQLYVSVISPERSLRDEYNMPETSLRCGKVVGLPMPPSYRAV

SEQ ID NO: 39625 - protein, 553 aa, Zea mays subsp. mays
  peptide (1)..(553): Ceres Seq. ID no. 12383486
  misc_feature (4)..(547): NCBI GI NO: 114268 NR Description: L-ascorbate oxidase homolog precursor (Ascorbase)
  misc_feature (4)..(547): NCBI GI NO: 99809 NR Description: pollen-specific protein Bp10
  misc_feature (4)..(550): NCBI GI NO: 15231228 NR Description: pectinesterase
  misc_feature (4)..(547): NCBI GI NO: 99808 NR Description: pollen-specific protein Bp10
  misc_feature (9)..(550): NCBI GI NO: 15222747 NR Description: pectinesterase
  misc_feature (4)..(547): NCBI GI NO: 99807 NR Description: pollen-specific protein Bp10
  misc_feature (4)..(550): NCBI GI NO: 15231231 NR Description: pectinesterase
  misc_feature (4)..(550): NCBI GI NO: 18405425 NR Description: pectinesterase
  misc_feature (13)..(552): NCBI GI NO: 128592 NR Description: POLLEN-SPECIFIC PROTEIN NTP303 PRECURSOR
  misc_feature (1)..(547): NCBI GI NO: 27817921 NR Description: putative pectinesterase
MATMRGASAAALLVLALAAAVARAEDPYHFFEWKVTYGTRTIMGTAQQVILINDMFPGPTINCSSNNNILVNVFNMLDQPLLFTWHGIQQRKNSWQDGMPGTMCPIQPNTNFTYHWQPKDQIGSFFYYPSTGMQRAAGAYGLISVHSRDLIPVPFDTPADDFPVLIGDWYTKDHAVLAKNLDAGKGIGRPAGLVINGKNEKDASNPPMYNVEAGKTYRFRVCNVGIKASFNVRIQDHIMKLVEMEGSHTMQNDYDSLDLHIGQCLSFLVTADQKPGDYLLVASTRFIKEKSSTTAVIRYKGSSAPPPAKLPEGPSGWAWSINQCRSFRWNLTASAARPNPQGSYHYGQINITRTIKLAMGRGKVDGKERFGFNGVSHVDPETPVKLAEYFNASDGVFKYNLIGDVPPSNTAPTKMAPNVISAEFRTFIEVVFENPEKSIDTIHIDGYAFFAVGMGPGKWTAASRSTYNLLDTVSRHTIQVYPRSWTAVMMTFDNAGMWSVRSNIWERQYLGEQLYVSVISPERSLRDEYNMPETSLRCGKVVGLPMPPSYRAV

SEQ ID NO: 39626 - protein, 550 aa, Zea mays subsp. mays
  peptide (1)..(550): Ceres Seq. ID no. 12383487
  misc_feature (1)..(544): NCBI GI NO: 114268 NR Description: L-ascorbate oxidase homolog precursor (Ascorbase)
  misc_feature (1)..(544): NCBI GI NO: 99809 NR Description: pollen-specific protein Bp10
  misc_feature (1)..(547): NCBI GI NO: 15231228 NR Description: pectinesterase
  misc_feature (1)..(544): NCBI GI NO: 99808 NR Description: pollen-specific protein Bp10
  misc_feature (6)..(547): NCBI GI NO: 15222747 NR Description: pectinesterase
  misc_feature (1)..(544): NCBI GI NO: 99807 NR Description: pollen-specific protein Bp10
  misc_feature (1)..(547): NCBI GI NO: 15231231 NR Description: pectinesterase
  misc_feature (1)..(547): NCBI GI NO: 18405425 NR Description: pectinesterase
  misc_feature (10)..(549): NCBI GI NO: 128592 NR Description: POLLEN-SPECIFIC PROTEIN NTP303 PRECURSOR
  misc_feature (1)..(544): NCBI GI NO: 27817921 NR Description: putative pectinesterase
MRGASAAALLVLALAAAVARAEDPYHFFEWKVTYGTRTIMGTAQQVILINDMFPGPTINCSSNNNILVNVFNMLDQPLLFTWHGIQQRKNSWQDGMPGTMCPIQPNTNFTYHWQPKDQIGSFFYYPSTGMQRAAGAYGLISVHSRDLIPVPFDTPADDFPVLIGDWYTKDHAVLAKNLDAGKGIGRPAGLVINGKNEKDASNPPMYNVEAGKTYRFRVCNVGIKASFNVRIQDHIMKLVEMEGSHTMQNDYDSLDLHIGQCLSFLVTADQKPGDYLLVASTRFIKEKSSTTAVIRYKGSSAPPPAKLPEGPSGWAWSINQCRSFRWNLTASAARPNPQGSYHYGQINITRTIKLAMGRGKVDGKERFGFNGVSHVDPETPVKLAEYFNASDGVFKYNLIGDVPPSNTAPTKMAPNVISAEFRTFIEVVFENPEKSIDTIHIDGYAFFAVGMGPGKWTAASRSTYNLLDTVSRHTIQVYPRSWTAVMMTFDNAGMWSVRSNIWERQYLGEQLYVSVISPERSLRDEYNMPETSLRCGKVVGLPMPPSYRAV

SEQ ID NO: 39627 - DNA, 470 bp, Zea mays subsp. mays
  misc_feature (1)..(470): Ceres Seq. ID no. 2790787
cagggtaaatggaaggcacctatgattgacaacccagatttcaaggatgatccgtacatttatgcatttgacagcctgaaatacattggcattgagctgtggcaggttaaatcaggcactttgtttgacaacatcatcatcactgatgatcctgcgttggccaagacttttgcagaggagacatggggcaagcacaaggaggcagagaagactgctttcgatgaggctgagaaaaagaaggaagaagaggaagccgccaagggtggcgatgatgacgatgatgacctagaggatgaggcagacgatgacaaggcagacgatgacaaggccgactctgatgccgaggatgacaaggactctgaggagcacgacgagctctagatgatgagtatgatagaggtggccactgacattggtgccgttggcctggatttatcagctcttccattttgttctccttttctgttatc

SEQ ID NO: 39628 - protein, 126 aa, Zea mays subsp. mays
  peptide (1)..(126): Ceres Seq. ID no. 2790788
  misc_feature (24)..(125): Pfam Name: Pfam Description:  AMP-binding enzyme
  misc_feature (1)..(126): NCBI GI NO: 1181333 NR Description: calreticulin [Zea mays]
  misc_feature (1)..(126): NCBI GI NO: 11131840 NR Description: Calreticulin precursor
  misc_feature (1)..(126): NCBI GI NO: 2119370 NR Description: calreticulin precursor - maize
  misc_feature (1)..(126): NCBI GI NO: 34393218 NR Description: putative Calreticulin precursor
  misc_feature (1)..(122): NCBI GI NO: 34393219 NR Description: putative Calreticulin precursor
  misc_feature (1)..(126): NCBI GI NO: 7441498 NR Description: calreticulin - barley (fragment)
  misc_feature (1)..(126): NCBI GI NO: 7441499 NR Description: calreticulin - barley (fragment)
  misc_feature (1)..(126): NCBI GI NO: 11131838 NR Description: Calreticulin precursor
  misc_feature (1)..(122): NCBI GI NO: 13194674 NR Description: calreticulin-like protein [Pennisetum ciliare]
  misc_feature (1)..(119): NCBI GI NO: 31249766 NR Description: putative calreticulin precursor
QGKWKAPMIDNPDFKDDPYIYAFDSLKYIGIELWQVKSGTLFDNIIITDDPALAKTFAEETWGKHKEAEKTAFDEAEKKKEEEEAAKGGDDDDDDLEDEADDDKADDDKADSDAEDDKDSEEHDEL

SEQ ID NO: 39629 - protein, 119 aa, Zea mays subsp. mays
  peptide (1)..(119): Ceres Seq. ID no. 2790789
  misc_feature (17)..(118): Pfam Name: Pfam Description:  AMP-binding enzyme
  misc_feature (1)..(119): NCBI GI NO: 1181333 NR Description: calreticulin [Zea mays]
  misc_feature (1)..(119): NCBI GI NO: 11131840 NR Description: Calreticulin precursor
  misc_feature (1)..(119): NCBI GI NO: 2119370 NR Description: calreticulin precursor - maize
  misc_feature (1)..(119): NCBI GI NO: 34393218 NR Description: putative Calreticulin precursor
  misc_feature (1)..(115): NCBI GI NO: 34393219 NR Description: putative Calreticulin precursor
  misc_feature (1)..(119): NCBI GI NO: 7441498 NR Description: calreticulin - barley (fragment)
  misc_feature (1)..(119): NCBI GI NO: 7441499 NR Description: calreticulin - barley (fragment)
  misc_feature (1)..(119): NCBI GI NO: 11131838 NR Description: Calreticulin precursor
  misc_feature (1)..(115): NCBI GI NO: 13194674 NR Description: calreticulin-like protein [Pennisetum ciliare]
  misc_feature (1)..(112): NCBI GI NO: 31249766 NR Description: putative calreticulin precursor
MIDNPDFKDDPYIYAFDSLKYIGIELWQVKSGTLFDNIIITDDPALAKTFAEETWGKHKEAEKTAFDEAEKKKEEEEAAKGGDDDDDDLEDEADDDKADDDKADSDAEDDKDSEEHDEL

SEQ ID NO: 39630 - DNA, 1538 bp, Zea mays subsp. mays
  misc_feature (1)..(1538): Ceres Seq. ID no. 12415228
  misc_feature (1343)..(1343): n is a, c, t, g, unknown, or other
cgagaccattacctagaacatcctaatcgaaaaaagcagcccaaagcctcaaacccaatgcgaggcccttgggccagcagcgccttatcacttcgcctccgtctccgtggcgcgcgcgctcgcacgaacacgagtcccatgtcgtccaccgcagcgcgcgtcgtccacccggctgccgcggcgccgccgcctccccgcccacgccgcctggcgcccgcgaggtgcgcggctggatccgcgacggacacggccaccgcgggtccgacaagggtgacgaccgtcagcaaccgcggggactccttggcgatatgccgggtgctcaacggcatgtggcagaccagcggagggtggggccgcatagaccgcgacgccgcggttgacgccatgctcgcgcacgccgacgccggactctccaccttcgatatggctgaccactatgggccagcagaggatttgtatggcatgttcatcaacagaattaggagggagcgcccacctgagtttcttgaagaagtcaaggggcttacaaagtgggtaccacccccggttaagatgacaagaagttatgttgaggataatatcaacagatccaggaagaggatggatgttactgcattggacatgttgcagttccactggtgggagtactcaaatccaggctacttggatgcgctaaagcacatcacagacctgaaggaggaaggcaagataaagactgtggccctaacaaacttcgatacagacagactgcaaataattctcgaaaatggaatcccagttgtgagcaaccaggttcaacattctatcgttgatatgcgccctcagcagagaatggcagagctttgccagctaactggagttagacttataacgtatggcacagtgatgggtggtcttttgtctgaaaagtttctcgacaccaatgtatcaataccttttgctggtcctcctctaaataccccatccttgcagaaatataagaggatggttgatgcttggggtggctggagcctgttccagactttgcttcaaaccttaaagaaggtgtcactgaaacacggtgttactatttcaacggttgctgtgaaatacatactgaaccagacgtctgttgcaggttccatggtcggtgtgagattgggactctctgaacacatcaaagacaccaacgccatattctcacttgaattggatgaagaggacatgaacatcatcactgaagtgtcgaagaggggcagaaatttgatcgatattattggggattgtggtgacgagtaccgagcttagttggccatgctgctgctgggctactacagacctatatactcgtgcccaattttgcncagctctaaatttttgcctatttgggtctagcggctcagcgcactgttgaggcaaccatatacctgaatgcctattattcaggcgctagcatgtaccctccagtcctcaacagccagttataaaactgtaaatacacagcgatgcagatcgctaatgtggtaacttgttcagtcctttttagcgattactgtccc

SEQ ID NO: 39631 - protein, 428 aa, Zea mays subsp. mays
  peptide (1)..(428): Ceres Seq. ID no. 12415229
  misc_feature (90)..(427): NCBI GI NO: 18401495 NR Description: expressed protein; protein id: At2g27680
  misc_feature (118)..(427): NCBI GI NO: 11762116 NR Description: At2g27680 [Arabidopsis thaliana]
  misc_feature (101)..(427): NCBI GI NO: 23123814 NR Description: hypothetical protein [Nostoc punctiforme]
  misc_feature (98)..(426): NCBI GI NO: 13475981 NR Description: hypothetical protein [Mesorhizobium loti]
  misc_feature (105)..(427): NCBI GI NO: 40741502 NR Description: hypothetical protein AN8658.2
  misc_feature (136)..(408): NCBI GI NO: 30262030 NR Description: oxidoreductase, aldo/keto reductase family
  misc_feature (136)..(371): NCBI GI NO: 21399879 NR Description: aldo_ket_red, Aldo/keto reductase family
  misc_feature (178)..(410): NCBI GI NO: 24216672 NR Description: Aldo/keto reductase family protein
  misc_feature (136)..(408): NCBI GI NO: 30020137 NR Description: IolS protein [Bacillus cereus ATCC 14579]
  misc_feature (123)..(408): NCBI GI NO: 40644844 NR Description: side-chain ketoreductase
RDHYLEHPNRKKQPKASNPMRGPWASSALSLRLRLRGARARTNTSPMSSTAARVVHPAAAAPPPPRPRRLAPARCAAGSATDTATAGPTRVTTVSNRGDSLAICRVLNGMWQTSGGWGRIDRDAAVDAMLAHADAGLSTFDMADHYGPAEDLYGMFINRIRRERPPEFLEEVKGLTKWVPPPVKMTRSYVEDNINRSRKRMDVTALDMLQFHWWEYSNPGYLDALKHITDLKEEGKIKTVALTNFDTDRLQIILENGIPVVSNQVQHSIVDMRPQQRMAELCQLTGVRLITYGTVMGGLLSEKFLDTNVSIPFAGPPLNTPSLQKYKRMVDAWGGWSLFQTLLQTLKKVSLKHGVTISTVAVKYILNQTSVAGSMVGVRLGLSEHIKDTNAIFSLELDEEDMNIITEVSKRGRNLIDIIGDCGDEYRA

SEQ ID NO: 39632 - protein, 409 aa, Zea mays subsp. mays
  peptide (1)..(409): Ceres Seq. ID no. 12415230
  misc_feature (71)..(408): NCBI GI NO: 18401495 NR Description: expressed protein; protein id: At2g27680
  misc_feature (99)..(408): NCBI GI NO: 11762116 NR Description: At2g27680 [Arabidopsis thaliana]
  misc_feature (82)..(408): NCBI GI NO: 23123814 NR Description: hypothetical protein [Nostoc punctiforme]
  misc_feature (79)..(407): NCBI GI NO: 13475981 NR Description: hypothetical protein [Mesorhizobium loti]
  misc_feature (86)..(408): NCBI GI NO: 40741502 NR Description: hypothetical protein AN8658.2
  misc_feature (117)..(389): NCBI GI NO: 30262030 NR Description: oxidoreductase, aldo/keto reductase family
  misc_feature (117)..(352): NCBI GI NO: 21399879 NR Description: aldo_ket_red, Aldo/keto reductase family
  misc_feature (159)..(391): NCBI GI NO: 24216672 NR Description: Aldo/keto reductase family protein
  misc_feature (117)..(389): NCBI GI NO: 30020137 NR Description: IolS protein [Bacillus cereus ATCC 14579]
  misc_feature (104)..(389): NCBI GI NO: 40644844 NR Description: side-chain ketoreductase
MRGPWASSALSLRLRLRGARARTNTSPMSSTAARVVHPAAAAPPPPRPRRLAPARCAAGSATDTATAGPTRVTTVSNRGDSLAICRVLNGMWQTSGGWGRIDRDAAVDAMLAHADAGLSTFDMADHYGPAEDLYGMFINRIRRERPPEFLEEVKGLTKWVPPPVKMTRSYVEDNINRSRKRMDVTALDMLQFHWWEYSNPGYLDALKHITDLKEEGKIKTVALTNFDTDRLQIILENGIPVVSNQVQHSIVDMRPQQRMAELCQLTGVRLITYGTVMGGLLSEKFLDTNVSIPFAGPPLNTPSLQKYKRMVDAWGGWSLFQTLLQTLKKVSLKHGVTISTVAVKYILNQTSVAGSMVGVRLGLSEHIKDTNAIFSLELDEEDMNIITEVSKRGRNLIDIIGDCGDEYRA

SEQ ID NO: 39633 - protein, 382 aa, Zea mays subsp. mays
  peptide (1)..(382): Ceres Seq. ID no. 12415231
  misc_feature (44)..(381): NCBI GI NO: 18401495 NR Description: expressed protein; protein id: At2g27680
  misc_feature (72)..(381): NCBI GI NO: 11762116 NR Description: At2g27680 [Arabidopsis thaliana]
  misc_feature (55)..(381): NCBI GI NO: 23123814 NR Description: hypothetical protein [Nostoc punctiforme]
  misc_feature (52)..(380): NCBI GI NO: 13475981 NR Description: hypothetical protein [Mesorhizobium loti]
  misc_feature (59)..(381): NCBI GI NO: 40741502 NR Description: hypothetical protein AN8658.2
  misc_feature (90)..(362): NCBI GI NO: 30262030 NR Description: oxidoreductase, aldo/keto reductase family
  misc_feature (90)..(325): NCBI GI NO: 21399879 NR Description: aldo_ket_red, Aldo/keto reductase family
  misc_feature (132)..(364): NCBI GI NO: 24216672 NR Description: Aldo/keto reductase family protein
  misc_feature (90)..(362): NCBI GI NO: 30020137 NR Description: IolS protein [Bacillus cereus ATCC 14579]
  misc_feature (77)..(362): NCBI GI NO: 40644844 NR Description: side-chain ketoreductase
MSSTAARVVHPAAAAPPPPRPRRLAPARCAAGSATDTATAGPTRVTTVSNRGDSLAICRVLNGMWQTSGGWGRIDRDAAVDAMLAHADAGLSTFDMADHYGPAEDLYGMFINRIRRERPPEFLEEVKGLTKWVPPPVKMTRSYVEDNINRSRKRMDVTALDMLQFHWWEYSNPGYLDALKHITDLKEEGKIKTVALTNFDTDRLQIILENGIPVVSNQVQHSIVDMRPQQRMAELCQLTGVRLITYGTVMGGLLSEKFLDTNVSIPFAGPPLNTPSLQKYKRMVDAWGGWSLFQTLLQTLKKVSLKHGVTISTVAVKYILNQTSVAGSMVGVRLGLSEHIKDTNAIFSLELDEEDMNIITEVSKRGRNLIDIIGDCGDEYRA

SEQ ID NO: 39634 - DNA, 476 bp, Zea mays subsp. mays
  misc_feature (1)..(476): Ceres Seq. ID no. 1681819
acataccggcacgggctcaaggctctggctcgcgcacccctggtccctgttccgcaccgcaccgcacacctagacgcacctccagctgcagcgcgccatacttgaccgcatcagcatggcatccacggggacgacatcggcggtgccggaggtgaccctgcggtcgggcaacgggaagccgatgccgatggtgggcatgggcacggcgtcgttccccgtggtgcacgaggccgtcagggacgccgtgctggcggccatcggggtggggttccgccacttcgacacggccttcctgtacggcaccgagaagccgctcggcgacgccgtggccgaggcgctgcggcgcggcctcctgcggtcccgggaggagctcttcgtcacgtccaagctgtggtgctcgcagacccacgcggacctcgtgctgccgtccctgcgggaaactctcaagaacctgcagatggagtacgtggacctgt

SEQ ID NO: 39635 - protein, 120 aa, Zea mays subsp. mays
  peptide (1)..(120): Ceres Seq. ID no. 1681820
  misc_feature (10)..(119): NCBI GI NO: 38344823 NR Description: OSJNBa0064H22.4
  misc_feature (8)..(119): NCBI GI NO: 38344824 NR Description: OSJNBa0064H22.5
  misc_feature (2)..(119): NCBI GI NO: 37530540 NR Description: putative NADPH-dependent oxidoreductase
  misc_feature (10)..(119): NCBI GI NO: 40781598 NR Description: reductase 2 [Hydrangea macrophylla]
  misc_feature (8)..(119): NCBI GI NO: 40781599 NR Description: reductase 1 [Hydrangea macrophylla]
  misc_feature (1)..(119): NCBI GI NO: 38344822 NR Description: OSJNBa0064H22.3
  misc_feature (10)..(119): NCBI GI NO: 6478216 NR Description: putative NADPH-dependent oxidoreductase
  misc_feature (10)..(119): NCBI GI NO: 2792295 NR Description: unknown [Fragaria x ananassa]
  misc_feature (18)..(119): NCBI GI NO: 27357979 NR Description: Putative NADPH-dependent oxidoreductase
  misc_feature (7)..(119): NCBI GI NO: 6478204 NR Description: NADPH-dependent codeinone reductase
MASTGTTSAVPEVTLRSGNGKPMPMVGMGTASFPVVHEAVRDAVLAAIGVGFRHFDTAFLYGTEKPLGDAVAEALRRGLLRSREELFVTSKLWCSQTHADLVLPSLRETLKNLQMEYVDL

SEQ ID NO: 39636 - protein, 98 aa, Zea mays subsp. mays
  peptide (1)..(98): Ceres Seq. ID no. 1681821
  misc_feature (1)..(97): NCBI GI NO: 38344823 NR Description: OSJNBa0064H22.4
  misc_feature (1)..(97): NCBI GI NO: 38344824 NR Description: OSJNBa0064H22.5
  misc_feature (1)..(97): NCBI GI NO: 37530540 NR Description: putative NADPH-dependent oxidoreductase
  misc_feature (1)..(97): NCBI GI NO: 40781598 NR Description: reductase 2 [Hydrangea macrophylla]
  misc_feature (1)..(97): NCBI GI NO: 40781599 NR Description: reductase 1 [Hydrangea macrophylla]
  misc_feature (1)..(97): NCBI GI NO: 38344822 NR Description: OSJNBa0064H22.3
  misc_feature (1)..(97): NCBI GI NO: 6478216 NR Description: putative NADPH-dependent oxidoreductase
  misc_feature (1)..(97): NCBI GI NO: 2792295 NR Description: unknown [Fragaria x ananassa]
  misc_feature (1)..(97): NCBI GI NO: 27357979 NR Description: Putative NADPH-dependent oxidoreductase
  misc_feature (1)..(97): NCBI GI NO: 6478204 NR Description: NADPH-dependent codeinone reductase
MPMVGMGTASFPVVHEAVRDAVLAAIGVGFRHFDTAFLYGTEKPLGDAVAEALRRGLLRSREELFVTSKLWCSQTHADLVLPSLRETLKNLQMEYVDL

SEQ ID NO: 39637 - protein, 96 aa, Zea mays subsp. mays
  peptide (1)..(96): Ceres Seq. ID no. 1681822
  misc_feature (1)..(95): NCBI GI NO: 38344823 NR Description: OSJNBa0064H22.4
  misc_feature (1)..(95): NCBI GI NO: 38344824 NR Description: OSJNBa0064H22.5
  misc_feature (1)..(95): NCBI GI NO: 37530540 NR Description: putative NADPH-dependent oxidoreductase
  misc_feature (1)..(95): NCBI GI NO: 40781598 NR Description: reductase 2 [Hydrangea macrophylla]
  misc_feature (1)..(95): NCBI GI NO: 40781599 NR Description: reductase 1 [Hydrangea macrophylla]
  misc_feature (1)..(95): NCBI GI NO: 38344822 NR Description: OSJNBa0064H22.3
  misc_feature (1)..(95): NCBI GI NO: 6478216 NR Description: putative NADPH-dependent oxidoreductase
  misc_feature (1)..(95): NCBI GI NO: 2792295 NR Description: unknown [Fragaria x ananassa]
  misc_feature (1)..(95): NCBI GI NO: 27357979 NR Description: Putative NADPH-dependent oxidoreductase
  misc_feature (1)..(95): NCBI GI NO: 6478204 NR Description: NADPH-dependent codeinone reductase
MVGMGTASFPVVHEAVRDAVLAAIGVGFRHFDTAFLYGTEKPLGDAVAEALRRGLLRSREELFVTSKLWCSQTHADLVLPSLRETLKNLQMEYVDL

SEQ ID NO: 39638 - DNA, 1103 bp, Zea mays subsp. mays
  misc_feature (1)..(1103): Ceres Seq. ID no. 12362920
gcacgagaccattacctagaacatcctaatcgaaaaagaccagaccaccccacttaccaaccagagcgacaagcccgaccgcccgcttccttgcaaacgaaacaaaacaaaacaatggcgacagcgagtgagatcgcggcggtgggcgtaataggcgcggggcagatgggctcgggcatcgcccagctcgccgccggcggcggctgtgccgtacttctcctcgacgccgaccccactgccctctcccgtgccgtcgtctccatctccgcctccctacggcgcctcgccgccaagggccagctctcccaggccgcgtgcgaggactcaataaagcggataaggtgcgtctccgccgtgcaggatctcagggacgcggatcttgtgatcgaggccgtcgtggagaacgaagacgtcaagaagaagctattcgtggagctggataaggtcacgaagccctcggccatcctcgcctccaacacgagctccatctccgtaacccgcctggcttcagctaccaaacgcccctctcaggtgataggcatgcatttcttcaaccctcctccggtaatgaaactgatcgaggttatccgaggagccgatacgtcagatgaggtgtttgctgctgtcagatctttctccgaaaggctcgggaagtccgttatatgctcgcaagattacccaggattcatcgtgaaccgcatcctcatgccgatgatcaacgaggccttctgggctctgtacaccggagtggcaaccaaagaggacatcgacgcagggatgaagctgggcacgaaccacccgatgggcccgctgcagctcgccgacttcatcggcctggacgtctgcctctccgtacttcgggtactccacagcggtctgggagataacaagtacagcccctgccctctcctcgtccagtacgtcgatgctggccggcttgggaagaagcgtggagtaggcgtgtattcgtatgggcacaggccttcgtccgtcaggccaaagtcgtctctgtagacgtgagagcaaactgttgggcgaataaaaccaggtgcgtgttgcaattgcacgtcagagaaaaagggagcacagcctagttcagaggt

SEQ ID NO: 39639 - protein, 337 aa, Zea mays subsp. mays
  peptide (1)..(337): Ceres Seq. ID no. 12362921
  misc_feature (42)..(226): Pfam Name: Pfam Description:  3-hydroxyacyl-CoA dehydrogenase
  misc_feature (38)..(337): NCBI GI NO: 34908888 NR Description: putative 3-hydroxybutyryl-CoA dehydrogenase
  misc_feature (43)..(334): NCBI GI NO: 15232545 NR Description: putative 3-hydroxybutyryl-CoA dehydrogenase
  misc_feature (45)..(324): NCBI GI NO: 23053816 NR Description: hypothetical protein [Geobacter metallireducens]
  misc_feature (45)..(332): NCBI GI NO: 17986383 NR Description: 3-HYDROXYBUTYRYL-COA DEHYDROGENASE
  misc_feature (45)..(332): NCBI GI NO: 23013719 NR Description: hypothetical protein
  misc_feature (45)..(332): NCBI GI NO: 23502817 NR Description: 3-hydroxybutyryl-CoA dehydrogenase
  misc_feature (45)..(332): NCBI GI NO: 22967143 NR Description: hypothetical protein [Rhodospirillum rubrum]
  misc_feature (42)..(332): NCBI GI NO: 22961911 NR Description: hypothetical protein [Rhodopseudomonas palustris]
  misc_feature (43)..(332): NCBI GI NO: 13473014 NR Description: 3-hydroxybutyryl-CoA dehydrogenase
  misc_feature (42)..(332): NCBI GI NO: 27376490 NR Description: 3-hydroxybutyryl-CoA dehydrogenase
ARDHYLEHPNRKRPDHPTYQPERQARPPASLQTKQNKTMATASEIAAVGVIGAGQMGSGIAQLAAGGGCAVLLLDADPTALSRAVVSISASLRRLAAKGQLSQAACEDSIKRIRCVSAVQDLRDADLVIEAVVENEDVKKKLFVELDKVTKPSAILASNTSSISVTRLASATKRPSQVIGMHFFNPPPVMKLIEVIRGADTSDEVFAAVRSFSERLGKSVICSQDYPGFIVNRILMPMINEAFWALYTGVATKEDIDAGMKLGTNHPMGPLQLADFIGLDVCLSVLRVLHSGLGDNKYSPCPLLVQYVDAGRLGKKRGVGVYSYGHRPSSVRPKSSL

SEQ ID NO: 39640 - protein, 299 aa, Zea mays subsp. mays
  peptide (1)..(299): Ceres Seq. ID no. 12362922
  misc_feature (4)..(188): Pfam Name: Pfam Description:  3-hydroxyacyl-CoA dehydrogenase
  misc_feature (1)..(299): NCBI GI NO: 34908888 NR Description: putative 3-hydroxybutyryl-CoA dehydrogenase
  misc_feature (5)..(296): NCBI GI NO: 15232545 NR Description: putative 3-hydroxybutyryl-CoA dehydrogenase
  misc_feature (7)..(286): NCBI GI NO: 23053816 NR Description: hypothetical protein [Geobacter metallireducens]
  misc_feature (7)..(294): NCBI GI NO: 17986383 NR Description: 3-HYDROXYBUTYRYL-COA DEHYDROGENASE
  misc_feature (7)..(294): NCBI GI NO: 23013719 NR Description: hypothetical protein
  misc_feature (7)..(294): NCBI GI NO: 23502817 NR Description: 3-hydroxybutyryl-CoA dehydrogenase
  misc_feature (7)..(294): NCBI GI NO: 22967143 NR Description: hypothetical protein [Rhodospirillum rubrum]
  misc_feature (4)..(294): NCBI GI NO: 22961911 NR Description: hypothetical protein [Rhodopseudomonas palustris]
  misc_feature (5)..(294): NCBI GI NO: 13473014 NR Description: 3-hydroxybutyryl-CoA dehydrogenase
  misc_feature (4)..(294): NCBI GI NO: 27376490 NR Description: 3-hydroxybutyryl-CoA dehydrogenase
MATASEIAAVGVIGAGQMGSGIAQLAAGGGCAVLLLDADPTALSRAVVSISASLRRLAAKGQLSQAACEDSIKRIRCVSAVQDLRDADLVIEAVVENEDVKKKLFVELDKVTKPSAILASNTSSISVTRLASATKRPSQVIGMHFFNPPPVMKLIEVIRGADTSDEVFAAVRSFSERLGKSVICSQDYPGFIVNRILMPMINEAFWALYTGVATKEDIDAGMKLGTNHPMGPLQLADFIGLDVCLSVLRVLHSGLGDNKYSPCPLLVQYVDAGRLGKKRGVGVYSYGHRPSSVRPKSSL

SEQ ID NO: 39641 - protein, 282 aa, Zea mays subsp. mays
  peptide (1)..(282): Ceres Seq. ID no. 12362923
  misc_feature (1)..(171): Pfam Name: Pfam Description:  3-hydroxyacyl-CoA dehydrogenase
  misc_feature (1)..(282): NCBI GI NO: 34908888 NR Description: putative 3-hydroxybutyryl-CoA dehydrogenase
  misc_feature (1)..(279): NCBI GI NO: 15232545 NR Description: putative 3-hydroxybutyryl-CoA dehydrogenase
  misc_feature (1)..(269): NCBI GI NO: 23053816 NR Description: hypothetical protein [Geobacter metallireducens]
  misc_feature (1)..(277): NCBI GI NO: 17986383 NR Description: 3-HYDROXYBUTYRYL-COA DEHYDROGENASE
  misc_feature (1)..(277): NCBI GI NO: 23013719 NR Description: hypothetical protein
  misc_feature (1)..(277): NCBI GI NO: 23502817 NR Description: 3-hydroxybutyryl-CoA dehydrogenase
  misc_feature (1)..(277): NCBI GI NO: 22967143 NR Description: hypothetical protein [Rhodospirillum rubrum]
  misc_feature (1)..(277): NCBI GI NO: 22961911 NR Description: hypothetical protein [Rhodopseudomonas palustris]
  misc_feature (1)..(277): NCBI GI NO: 13473014 NR Description: 3-hydroxybutyryl-CoA dehydrogenase
  misc_feature (1)..(277): NCBI GI NO: 27376490 NR Description: 3-hydroxybutyryl-CoA dehydrogenase
MGSGIAQLAAGGGCAVLLLDADPTALSRAVVSISASLRRLAAKGQLSQAACEDSIKRIRCVSAVQDLRDADLVIEAVVENEDVKKKLFVELDKVTKPSAILASNTSSISVTRLASATKRPSQVIGMHFFNPPPVMKLIEVIRGADTSDEVFAAVRSFSERLGKSVICSQDYPGFIVNRILMPMINEAFWALYTGVATKEDIDAGMKLGTNHPMGPLQLADFIGLDVCLSVLRVLHSGLGDNKYSPCPLLVQYVDAGRLGKKRGVGVYSYGHRPSSVRPKSSL

SEQ ID NO: 39642 - DNA, 562 bp, Zea mays subsp. mays
  misc_feature (1)..(562): Ceres Seq. ID no. 12337588
cacaaagcacaaacaacgccactcctgcacggctccgacgccggggccggggccgcctacgtctgggtcggcaacgccgaaacgcagtgccccgggcagtgcgcgtggccgttccaccagccgctgtacgggccccaggcgccggcgctcgtgccgccgagcggcgacgtcggcatggatggcatggtggtcaacatcgccagcatggtcgccggcgcggtcaccaacccgttccgcgacgggttctaccagggcgacaaggacgcgccgctagaggccgccaccgcctgcacgggggtctacggcagcggcgcctaccccggtttcgcaggcaacctggcggtggacggcacgacgggggcgagctacaatgccaatggtgccaacgggaggaagtacctgcttcccgctctattcgaccctgcaacctttacgtgttcgactttggtttaacgcccaaggaaacagtcctgtcaactgtgtagtaacgctgtgtatatagtatgagagtttgataaggagtgtactgtggttagtgttgatatctgcatcataatacgat

SEQ ID NO: 39643 - protein, 160 aa, Zea mays subsp. mays
  peptide (1)..(160): Ceres Seq. ID no. 12337589
QSTNNATPARLRRRGRGRLRLGRQRRNAVPRAVRVAVPPAAVRAPGAGARAAERRRRHGWHGGQHRQHGRRRGHQPVPRRVLPGRQGRAARGRHRLHGGLRQRRLPRFRRQPGGGRHDGGELQCQWCQREEVPASRSIRPCNLYVFDFGLTPKETVLSTV

SEQ ID NO: 39644 - protein, 150 aa, Zea mays subsp. mays
  peptide (1)..(150): Ceres Seq. ID no. 12337590
  misc_feature (10)..(150): Pfam Name: Pfam Description:  Phosphate-induced protein 1 conserved region
  misc_feature (10)..(150): NCBI GI NO: 3759184 NR Description: phi-1 [Nicotiana tabacum]
  misc_feature (10)..(149): NCBI GI NO: 15219504 NR Description: phosphate-induced
  misc_feature (15)..(150): NCBI GI NO: 15236667 NR Description: putative phi-1-like phosphate-induced protein
  misc_feature (15)..(150): NCBI GI NO: 21593043 NR Description: putative phi-1-like phosphate-induced protein
  misc_feature (19)..(149): NCBI GI NO: 13194680 NR Description: phosphate-induced protein 1-like protein
  misc_feature (14)..(150): NCBI GI NO: 15237656 NR Description: phi-1-like protein; protein id: At5g64260
  misc_feature (10)..(150): NCBI GI NO: 31074969 NR Description: erg-1 [Solanum tuberosum]
  misc_feature (10)..(150): NCBI GI NO: 15242420 NR Description: putative protein; protein id: At5g09440
  misc_feature (10)..(146): NCBI GI NO: 37533672 NR Description: putative phosphate-induced protein
  misc_feature (12)..(146): NCBI GI NO: 34901824 NR Description: putative phi-1(phosphate-induced protein 1)
HKAQTTPLLHGSDAGAGAAYVWVGNAETQCPGQCAWPFHQPLYGPQAPALVPPSGDVGMDGMVVNIASMVAGAVTNPFRDGFYQGDKDAPLEAATACTGVYGSGAYPGFAGNLAVDGTTGASYNANGANGRKYLLPALFDPATFTCSTLV

SEQ ID NO: 39645 - protein, 92 aa, Zea mays subsp. mays
  peptide (1)..(92): Ceres Seq. ID no. 12337591
  misc_feature (1)..(92): Pfam Name: Pfam Description:  Phosphate-induced protein 1 conserved region
  misc_feature (1)..(92): NCBI GI NO: 3759184 NR Description: phi-1 [Nicotiana tabacum]
  misc_feature (1)..(91): NCBI GI NO: 15219504 NR Description: phosphate-induced
  misc_feature (1)..(92): NCBI GI NO: 15236667 NR Description: putative phi-1-like phosphate-induced protein
  misc_feature (1)..(92): NCBI GI NO: 21593043 NR Description: putative phi-1-like phosphate-induced protein
  misc_feature (1)..(91): NCBI GI NO: 13194680 NR Description: phosphate-induced protein 1-like protein
  misc_feature (1)..(92): NCBI GI NO: 15237656 NR Description: phi-1-like protein; protein id: At5g64260
  misc_feature (1)..(92): NCBI GI NO: 31074969 NR Description: erg-1 [Solanum tuberosum]
  misc_feature (1)..(92): NCBI GI NO: 15242420 NR Description: putative protein; protein id: At5g09440
  misc_feature (1)..(88): NCBI GI NO: 37533672 NR Description: putative phosphate-induced protein
  misc_feature (1)..(88): NCBI GI NO: 34901824 NR Description: putative phi-1(phosphate-induced protein 1)
MDGMVVNIASMVAGAVTNPFRDGFYQGDKDAPLEAATACTGVYGSGAYPGFAGNLAVDGTTGASYNANGANGRKYLLPALFDPATFTCSTLV

SEQ ID NO: 39646 - DNA, 980 bp, Zea mays subsp. mays
  misc_feature (1)..(980): Ceres Seq. ID no. 12377101
cctagagatatttaacgcgcctattgatgagctccctaaggaaattgggcatctgaggtctcttcagacactgatattagtccgtactggactagacgagctgccactggctgtttgctcgcttacacggttgatgtgcctgatagccctagggttcgaaaggttgccagctgacagaatggggaacctaacgtccctggaggagctacaactacatagggtagttggccggagtgctacccaagacctagtggcagagtttggcaagctgacgaggttgagggtggtcagcatcaccttttcagagcagctagaggagagcttgcaagaagcattggtgcaatctctgtccaatctgcggcgactccaggaactagagcttttgtgtaaaatgccagagcggggaggcgatatgtggggagactgggagccaccaaggcagctccggcgcctgattattgaaggcatcgacttctcacggcagcctcgatggatcaaccgctcctgcctgccacgcctctgctccttatctctgatggtgcacgctcttgaagcacaggacctagataatctagcgaggttgccagagctccagtacctcacgctagatggtctcagctggcctccaaggtatactgttggcccagacgacttcaggaatctgaggttctgcgaagtgggcacaacgttcgagtttcgtaagggcgccatgccaaggcttgaagagctgcactttggagtttatgcagggtacagtagttgggaacagtatggtgtgccgttcgagcagttcccaacgaaggatgtgatcgaaggtcttgacttggacctggataacgtccttttacttcagcaagtgatggtcgaagttgactgcgcaggtgctactgccgcacaagtggaggaggtggaggccgtggtcatgcgtgccgtggaaaatcatgccaaccgtccaaccataaaaatggatcgagcatatg

SEQ ID NO: 39647 - protein, 326 aa, Zea mays subsp. mays
  peptide (1)..(326): Ceres Seq. ID no. 12377102
  misc_feature (10)..(322): NCBI GI NO: 34394780 NR Description: putative CC-NBS-LRR resistance protein MLA13
  misc_feature (10)..(299): NCBI GI NO: 34904708 NR Description: P0446G09.19
  misc_feature (8)..(325): NCBI GI NO: 40253772 NR Description: putative RGH1A
  misc_feature (1)..(307): NCBI GI NO: 22208466 NR Description: putative Mla1 [Sorghum bicolor]
  misc_feature (1)..(324): NCBI GI NO: 40253763 NR Description: putative RGH1A
  misc_feature (11)..(325): NCBI GI NO: 37573036 NR Description: putative MLA1
  misc_feature (9)..(249): NCBI GI NO: 22208468 NR Description: putative stripe rust resistance protein Yr10/Mla1
  misc_feature (9)..(249): NCBI GI NO: 22208504 NR Description: putative stripe rust resistance protein Yr10
  misc_feature (8)..(324): NCBI GI NO: 40253771 NR Description: putative RGH1A
  misc_feature (34)..(323): NCBI GI NO: 22208465 NR Description: putative stripe rust resistance protein Yr10
LEIFNAPIDELPKEIGHLRSLQTLILVRTGLDELPLAVCSLTRLMCLIALGFERLPADRMGNLTSLEELQLHRVVGRSATQDLVAEFGKLTRLRVVSITFSEQLEESLQEALVQSLSNLRRLQELELLCKMPERGGDMWGDWEPPRQLRRLIIEGIDFSRQPRWINRSCLPRLCSLSLMVHALEAQDLDNLARLPELQYLTLDGLSWPPRYTVGPDDFRNLRFCEVGTTFEFRKGAMPRLEELHFGVYAGYSSWEQYGVPFEQFPTKDVIEGLDLDLDNVLLLQQVMVEVDCAGATAAQVEEVEAVVMRAVENHANRPTIKMDRAY

SEQ ID NO: 39648 - protein, 282 aa, Zea mays subsp. mays
  peptide (1)..(282): Ceres Seq. ID no. 12377103
  misc_feature (1)..(278): NCBI GI NO: 34394780 NR Description: putative CC-NBS-LRR resistance protein MLA13
  misc_feature (1)..(255): NCBI GI NO: 34904708 NR Description: P0446G09.19
  misc_feature (1)..(281): NCBI GI NO: 40253772 NR Description: putative RGH1A
  misc_feature (1)..(263): NCBI GI NO: 22208466 NR Description: putative Mla1 [Sorghum bicolor]
  misc_feature (1)..(280): NCBI GI NO: 40253763 NR Description: putative RGH1A
  misc_feature (1)..(281): NCBI GI NO: 37573036 NR Description: putative MLA1
  misc_feature (1)..(205): NCBI GI NO: 22208468 NR Description: putative stripe rust resistance protein Yr10/Mla1
  misc_feature (1)..(205): NCBI GI NO: 22208504 NR Description: putative stripe rust resistance protein Yr10
  misc_feature (1)..(280): NCBI GI NO: 40253771 NR Description: putative RGH1A
  misc_feature (1)..(279): NCBI GI NO: 22208465 NR Description: putative stripe rust resistance protein Yr10
MCLIALGFERLPADRMGNLTSLEELQLHRVVGRSATQDLVAEFGKLTRLRVVSITFSEQLEESLQEALVQSLSNLRRLQELELLCKMPERGGDMWGDWEPPRQLRRLIIEGIDFSRQPRWINRSCLPRLCSLSLMVHALEAQDLDNLARLPELQYLTLDGLSWPPRYTVGPDDFRNLRFCEVGTTFEFRKGAMPRLEELHFGVYAGYSSWEQYGVPFEQFPTKDVIEGLDLDLDNVLLLQQVMVEVDCAGATAAQVEEVEAVVMRAVENHANRPTIKMDRAY

SEQ ID NO: 39649 - protein, 267 aa, Zea mays subsp. mays
  peptide (1)..(267): Ceres Seq. ID no. 12377104
  misc_feature (1)..(263): NCBI GI NO: 34394780 NR Description: putative CC-NBS-LRR resistance protein MLA13
  misc_feature (1)..(240): NCBI GI NO: 34904708 NR Description: P0446G09.19
  misc_feature (1)..(266): NCBI GI NO: 40253772 NR Description: putative RGH1A
  misc_feature (1)..(248): NCBI GI NO: 22208466 NR Description: putative Mla1 [Sorghum bicolor]
  misc_feature (1)..(265): NCBI GI NO: 40253763 NR Description: putative RGH1A
  misc_feature (1)..(266): NCBI GI NO: 37573036 NR Description: putative MLA1
  misc_feature (1)..(190): NCBI GI NO: 22208468 NR Description: putative stripe rust resistance protein Yr10/Mla1
  misc_feature (1)..(190): NCBI GI NO: 22208504 NR Description: putative stripe rust resistance protein Yr10
  misc_feature (1)..(265): NCBI GI NO: 40253771 NR Description: putative RGH1A
  misc_feature (1)..(264): NCBI GI NO: 22208465 NR Description: putative stripe rust resistance protein Yr10
MGNLTSLEELQLHRVVGRSATQDLVAEFGKLTRLRVVSITFSEQLEESLQEALVQSLSNLRRLQELELLCKMPERGGDMWGDWEPPRQLRRLIIEGIDFSRQPRWINRSCLPRLCSLSLMVHALEAQDLDNLARLPELQYLTLDGLSWPPRYTVGPDDFRNLRFCEVGTTFEFRKGAMPRLEELHFGVYAGYSSWEQYGVPFEQFPTKDVIEGLDLDLDNVLLLQQVMVEVDCAGATAAQVEEVEAVVMRAVENHANRPTIKMDRAY

SEQ ID NO: 39650 - DNA, 1214 bp, Zea mays subsp. mays
  misc_feature (1)..(1214): Ceres Seq. ID no. 12416435
gcacgagaccattacctagaacatcctaatcgaaaaaaaaactccccagtcaaggcgcatatccattccatggatctcgcgcccctgctccttctctcccagctgctgctgcttccggtggtggcggttgtctccggcgagaccgccgcgcacccgggctacacacacgctgaggaggcatgcagcggtgtgctagaggcagaggcggagaaagcaacggtgctggtgcctgcgcccagagcggcgcgaagagttcgacggggggcggatcgtggacatcagccactactaccgcgaggacatgccggagtgggagtcatcagagggctccggcgagttcctgcagctggcgcgttccatgcgcaacggctccgacatcgctaacttctcggagctccggctcactgcgcactccggcacccacgtcgacgcgccgggacacgtcttcgagcactactacgacaccggcttcgacgtcgacaccctcgacctcgctgtcctcaacggaccagcgctgttggttgacgttcccagagataagaacatcacagctgatgttatggcatccctaaacatgcctaaaggtgttcgacgtgtactctttcggaccctaaatacagacaggatggtgcacaatggttggttgataatacagacatcaaactagttggagttgactacttgtcagtgggcgcatttgatgaatgcattccagctcatctagtatttcttgaaaaaagggaggtcatacttgtcgaagccttgaatctggagcatgttagccctggaatatacatcttgcattgcttgccactaagattgcggggtgctgaaggttctcctgcaagatgcatcctcatcaagtgacatggttataaccatcccaaaaagcattgtacaatcaatcttgaaacctacctattcagtcttttcgaagtgcttatagaagtatggttttcatgcgtgtgtttatagggatggtgtgaggacccaataatatggagctgggctagtactgatccaatcgacactaatatgagctgaagatactacataaaacatgaacaatatggagttttatatactggaccccagtccaggttttaaatccacccctgcaaggggtgaatttatgtttgtgtttgggagtgtatatttctatattgcagtttgaaaaaaactatgtatgtaataaaataagaatacatcaattc

SEQ ID NO: 39651 - protein, 130 aa, Zea mays subsp. mays
  peptide (1)..(130): Ceres Seq. ID no. 12416436
MQRCARGRGGESNGAGACAQSGAKSSTGGGSWTSATTTARTCRSGSHQRAPASSCSWRVPCATAPTSLTSRSSGSLRTPAPTSTRRDTSSSTTTTPASTSTPSTSLSSTDQRCWLTFPEIRTSQLMLWHP

SEQ ID NO: 39652 - protein, 127 aa, Zea mays subsp. mays
  peptide (1)..(127): Ceres Seq. ID no. 12416437
ARDHYLEHPNRKKNSPVKAHIHSMDLAPLLLLSQLLLLPVVAVVSGETAAHPGYTHAEEACSGVLEAEAEKATVLVPAPRAARRVRRGADRGHQPLLPRGHAGVGVIRGLRRVPAAGAFHAQRLRHR

SEQ ID NO: 39653 - protein, 121 aa, Zea mays subsp. mays
  peptide (1)..(121): Ceres Seq. ID no. 12416438
  misc_feature (1)..(108): Pfam Name: Pfam Description:  Putative cyclase
  misc_feature (1)..(110): NCBI GI NO: 35215089 NR Description: hypothetical protein
  misc_feature (1)..(108): NCBI GI NO: 18418598 NR Description: putative protein; protein id: At4g35220
  misc_feature (1)..(108): NCBI GI NO: 15219416 NR Description: hypothetical protein; protein id: At1g44542.1
  misc_feature (1)..(108): NCBI GI NO: 18418393 NR Description: putative protein; protein id: At4g34180
  misc_feature (1)..(111): NCBI GI NO: 7486287 NR Description: hypothetical protein F28A23
  misc_feature (1)..(83): NCBI GI NO: 7486023 NR Description: hypothetical protein F23E12
  misc_feature (1)..(106): NCBI GI NO: 16330650 NR Description: hypothetical protein [Synechocystis sp. PCC 6803]
  misc_feature (25)..(106): NCBI GI NO: 23056289 NR Description: hypothetical protein [Geobacter metallireducens]
MPEWESSEGSGEFLQLARSMRNGSDIANFSELRLTAHSGTHVDAPGHVFEHYYDTGFDVDTLDLAVLNGPALLVDVPRDKNITADVMASLNMPKGVRRVLFRTLNTDRMVHNGWLIIQTSN

SEQ ID NO: 39654 - DNA, 1032 bp, Zea mays subsp. mays
  misc_feature (1)..(1032): Ceres Seq. ID no. 12359028
ctttacacctctacatgcctcatatctctctgtctgtccaacgatccctctcctttgtcatctccgtctccatctcccaagcaccggagaggagagctagcatgcctggatgtccacggagagggagagactcgatgagatcgggaagatcaagcgagagccggatacagccgccctcgctgtcgcttccgcatccgcctccaccgtgccggccgacaaccacatcccacgccgcctcggccacggcggtgccctcaacaccttgacgccgtgcgccgcgtgcaagctcctccgccgccgctgcgcgcaggaatgccccttcgccccttacttctcgccgcatgagccccacaaattcgccgccgtccacaaggtcttcggcgctagcaacgtctccaagatgctcttggaggtggtggagggggagagggcggacacagcgagcagcctggtgtacgaagcgaacctccggttgcgggatccggtgtacggatgcatgggcgccatctccattctccagcaacaggtgaacgcgctggaggccgagctggaggcagtgagggccgagatcctcaagcacaggtaccggcaggccaccggcaaccgtctcatggacgacgtgcgtgccacggccagcttcgtcttggctcctgcgtccgctccgatgcacgttaatgacgttgtatcagtggtggaggcaggccaagaggtcaccgccaccggcggcgcgtcgggggtgtacattgcggaagccgagcagccgtcaagtactaataactatgctcccttaacccaagtgagcatcctgcatactttggttgacaataagcatggatttatttaacattttggtgggatcacagtagtagaaagtttggatgaataaactgtgtgcaagtttaattatatatacaagttttctagaaataggttatagatgtggatatgtatattgggtgactaaaaagttcatccaatattatggaatatatgtaccattattttcttgtaatagcccattgcgtgttgttg

SEQ ID NO: 39655 - protein, 244 aa, Zea mays subsp. mays
  peptide (1)..(244): Ceres Seq. ID no. 12359029
  misc_feature (54)..(154): Pfam Name: Pfam Description:  Protein of unknown function DUF260
  misc_feature (6)..(227): NCBI GI NO: 34907878 NR Description: P0031D02.27
  misc_feature (1)..(177): NCBI GI NO: 18405401 NR Description: expressed protein; protein id: At2g40470
  misc_feature (1)..(177): NCBI GI NO: 21618113 NR Description: LOB DOMAIN 13 [Arabidopsis thaliana]
  misc_feature (1)..(163): NCBI GI NO: 30684548 NR Description: lateral organ boundaries
  misc_feature (6)..(163): NCBI GI NO: 25408064 NR Description: hypothetical protein At2g30340
  misc_feature (53)..(190): NCBI GI NO: 15221679 NR Description: hypothetical protein; protein id: At1g31320.1
  misc_feature (53)..(155): NCBI GI NO: 18402268 NR Description: expressed protein; protein id: At2g30130
  misc_feature (53)..(155): NCBI GI NO: 21592574 NR Description: unknown [Arabidopsis thaliana]
  misc_feature (53)..(212): NCBI GI NO: 15242624 NR Description: putative protein; protein id: At5g63090
  misc_feature (53)..(157): NCBI GI NO: 34896184 NR Description: contains ESTs C98868
MSTERERLDEIGKIKREPDTAALAVASASASTVPADNHIPRRLGHGGALNTLTPCAACKLLRRRCAQECPFAPYFSPHEPHKFAAVHKVFGASNVSKMLLEVVEGERADTASSLVYEANLRLRDPVYGCMGAISILQQQVNALEAELEAVRAEILKHRYRQATGNRLMDDVRATASFVLAPASAPMHVNDVVSVVEAGQEVTATGGASGVYIAEAEQPSSTNNYAPLTQVSILHTLVDNKHGFI

SEQ ID NO: 39656 - protein, 147 aa, Zea mays subsp. mays
  peptide (1)..(147): Ceres Seq. ID no. 12359030
  misc_feature (1)..(57): Pfam Name: Pfam Description:  Protein of unknown function DUF260
  misc_feature (1)..(130): NCBI GI NO: 34907878 NR Description: P0031D02.27
  misc_feature (1)..(80): NCBI GI NO: 18405401 NR Description: expressed protein; protein id: At2g40470
  misc_feature (1)..(80): NCBI GI NO: 21618113 NR Description: LOB DOMAIN 13 [Arabidopsis thaliana]
  misc_feature (1)..(66): NCBI GI NO: 30684548 NR Description: lateral organ boundaries
  misc_feature (1)..(66): NCBI GI NO: 25408064 NR Description: hypothetical protein At2g30340
  misc_feature (1)..(93): NCBI GI NO: 15221679 NR Description: hypothetical protein; protein id: At1g31320.1
  misc_feature (1)..(58): NCBI GI NO: 18402268 NR Description: expressed protein; protein id: At2g30130
  misc_feature (1)..(58): NCBI GI NO: 21592574 NR Description: unknown [Arabidopsis thaliana]
  misc_feature (1)..(115): NCBI GI NO: 15242624 NR Description: putative protein; protein id: At5g63090
  misc_feature (1)..(60): NCBI GI NO: 34896184 NR Description: contains ESTs C98868
MLLEVVEGERADTASSLVYEANLRLRDPVYGCMGAISILQQQVNALEAELEAVRAEILKHRYRQATGNRLMDDVRATASFVLAPASAPMHVNDVVSVVEAGQEVTATGGASGVYIAEAEQPSSTNNYAPLTQVSILHTLVDNKHGFI

SEQ ID NO: 39657 - DNA, 902 bp, Zea mays subsp. mays; identical to SEQ ID NO: 34963
  misc_feature (1)..(902): Ceres Seq. ID no. 12377811
  misc_feature (669)..(669): n is a, c, t, g, unknown, or other
  misc_feature (890)..(890): n is a, c, t, g, unknown, or other
  misc_feature (724)..(724): n is a, c, t, g, unknown, or other

SEQ ID NO: 39658 - protein, 223 aa, Zea mays subsp. mays; identical to SEQ ID NO: 34964
  peptide (1)..(223): Ceres Seq. ID no. 12377812
  misc_feature (1)..(223): NCBI GI NO: 38346025 NR Description: OSJNBb0071D01.2
  misc_feature (9)..(220): NCBI GI NO: 15222928 NR Description: unknown protein; protein id: At1g76020.1
  misc_feature (8)..(220): NCBI GI NO: 22329686 NR Description: unknown protein; protein id: At1g20225
  misc_feature (8)..(219): NCBI GI NO: 25518088 NR Description: T20H2.2 protein - Arabidopsis thaliana
  misc_feature (9)..(197): NCBI GI NO: 8778813 NR Description: T4O12.23 [Arabidopsis thaliana]
  misc_feature (190)..(190): Xaa is any aa, unknown or other
  misc_feature (209)..(209): Xaa is any aa, unknown or other

SEQ ID NO: 39659 - protein, 152 aa, Zea mays subsp. mays; identical to SEQ ID NO: 34965
  peptide (1)..(152): Ceres Seq. ID no. 12377813
  misc_feature (1)..(152): NCBI GI NO: 38346025 NR Description: OSJNBb0071D01.2
  misc_feature (1)..(149): NCBI GI NO: 15222928 NR Description: unknown protein; protein id: At1g76020.1
  misc_feature (1)..(149): NCBI GI NO: 22329686 NR Description: unknown protein; protein id: At1g20225
  misc_feature (1)..(148): NCBI GI NO: 25518088 NR Description: T20H2.2 protein - Arabidopsis thaliana
  misc_feature (1)..(126): NCBI GI NO: 8778813 NR Description: T4O12.23 [Arabidopsis thaliana]
  misc_feature (119)..(119): Xaa is any aa, unknown or other
  misc_feature (138)..(138): Xaa is any aa, unknown or other

SEQ ID NO: 39660 - DNA, 483 bp, Zea mays subsp. mays
  misc_feature (1)..(483): Ceres Seq. ID no. 1682030
acgacgccatggacgccgatgcccgcctcgtcatgcacgtcgtgctcagcgagtgccctgccgtcttccacggcctcgcttcgctcgtcgacgtcggcggcggccatggcacagccgcggctgccatcgccagggccttcccacacatcaagtgtaccgtcatggacctccctcacgttgtcgctgaggctcccgcgggcactggactgtgcttcctcgccggcgatatgttcgaccacatcccaccggctgacggtattctgctcaagtggattctgcatgattgggatgatgcgaagtgcattaagataatggaacggtgcaaggaagcaattggtggcaaagaaaggggagggaaagtcattataatcgacaccgtgattggatctaggccaaacgaggaagatatgatacgcagggaggctcaagtcctgtgtgatctaggtatgatgacaacgtcgaatggagctgagcgagaggagc

SEQ ID NO: 39661 - protein, 160 aa, Zea mays subsp. mays
  peptide (1)..(160): Ceres Seq. ID no. 1682031
  misc_feature (1)..(159): Pfam Name: Pfam Description:  O-methyltransferase
  misc_feature (1)..(159): NCBI GI NO: 20514367 NR Description: orcinol O-methyltransferase [Rosa hybrid cultivar]
  misc_feature (1)..(159): NCBI GI NO: 20514369 NR Description: orcinol O-methyltransferase [Rosa hybrid cultivar]
  misc_feature (1)..(159): NCBI GI NO: 27527926 NR Description: orcinol O-methyltransferase [Rosa hybrid cultivar]
  misc_feature (1)..(159): NCBI GI NO: 27527928 NR Description: orcinol O-methyltransferase [Rosa hybrid cultivar]
  misc_feature (2)..(159): NCBI GI NO: 37530600 NR Description: putative o-methyltransferase ZRP4
  misc_feature (1)..(159): NCBI GI NO: 1353193 NR Description: O-METHYLTRANSFERASE ZRP4 (OMT)
  misc_feature (1)..(159): NCBI GI NO: 2282586 NR Description: methyltransferase [Prunus armeniaca]
  misc_feature (3)..(159): NCBI GI NO: 37530606 NR Description: putative o-methyltransferase ZRP4
  misc_feature (1)..(159): NCBI GI NO: 3077640 NR Description: O-methyltransferase [Prunus dulcis]
  misc_feature (1)..(139): NCBI GI NO: 4098238 NR Description: o-methyltransferase [Triticum aestivum]
DAMDADARLVMHVVLSECPAVFHGLASLVDVGGGHGTAAAAIARAFPHIKCTVMDLPHVVAEAPAGTGLCFLAGDMFDHIPPADGILLKWILHDWDDAKCIKIMERCKEAIGGKERGGKVIIIDTVIGSRPNEEDMIRREAQVLCDLGMMTTSNGAEREE

SEQ ID NO: 39662 - protein, 158 aa, Zea mays subsp. mays
  peptide (1)..(158): Ceres Seq. ID no. 1682032
  misc_feature (1)..(157): Pfam Name: Pfam Description:  O-methyltransferase
  misc_feature (1)..(157): NCBI GI NO: 20514367 NR Description: orcinol O-methyltransferase [Rosa hybrid cultivar]
  misc_feature (1)..(157): NCBI GI NO: 20514369 NR Description: orcinol O-methyltransferase [Rosa hybrid cultivar]
  misc_feature (1)..(157): NCBI GI NO: 27527926 NR Description: orcinol O-methyltransferase [Rosa hybrid cultivar]
  misc_feature (1)..(157): NCBI GI NO: 27527928 NR Description: orcinol O-methyltransferase [Rosa hybrid cultivar]
  misc_feature (1)..(157): NCBI GI NO: 37530600 NR Description: putative o-methyltransferase ZRP4
  misc_feature (1)..(157): NCBI GI NO: 1353193 NR Description: O-METHYLTRANSFERASE ZRP4 (OMT)
  misc_feature (1)..(157): NCBI GI NO: 2282586 NR Description: methyltransferase [Prunus armeniaca]
  misc_feature (1)..(157): NCBI GI NO: 37530606 NR Description: putative o-methyltransferase ZRP4
  misc_feature (1)..(157): NCBI GI NO: 3077640 NR Description: O-methyltransferase [Prunus dulcis]
  misc_feature (1)..(137): NCBI GI NO: 4098238 NR Description: o-methyltransferase [Triticum aestivum]
MDADARLVMHVVLSECPAVFHGLASLVDVGGGHGTAAAAIARAFPHIKCTVMDLPHVVAEAPAGTGLCFLAGDMFDHIPPADGILLKWILHDWDDAKCIKIMERCKEAIGGKERGGKVIIIDTVIGSRPNEEDMIRREAQVLCDLGMMTTSNGAEREE

SEQ ID NO: 39663 - protein, 150 aa, Zea mays subsp. mays
  peptide (1)..(150): Ceres Seq. ID no. 1682033
  misc_feature (1)..(149): Pfam Name: Pfam Description:  O-methyltransferase
  misc_feature (1)..(149): NCBI GI NO: 20514367 NR Description: orcinol O-methyltransferase [Rosa hybrid cultivar]
  misc_feature (1)..(149): NCBI GI NO: 20514369 NR Description: orcinol O-methyltransferase [Rosa hybrid cultivar]
  misc_feature (1)..(149): NCBI GI NO: 27527926 NR Description: orcinol O-methyltransferase [Rosa hybrid cultivar]
  misc_feature (1)..(149): NCBI GI NO: 27527928 NR Description: orcinol O-methyltransferase [Rosa hybrid cultivar]
  misc_feature (1)..(149): NCBI GI NO: 37530600 NR Description: putative o-methyltransferase ZRP4
  misc_feature (1)..(149): NCBI GI NO: 1353193 NR Description: O-METHYLTRANSFERASE ZRP4 (OMT)
  misc_feature (1)..(149): NCBI GI NO: 2282586 NR Description: methyltransferase [Prunus armeniaca]
  misc_feature (1)..(149): NCBI GI NO: 37530606 NR Description: putative o-methyltransferase ZRP4
  misc_feature (1)..(149): NCBI GI NO: 3077640 NR Description: O-methyltransferase [Prunus dulcis]
  misc_feature (1)..(129): NCBI GI NO: 4098238 NR Description: o-methyltransferase [Triticum aestivum]
MHVVLSECPAVFHGLASLVDVGGGHGTAAAAIARAFPHIKCTVMDLPHVVAEAPAGTGLCFLAGDMFDHIPPADGILLKWILHDWDDAKCIKIMERCKEAIGGKERGGKVIIIDTVIGSRPNEEDMIRREAQVLCDLGMMTTSNGAEREE

SEQ ID NO: 39664 - DNA, 811 bp, Zea mays subsp. mays
  misc_feature (1)..(811): Ceres Seq. ID no. 13499210
atatgcctaataaaaggcataaacctggcctcaccccaccgcgagccgaaccggagcgtcaagcaaacatccgtcgatcccgattccgaccactgcgctcgcgccatcgcgccatccacccggcattgtgcgcccgagccgggctcgttggatggcgtccggaggcgccgcccgcggtcgccttgctgaggagcgcaaggcgtggcgcaagagccatcccctcggctttgtggccaagccggcgatgctgccggatggttctgtcaatctcatgctctggaactgcgtcgtccccggcaaggaaggcactgattgggaaggtggatatttcccggtcactctccatttcactgaaaattacccaagtaaccccccaacctgcaagttcccacgaaggtttttccatgtcaatgtctatgattctggggatgtatgcctgtcaatacttggtgatgcatgggcgccttctatcacagtgcggcaaattctaataggcatccaggagctgctggagaacccaaacccagcctctcccgcacaggattttgcttacgatgtttttgcagagaatatgccagaatacaagagacgcgtccgtgagcaagccaagaggtatccgtcgctcgtgtagccgtggacctctgcaacacaattgctgctaaccaagtagtcactcactttggtgtagtggaacttgttcatgacgtgcttaactatggtgtctagttagccgtacgcttgttggaactgctaaagtgcagcttattggaactgctaaaatgcccttgactacgtcttattattatggttt

SEQ ID NO: 39665 - protein, 162 aa, Zea mays subsp. mays
  peptide (1)..(162): Ceres Seq. ID no. 13499211
MPNKRHKPGLTPPRAEPERQANIRRSRFRPLRSRHRAIHPALCARAGLVGWRPEAPPAVALLRSARRGARAIPSALWPSRRCCRMVLSISCSGTASSPARKALIGKVDISRSLSISLKITQVTPQPASSHEGFSMSMSMILGMYACQYLVMHGRLLSQCGKF

SEQ ID NO: 39666 - protein, 159 aa, Zea mays subsp. mays
  peptide (1)..(159): Ceres Seq. ID no. 13499212
  misc_feature (1)..(157): NCBI GI NO: 38345867 NR Description: OSJNBa0064M23.9
  misc_feature (3)..(159): NCBI GI NO: 37536440 NR Description: putative ubiquitin-conjugating enzyme
  misc_feature (3)..(159): NCBI GI NO: 25446690 NR Description: Putative ubiquitin-conjugating enzyme
  misc_feature (3)..(159): NCBI GI NO: 20975734 NR Description: putative ubiquitin-conjugating enzyme
  misc_feature (1)..(159): NCBI GI NO: 15230881 NR Description: ubiquitin-conjugating enzyme, putative
  misc_feature (5)..(156): NCBI GI NO: 7621708 NR Description: putative E2 enzyme Ubc9 [Dictyostelium discoideum]
  misc_feature (5)..(158): NCBI GI NO: 30584109 NR Description: Homo sapiens ubiquitin-conjugating enzyme E2I
  misc_feature (5)..(157): NCBI GI NO: 2194010 NR Description: Chain A, Human Ubiquitin-Conjugating Enzyme Ubc9
  misc_feature (5)..(157): NCBI GI NO: 3212324 NR Description: Human Ubc9
  misc_feature (5)..(157): NCBI GI NO: 20150955 NR Description: Chain A
MASGGAARGRLAEERKAWRKSHPLGFVAKPAMLPDGSVNLMLWNCVVPGKEGTDWEGGYFPVTLHFTENYPSNPPTCKFPRRFFHVNVYDSGDVCLSILGDAWAPSITVRQILIGIQELLENPNPASPAQDFAYDVFAENMPEYKRRVREQAKRYPSLV

SEQ ID NO: 39667 - protein, 128 aa, Zea mays subsp. mays
  peptide (1)..(128): Ceres Seq. ID no. 13499213
  misc_feature (1)..(126): NCBI GI NO: 38345867 NR Description: OSJNBa0064M23.9
  misc_feature (1)..(128): NCBI GI NO: 37536440 NR Description: putative ubiquitin-conjugating enzyme
  misc_feature (1)..(128): NCBI GI NO: 25446690 NR Description: Putative ubiquitin-conjugating enzyme
  misc_feature (1)..(128): NCBI GI NO: 20975734 NR Description: putative ubiquitin-conjugating enzyme
  misc_feature (1)..(128): NCBI GI NO: 15230881 NR Description: ubiquitin-conjugating enzyme, putative
  misc_feature (1)..(125): NCBI GI NO: 7621708 NR Description: putative E2 enzyme Ubc9 [Dictyostelium discoideum]
  misc_feature (1)..(127): NCBI GI NO: 30584109 NR Description: Homo sapiens ubiquitin-conjugating enzyme E2I
  misc_feature (1)..(126): NCBI GI NO: 2194010 NR Description: Chain A, Human Ubiquitin-Conjugating Enzyme Ubc9
  misc_feature (1)..(126): NCBI GI NO: 20150955 NR Description: Chain A
  misc_feature (1)..(126): NCBI GI NO: 4507785 NR Description: ubiquitin-conjugating enzyme E2I
MLPDGSVNLMLWNCVVPGKEGTDWEGGYFPVTLHFTENYPSNPPTCKFPRRFFHVNVYDSGDVCLSILGDAWAPSITVRQILIGIQELLENPNPASPAQDFAYDVFAENMPEYKRRVREQAKRYPSLV

SEQ ID NO: 39668 - DNA, 1048 bp, Zea mays subsp. mays
  misc_feature (1)..(1048): Ceres Seq. ID no. 12364326
gcacgagaccattacctagaacatcctaatcgaaaagctctaaactcttcctaccccgctacccgctctctcgttggacgtgacttcggaagttgccggagatgtcgtcgatggccacgaagctcttcaacaccgccgaggtggagtcgtcggacgcgcaagccctagtcgcggacatgcggaaggctatcggcaccatgaagtccctcgccgtagacttcgagagggacggaaagtccgataaggtgaagaagcttgaggagacggttctggagttggtggcttcgtacgaggactgcgcggccatggcccaggcaattaaggcagtacctggagtgtatcagtcatctgatcagccaacggatttcaaaacattgatcggggtggaggctagcaagattagggaagcgtcatcggcatcacaacagaaccacccactctttcggcagttcagggagtctgtctggaatgttcaccatgctggtcagcctatgcctggtgaggaacaggaggacattgtcatgactagcactcagatgagcatcttaaatgtcacatgcccattaactggaaagcctgtgattgaattgatgaatccagttcgctgtgtggattgcaagcatatctatgaaaaggaccctgtaatgcaatatataaggaccaaaaaaccaccgcagtgccctattgcaggctgtcctagggtcctagaaagagggaaggttatctgtgatcccttcctccttattgagatcgaagagctgcgttcatcagagaccgccgctccgaatgccacaaacatagatgactggaccgatctaaatgacgaagacgaggagtgaggaaggcccggtaaaaggataccggcagctgttattgtttaggaggatagggtttagtatgttcttcaggatacactgtcttgttggattctgtaggaggatgggttctagtatgttcaggaatcaggatgcgctcgtcttgttgggttttgcttctgatgacttcgatatgttccatggcaaatgcgactttaaagtttgggagactc

SEQ ID NO: 39669 - protein, 245 aa, Zea mays subsp. mays
  peptide (1)..(245): Ceres Seq. ID no. 12364327
  misc_feature (4)..(243): NCBI GI NO: 11994504 NR Description: emb|CAB09999
  misc_feature (4)..(243): NCBI GI NO: 30683483 NR Description: expressed protein [Arabidopsis thaliana]
MSSMATKLFNTAEVESSDAQALVADMRKAIGTMKSLAVDFERDGKSDKVKKLEETVLELVASYEDCAAMAQAIKAVPGVYQSSDQPTDFKTLIGVEASKIREASSASQQNHPLFRQFRESVWNVHHAGQPMPGEEQEDIVMTSTQMSILNVTCPLTGKPVIELMNPVRCVDCKHIYEKDPVMQYIRTKKPPQCPIAGCPRVLERGKVICDPFLLIEIEELRSSETAAPNATNIDDWTDLNDEDEE

SEQ ID NO: 39670 - protein, 242 aa, Zea mays subsp. mays
  peptide (1)..(242): Ceres Seq. ID no. 12364328
  misc_feature (1)..(240): NCBI GI NO: 11994504 NR Description: emb|CAB09999
  misc_feature (1)..(240): NCBI GI NO: 30683483 NR Description: expressed protein [Arabidopsis thaliana]
MATKLFNTAEVESSDAQALVADMRKAIGTMKSLAVDFERDGKSDKVKKLEETVLELVASYEDCAAMAQAIKAVPGVYQSSDQPTDFKTLIGVEASKIREASSASQQNHPLFRQFRESVWNVHHAGQPMPGEEQEDIVMTSTQMSILNVTCPLTGKPVIELMNPVRCVDCKHIYEKDPVMQYIRTKKPPQCPIAGCPRVLERGKVICDPFLLIEIEELRSSETAAPNATNIDDWTDLNDEDEE

SEQ ID NO: 39671 - protein, 220 aa, Zea mays subsp. mays
  peptide (1)..(220): Ceres Seq. ID no. 12364329
  misc_feature (1)..(218): NCBI GI NO: 11994504 NR Description: emb|CAB09999
  misc_feature (1)..(218): NCBI GI NO: 30683483 NR Description: expressed protein [Arabidopsis thaliana]
MRKAIGTMKSLAVDFERDGKSDKVKKLEETVLELVASYEDCAAMAQAIKAVPGVYQSSDQPTDFKTLIGVEASKIREASSASQQNHPLFRQFRESVWNVHHAGQPMPGEEQEDIVMTSTQMSILNVTCPLTGKPVIELMNPVRCVDCKHIYEKDPVMQYIRTKKPPQCPIAGCPRVLERGKVICDPFLLIEIEELRSSETAAPNATNIDDWTDLNDEDEE

SEQ ID NO: 39672 - DNA, 778 bp, Zea mays subsp. mays
  misc_feature (1)..(778): Ceres Seq. ID no. 12379700
accgcgagccgaaccggagcgtcaagcaaacatccgtcgatcccgattccgaccactgcgctcgcgccatcgcgccatccacccggcattgtgcgcccgagccgggctcgttggatggcgtccggaggcgccgcccgcggtcgccttgctgaggagcgcaaggcgtggcgcaagagccatcccctcggctttgtggccaagccggcgatgctgccggatggttctgtcaatctcatgctctgggactgcgtcgtccccggcaaggaaggcactgattgggaaggtggatatttcccggtcactctccatttcactgaaaattacccaagtaaccccccaacctgcaagttcccacgaaggtttttccatgtcaatgtctatgattctggggatgtatgcctgtcaatacttggtgatgcatgggcgccttctatcacagtgcggcaaattctaataggcatccaggagctgctggagaacccaaacccagcctctcccgcacaggattttgcttacgatgtttttgcagagaatatgccagaatacaagagacgcgtccgtgagcaagccaagaggtatccgtcgctcgtgtagccgtggacctctgcaacacaattgctgctaaccaagtagtcactcactttggtgtagtggaacttgttcatgacgtgcttaactatggtgtctagttagccgtacgcttgttggaactgctaaagtgcagcttattggaactgctaaaatgcccttgactacgtcttattattatggtttatct

SEQ ID NO: 39673 - protein, 197 aa, Zea mays subsp. mays
  peptide (1)..(197): Ceres Seq. ID no. 12379701
  misc_feature (39)..(195): NCBI GI NO: 38345867 NR Description: OSJNBa0064M23.9
  misc_feature (41)..(197): NCBI GI NO: 37536440 NR Description: putative ubiquitin-conjugating enzyme
  misc_feature (41)..(197): NCBI GI NO: 25446690 NR Description: Putative ubiquitin-conjugating enzyme
  misc_feature (41)..(197): NCBI GI NO: 20975734 NR Description: putative ubiquitin-conjugating enzyme
  misc_feature (39)..(197): NCBI GI NO: 15230881 NR Description: E2 ubiquitin-conjugating-like enzyme, Ahus5
  misc_feature (43)..(196): NCBI GI NO: 30584109 NR Description: Homo sapiens ubiquitin-conjugating enzyme E2I
  misc_feature (43)..(195): NCBI GI NO: 2194010 NR Description: Chain A, Human Ubiquitin-Conjugating Enzyme Ubc9
  misc_feature (43)..(195): NCBI GI NO: 3212324 NR Description: Human Ubc9
  misc_feature (43)..(195): NCBI GI NO: 4507785 NR Description: ubiquitin-conjugating enzyme E2I
  misc_feature (43)..(195): NCBI GI NO: 20150955 NR Description: Chain A
TASRTGASSKHPSIPIPTTALAPSRHPPGIVRPSRARWMASGGAARGRLAEERKAWRKSHPLGFVAKPAMLPDGSVNLMLWDCVVPGKEGTDWEGGYFPVTLHFTENYPSNPPTCKFPRRFFHVNVYDSGDVCLSILGDAWAPSITVRQILIGIQELLENPNPASPAQDFAYDVFAENMPEYKRRVREQAKRYPSLV

SEQ ID NO: 39674 - protein, 159 aa, Zea mays subsp. mays
  peptide (1)..(159): Ceres Seq. ID no. 12379702
  misc_feature (1)..(157): NCBI GI NO: 38345867 NR Description: OSJNBa0064M23.9
  misc_feature (3)..(159): NCBI GI NO: 37536440 NR Description: putative ubiquitin-conjugating enzyme
  misc_feature (3)..(159): NCBI GI NO: 25446690 NR Description: Putative ubiquitin-conjugating enzyme
  misc_feature (3)..(159): NCBI GI NO: 20975734 NR Description: putative ubiquitin-conjugating enzyme
  misc_feature (1)..(159): NCBI GI NO: 15230881 NR Description: E2 ubiquitin-conjugating-like enzyme, Ahus5
  misc_feature (5)..(158): NCBI GI NO: 30584109 NR Description: Homo sapiens ubiquitin-conjugating enzyme E2I
  misc_feature (5)..(157): NCBI GI NO: 2194010 NR Description: Chain A, Human Ubiquitin-Conjugating Enzyme Ubc9
  misc_feature (5)..(157): NCBI GI NO: 20150955 NR Description: Chain A
  misc_feature (5)..(157): NCBI GI NO: 4507785 NR Description: ubiquitin-conjugating enzyme E2I
  misc_feature (5)..(157): NCBI GI NO: 3212324 NR Description: Human Ubc9
MASGGAARGRLAEERKAWRKSHPLGFVAKPAMLPDGSVNLMLWDCVVPGKEGTDWEGGYFPVTLHFTENYPSNPPTCKFPRRFFHVNVYDSGDVCLSILGDAWAPSITVRQILIGIQELLENPNPASPAQDFAYDVFAENMPEYKRRVREQAKRYPSLV

SEQ ID NO: 39675 - protein, 150 aa, Zea mays subsp. mays
  peptide (1)..(150): Ceres Seq. ID no. 12379703
PRAEPERQANIRRSRFRPLRSRHRAIHPALCARAGLVGWRPEAPPAVALLRSARRGARAIPSALWPSRRCCRMVLSISCSGTASSPARKALIGKVDISRSLSISLKITQVTPQPASSHEGFSMSMSMILGMYACQYLVMHGRLLSQCGKF

SEQ ID NO: 39676 - DNA, 1436 bp, Zea mays subsp. mays
  misc_feature (1)..(1436): Ceres Seq. ID no. 12382811
acgccaagcgcgcaattaaccctcactaaagggaacaaaagctggagctccaccgcggtggcggccgctctagaactagtggatcccccgggctgcaggaattcgcacgagaccattacctagaacatcctaatcgaaaaaccgggctgaggaggccatcggacgcacaaggacagcagagtgcaggaccggagcggagcgaccgagagtgtgtgggagagagatggcgtccagcgcctcgtctaccctgccgctgccaacgctctcgctcgccgtgatcctgctcgcgctgtgcgcccgcggcggcgaggccaggccgccaccgccgctccacggcgtgcgcccgctcgccttcgacgaggggtacacccagatcttcggcagcgccaacctcgcgctcctccgcgacggtaggcgcgtccgcctcacgctcgacgagtccaccggagccgggttcgcgtcgcaggacgtcttcctccacggtttcttcagcgccgccatcaagctgcccgccgactacgcggcgggcgtcgtcgtcgcgttctacctgtcgaacggcgacgtgtacgagaagacgcacgacgagctggacttcgagttcctgggcaacgtgcggggccgcgagtggcgggtgcagaccaacgtgtacggcaacggcagcaccgacgccggccgggaggagcgctacgacctcccattcgaccccaccgacgacttccaccactactccatcctctggaccagcgaccgcatcactttctacgtcgacgagaccccgatccaggaggtggtgcggacggcggccatgggcgcggcgttcccgtccaagcccatgtccctgtacgccacgatctgggacggctccgcgtgggccacgctgggcggccggtaccgcgtcaactacaagtacgcgccgttcgtggccgagttcgccgacctcgccatccagggcttcgccgtcgaccccgccgccgaccacgccgtggcgtcgtgcggcgcgggcctgggcctgggcctgggcccgggcccgctcgccgtgtccgcggagcagcgctcggccatggcggcgttccggcgcgcccacacctcctactcctactgccacgaccggcggcggtaccccgtcgcgctgtcggagtgcggggccggcgcggggctcctccccggccgcatgtttggccccgacgggatgaagcagcaccggcgccacctggggcgcggcgcgcggccaccgcggcggcgcccaggacgacgacgtcatgtgatcgccggtccctggcccctcgccacgtcgcggcggcggggcggggatggttgcacgctgtggattggattggattggattgggttgggggggttgggcggggattgtccgggatggaaaagctcgcctcattgtaccattcgcgccatggaagtaggtcgtgtttattgcc

SEQ ID NO: 39677 - protein, 404 aa, Zea mays subsp. mays
  peptide (1)..(404): Ceres Seq. ID no. 12382812
  misc_feature (44)..(229): Pfam Name: Pfam Description:  Glycosyl hydrolases family 16
  misc_feature (42)..(306): NCBI GI NO: 15223878 NR Description: xyloglucan endotransglycosylase
  misc_feature (43)..(306): NCBI GI NO: 5533313 NR Description: endoxyloglucan transferase [Arabidopsis thaliana]
  misc_feature (43)..(306): NCBI GI NO: 15226364 NR Description: xyloglucan endotransglycosylase
  misc_feature (43)..(306): NCBI GI NO: 21553969 NR Description: putative xyloglucan-specific glucanase
  misc_feature (42)..(343): NCBI GI NO: 13560781 NR Description: endoxyloglucan transferase [Daucus carota]
  misc_feature (179)..(341): NCBI GI NO: 37530588 NR Description: putative xyloglucan endo-transglycosylase
  misc_feature (14)..(161): NCBI GI NO: 37530588 NR Description: putative xyloglucan endo-transglycosylase
  misc_feature (43)..(335): NCBI GI NO: 6681351 NR Description: ETAG-A3 [Lycopersicon esculentum]
  misc_feature (18)..(336): NCBI GI NO: 2129774 NR Description: xyloglucan endo-1,4-beta-D-glucanase (EC 3
  misc_feature (18)..(336): NCBI GI NO: 15222593 NR Description: xyloglucan endotransglycosylase
MASSASSTLPLPTLSLAVILLALCARGGEARPPPPLHGVRPLAFDEGYTQIFGSANLALLRDGRRVRLTLDESTGAGFASQDVFLHGFFSAAIKLPADYAAGVVVAFYLSNGDVYEKTHDELDFEFLGNVRGREWRVQTNVYGNGSTDAGREERYDLPFDPTDDFHHYSILWTSDRITFYVDETPIQEVVRTAAMGAAFPSKPMSLYATIWDGSAWATLGGRYRVNYKYAPFVAEFADLAIQGFAVDPAADHAVASCGAGLGLGLGPGPLAVSAEQRSAMAAFRRAHTSYSYCHDRRRYPVALSECGAGAGLLPGRMFGPDGMKQHRRHLGRGARPPRRRPGRRRHVIAGPWPLATSRRRGGDGCTLWIGLDWIGLGGLGGDCPGWKSSPHCTIRAMEVGRVYC

SEQ ID NO: 39678 - protein, 210 aa, Zea mays subsp. mays
  peptide (1)..(210): Ceres Seq. ID no. 12382813
  misc_feature (1)..(112): NCBI GI NO: 15223878 NR Description: xyloglucan endotransglycosylase
  misc_feature (1)..(112): NCBI GI NO: 5533313 NR Description: endoxyloglucan transferase [Arabidopsis thaliana]
  misc_feature (1)..(112): NCBI GI NO: 15226364 NR Description: xyloglucan endotransglycosylase
  misc_feature (1)..(112): NCBI GI NO: 21553969 NR Description: putative xyloglucan-specific glucanase
  misc_feature (1)..(149): NCBI GI NO: 13560781 NR Description: endoxyloglucan transferase [Daucus carota]
  misc_feature (1)..(147): NCBI GI NO: 37530588 NR Description: putative xyloglucan endo-transglycosylase
  misc_feature (1)..(141): NCBI GI NO: 6681351 NR Description: ETAG-A3 [Lycopersicon esculentum]
  misc_feature (1)..(142): NCBI GI NO: 2129774 NR Description: xyloglucan endo-1,4-beta-D-glucanase (EC 3
  misc_feature (1)..(142): NCBI GI NO: 15222593 NR Description: xyloglucan endotransglycosylase
  misc_feature (1)..(142): NCBI GI NO: 21618261 NR Description: endoxyloglucan transferase, putative
MGAAFPSKPMSLYATIWDGSAWATLGGRYRVNYKYAPFVAEFADLAIQGFAVDPAADHAVASCGAGLGLGLGPGPLAVSAEQRSAMAAFRRAHTSYSYCHDRRRYPVALSECGAGAGLLPGRMFGPDGMKQHRRHLGRGARPPRRRPGRRRHVIAGPWPLATSRRRGGDGCTLWIGLDWIGLGGLGGDCPGWKSSPHCTIRAMEVGRVYC

SEQ ID NO: 39679 - DNA, 1022 bp, Zea mays subsp. mays
  misc_feature (1)..(1022): Ceres Seq. ID no. 12416675
agagaaaagtaataagaccgtgctgcgcctgcgctgcgcagctccagcaccacagcaccagagctcgatcgacctccctctccaatgccgtctttcatcgacggccccactttccgggcgctgctccggccgtccaccaacgggcgccggaccaagatctcggacagcggcggcggcggcgggggcatcttcaagatgttcaagctcatgcccatgctctcgtccgggtgcaagatggtggcgctgctgggcaagcacaacaaccgggcgctgctggccgaccacgcgacgacggtgacgctgttcgggccgcgccggggccgcgtgagcctggccatccacgaggacacgcgcgcgccgccgctgttcctcatcgagctgcccatgctgacgagcgcgctgcaccgggagatctcgtccggggcgctcaagctggcgctggagagcgacacccgcagcgcgcgccgccgcctcgtggaggagtacgtctgggccgtctactgcaacggccgcaaggccggatactccatccgcaggaaggaggcctccgacgacgagcgccacgtgctgcgcctcctgcgcggcgtgtccatgggcgccggcgtgctcccggccgcccccgagaaggagggcggcgtgcccgcggggcccgacggggagctcacgtacgtgcgcgcccgcgtcgagcgcgtcgtcggatccaaggactcggaggccttctacatgatcaaccccgaggagggcgggaacggcgccgataataacgggggcggtggaggcgccggcggcgcgccggagctgagcattttcctagtaaggatgaaatgaataaaccgtcatattattactgctacagcataaatatataaatataatagggtgctatattgttttttacacacacccttgtgccttgtttgcacacagcagatgtgttctatgaaactgtccatagatcgagtttgtaatctaactgatgtatatctccatgttagataattgattttgtgaatcgtgctgag

SEQ ID NO: 39680 - protein, 252 aa, Zea mays subsp. mays
  peptide (1)..(252): Ceres Seq. ID no. 12416676
  misc_feature (102)..(252): Pfam Name: Pfam Description:  HlyD family secretion protein
RKVIRPCCACAAQLQHHSTRARSTSLSNAVFHRRPHFPGAAPAVHQRAPDQDLGQRRRRRGHLQDVQAHAHALVRVQDGGAAGQAQQPGAAGRPRDDGDAVRAAPGPREPGHPRGHARAAAVPHRAAHADERAAPGDLVRGAQAGAGERHPQRAPPPRGGVRLGRLLQRPQGRILHPQEGGLRRRAPRAAPPARRVHGRRRAPGRPREGGRRARGARRGAHVRARPRRARRRIQGLGGLLHDQPRGGRERRR

SEQ ID NO: 39681 - protein, 247 aa, Zea mays subsp. mays
  peptide (1)..(247): Ceres Seq. ID no. 12416677
  misc_feature (68)..(225): Pfam Name: Pfam Description:  Protein of unknown function, DUF617
  misc_feature (2)..(225): NCBI GI NO: 15239035 NR Description: putative protein; protein id: At5g42680.1
  misc_feature (121)..(246): NCBI GI NO: 34911646 NR Description: P0039G05.26
  misc_feature (53)..(122): NCBI GI NO: 34911646 NR Description: P0039G05.26
  misc_feature (1)..(246): NCBI GI NO: 15235158 NR Description: putative protein; protein id: At4g39610
  misc_feature (1)..(225): NCBI GI NO: 21618123 NR Description: unknown [Arabidopsis thaliana]
  misc_feature (1)..(225): NCBI GI NO: 15227126 NR Description: hypothetical protein; protein id: At2g21990.1
  misc_feature (123)..(246): NCBI GI NO: 15237221 NR Description: putative protein; protein id: At5g23100.1
  misc_feature (16)..(122): NCBI GI NO: 15237221 NR Description: putative protein; protein id: At5g23100.1
  misc_feature (1)..(246): NCBI GI NO: 15240220 NR Description: putative protein; protein id: At5g06990.1
  misc_feature (72)..(246): NCBI GI NO: 11994755 NR Description: gb|AAB84348
MPSFIDGPTFRALLRPSTNGRRTKISDSGGGGGGIFKMFKLMPMLSSGCKMVALLGKHNNRALLADHATTVTLFGPRRGRVSLAIHEDTRAPPLFLIELPMLTSALHREISSGALKLALESDTRSARRRLVEEYVWAVYCNGRKAGYSIRRKEASDDERHVLRLLRGVSMGAGVLPAAPEKEGGVPAGPDGELTYVRARVERVVGSKDSEAFYMINPEEGGNGADNNGGGGGAGGAPELSIFLVRMK

SEQ ID NO: 39682 - protein, 210 aa, Zea mays subsp. mays
  peptide (1)..(210): Ceres Seq. ID no. 12416678
  misc_feature (31)..(188): Pfam Name: Pfam Description:  Protein of unknown function, DUF617
  misc_feature (1)..(188): NCBI GI NO: 15239035 NR Description: putative protein; protein id: At5g42680.1
  misc_feature (84)..(209): NCBI GI NO: 34911646 NR Description: P0039G05.26
  misc_feature (16)..(85): NCBI GI NO: 34911646 NR Description: P0039G05.26
  misc_feature (1)..(209): NCBI GI NO: 15235158 NR Description: putative protein; protein id: At4g39610
  misc_feature (1)..(188): NCBI GI NO: 21618123 NR Description: unknown [Arabidopsis thaliana]
  misc_feature (1)..(188): NCBI GI NO: 15227126 NR Description: hypothetical protein; protein id: At2g21990.1
  misc_feature (86)..(209): NCBI GI NO: 15237221 NR Description: putative protein; protein id: At5g23100.1
  misc_feature (1)..(85): NCBI GI NO: 15237221 NR Description: putative protein; protein id: At5g23100.1
  misc_feature (1)..(209): NCBI GI NO: 15240220 NR Description: putative protein; protein id: At5g06990.1
  misc_feature (35)..(209): NCBI GI NO: 11994755 NR Description: gb|AAB84348
MFKLMPMLSSGCKMVALLGKHNNRALLADHATTVTLFGPRRGRVSLAIHEDTRAPPLFLIELPMLTSALHREISSGALKLALESDTRSARRRLVEEYVWAVYCNGRKAGYSIRRKEASDDERHVLRLLRGVSMGAGVLPAAPEKEGGVPAGPDGELTYVRARVERVVGSKDSEAFYMINPEEGGNGADNNGGGGGAGGAPELSIFLVRMK

SEQ ID NO: 39683 - DNA, 947 bp, Zea mays subsp. mays
  misc_feature (1)..(947): Ceres Seq. ID no. 12374953
aagttcggcagttccctccctccctcctcgtcacctaatccgccccgtcgccccggaagcttcaagaaggtggacggtcggagggacgggctacatggggggctgcttctggtagcttcggtcgcccgccgcgccgccgccaggatggattcaggattgtaatttcaggagatggtgaccatgggagggaattggagctaattgacgatggcaagaatgaagaaacgcctctgtcagttcttcaggtaaatgctatgagaaagttggggtcggtggaagaggtgcctgtcccgctcttcccgtccaagggtcttcggttgaagcaaaagattaaggactggttggaagggttccagaggctcccttatgtatctccatatgagaatttcagccacatcaatccgggtagtgatgtttcagagaagcgggcagtcggggtgctccatgagctgcttagtctgtttgtgacatgctctgctgagaggcgacggttacgctgcctccggcagcacctagggctgccacagaagtttcatcttgtgttcgagcggcaccctcatgtgttctacttattgttaaaggagaagacatgctttgttgtcctcaaagaggcctacatagctggagaagacactgcaattgaggcgcaccccatgttggaagtgttcaagaagtatgttgagttgatggagcagtcacgggaaatcataagacgtcgacggagcgggaagcctattgaactagagtccaaggcatgcggggatagctgagaagaaggatggggatacatgtgcaaatatgacctctataacaagaatgtggatatgtactcttggtaggagctagtttatttctcattatttgtagagaaatatttctcattatttgtagagaaatacatcaagtgctgaaacaggttggtgactatgatatttaatctgcattct

SEQ ID NO: 39684 - protein, 171 aa, Zea mays subsp. mays
  peptide (1)..(171): Ceres Seq. ID no. 12374954
  misc_feature (1)..(153): Pfam Name: DUF860 Pfam Description: Plant specific of unknown function
  misc_feature (1)..(157): NCBI GI NO: 15225035 NR Description: hypothetical protein; protein id: At2g39120.1
  misc_feature (1)..(147): NCBI GI NO: 15238875 NR Description: putative protein; protein id: At5g48040.1
  misc_feature (15)..(145): NCBI GI NO: 11282335 NR Description: hypothetical protein F14P22
  misc_feature (15)..(145): NCBI GI NO: 18410975 NR Description: putative protein; protein id: At3g58520
  misc_feature (15)..(145): NCBI GI NO: 21536812 NR Description: unknown [Arabidopsis thaliana]
  misc_feature (15)..(148): NCBI GI NO: 15233788 NR Description: putative protein; protein id: At4g24320.1
  misc_feature (1)..(170): NCBI GI NO: 15217597 NR Description: hypothetical protein; protein id: At1g71850.1
  misc_feature (1)..(170): NCBI GI NO: 3413424 NR Description: hypothetical protein [Arabidopsis thaliana]
  misc_feature (1)..(166): NCBI GI NO: 34894384 NR Description: unnamed protein product
  misc_feature (1)..(156): NCBI GI NO: 15224649 NR Description: hypothetical protein; protein id: At2g31290
MRKLGSVEEVPVPLFPSKGLRLKQKIKDWLEGFQRLPYVSPYENFSHINPGSDVSEKRAVGVLHELLSLFVTCSAERRRLRCLRQHLGLPQKFHLVFERHPHVFYLLLKEKTCFVVLKEAYIAGEDTAIEAHPMLEVFKKYVELMEQSREIIRRRRSGKPIELESKACGDS

SEQ ID NO: 39685 - DNA, 617 bp, Zea mays subsp. mays
  misc_feature (1)..(617): Ceres Seq. ID no. 12362776
atacactcctgaaattgctgtcagctttggtgcagggttgattggatcattggtgtatctccgcatgcttggaaccagtatagattccctagcaggtggaactggagaaactgtcaagagtgctgctgcacaaccaaggttgcttattccagtggtacttgtgatgatgtataacagatggaatcagatattagttccggattatggtttcatgcagcttgagttaataccaatgcttgttgggttttttacctataagattgctacattcgctcaagcaatccaggattctatgcctccagtcggaaatcgtgaaggttgaaaagtgtcatgttgtatataaacgaaggtggtagccatggtccctggtcagtggtcacccagatagtaaggtctgtatagaagaatctggtctggtgtcatcaccaagtagatgagatgctcgttgaggacgccatttgaaaatctcgagtgcttaactatgttctgcacaaatattttgacgaaaggtgatgttaccacattcattccatattacacgcagatcatcagtgtataaatttacggctccgaacttttaccacaacgattaattgacaaaacaattgtatgattgc

SEQ ID NO: 39686 - protein, 106 aa, Zea mays subsp. mays
  peptide (1)..(106): Ceres Seq. ID no. 12362777
  misc_feature (1)..(105): NCBI GI NO: 34911056 NR Description: P0007F06.23
  misc_feature (1)..(98): NCBI GI NO: 18402535 NR Description: expressed protein; protein id: At2g31040
  misc_feature (1)..(98): NCBI GI NO: 21593011 NR Description: unknown [Arabidopsis thaliana]
YTPEIAVSFGAGLIGSLVYLRMLGTSIDSLAGGTGETVKSAAAQPRLLIPVVLVMMYNRWNQILVPDYGFMQLELIPMLVGFFTYKIATFAQAIQDSMPPVGNREG

SEQ ID NO: 39687 - protein, 85 aa, Zea mays subsp. mays
  peptide (1)..(85): Ceres Seq. ID no. 12362778
  misc_feature (1)..(84): NCBI GI NO: 34911056 NR Description: P0007F06.23
  misc_feature (1)..(77): NCBI GI NO: 18402535 NR Description: expressed protein; protein id: At2g31040
  misc_feature (1)..(77): NCBI GI NO: 21593011 NR Description: unknown [Arabidopsis thaliana]
MLGTSIDSLAGGTGETVKSAAAQPRLLIPVVLVMMYNRWNQILVPDYGFMQLELIPMLVGFFTYKIATFAQAIQDSMPPVGNREG

SEQ ID NO: 39688 - DNA, 994 bp, Zea mays subsp. mays
  misc_feature (1)..(994): Ceres Seq. ID no. 12416292
acttcggcatgcgccgggaatttgattcttctgcctaaaatagtcacgctaccttccacctccccctactactctgactctccctcgtcttcttcgctaccaagatgatggcggaggcgtggacgccggtgctgttgccggcgacggcgccctgcttctggcagcaggacacgcactcggttttgtggcggagaggagacgcgtggacggcggaggagaacaagctgttcgagaaggcactggcgcagatcgaccggaacgcgcccgacaggtgggagaaggtggcggcggtgctgccctggaagacggtcgacgacgtgaggagccagtaccacgccctcgagaaggacgtgggcgtcatcgaggccggcgggctcgtgccgttcccgcgctacagcggctcggtcccgccgccgtccgggttcgccctcgaggactggggcggcggcgaccgcgggttcaggcgcgcgcgcggctcggaggagatgcaggagcggaagaagggtgtcccctggacggaggaggagcacaagcttttcttgatggggctgaggaagtacgggagaggggactggaggaacatctcgcgcaagtacgtgacgacccggacgccgacgcaggtggccagccacgcgcagaagtacttcatccggctcagctccggcggcaaggacaagcggcggtccagcatccacgacatcaccaccgtcaacctcccaggcgacgccccgcgctcgtcgccgcccgcggccaccaccaacccctccgccggcgccctggtggtggacgtgaagcccttcgtgtgacgaggatgaagagtggcacagcctcgtcgtccagctgccagctcgcggcagctccgagcgactgcgttcatcgagaacaagacgccatgggcggcaatgcggcatccgtttcagttcagtgtacataattcggcaagtacagagcccaacaacttccacgtaaaaggtactgaataataaagcattcg

SEQ ID NO: 39689 - protein, 233 aa, Zea mays subsp. mays
  peptide (1)..(233): Ceres Seq. ID no. 12416293
  misc_feature (134)..(181): Pfam Name: Pfam Description:  Myb-like DNA-binding domain
  misc_feature (1)..(231): NCBI GI NO: 34908386 NR Description: P0529E05.19
  misc_feature (30)..(231): NCBI GI NO: 12005328 NR Description: unknown [Hevea brasiliensis]
  misc_feature (31)..(208): NCBI GI NO: 15237776 NR Description: I-box binding factor - like protein
  misc_feature (30)..(224): NCBI GI NO: 7446171 NR Description: probable MYB family transcription factor
  misc_feature (30)..(224): NCBI GI NO: 30687381 NR Description: MYB family transcription factor -related
  misc_feature (34)..(213): NCBI GI NO: 18874263 NR Description: MYB-like transcription factor DIVARICATA
  misc_feature (34)..(222): NCBI GI NO: 18874265 NR Description: MYB-like transcription factor DVL1
  misc_feature (28)..(232): NCBI GI NO: 34895714 NR Description: putative myb-related transcription activator
  misc_feature (30)..(218): NCBI GI NO: 15240915 NR Description: myb family transcription factor
  misc_feature (11)..(204): NCBI GI NO: 15229712 NR Description: MYB-family transcription factor, putative
MMAEAWTPVLLPATAPCFWQQDTHSVLWRRGDAWTAEENKLFEKALAQIDRNAPDRWEKVAAVLPWKTVDDVRSQYHALEKDVGVIEAGGLVPFPRYSGSVPPPSGFALEDWGGGDRGFRRARGSEEMQERKKGVPWTEEEHKLFLMGLRKYGRGDWRNISRKYVTTRTPTQVASHAQKYFIRLSSGGKDKRRSSIHDITTVNLPGDAPRSSPPAATTNPSAGALVVDVKPFV

SEQ ID NO: 39690 - protein, 232 aa, Zea mays subsp. mays
  peptide (1)..(232): Ceres Seq. ID no. 12416294
  misc_feature (133)..(180): Pfam Name: Pfam Description:  Myb-like DNA-binding domain
  misc_feature (1)..(230): NCBI GI NO: 34908386 NR Description: P0529E05.19
  misc_feature (29)..(230): NCBI GI NO: 12005328 NR Description: unknown [Hevea brasiliensis]
  misc_feature (30)..(207): NCBI GI NO: 15237776 NR Description: I-box binding factor - like protein
  misc_feature (29)..(223): NCBI GI NO: 7446171 NR Description: probable MYB family transcription factor
  misc_feature (29)..(223): NCBI GI NO: 30687381 NR Description: MYB family transcription factor -related
  misc_feature (33)..(212): NCBI GI NO: 18874263 NR Description: MYB-like transcription factor DIVARICATA
  misc_feature (33)..(221): NCBI GI NO: 18874265 NR Description: MYB-like transcription factor DVL1
  misc_feature (27)..(231): NCBI GI NO: 34895714 NR Description: putative myb-related transcription activator
  misc_feature (29)..(217): NCBI GI NO: 15240915 NR Description: myb family transcription factor
  misc_feature (10)..(203): NCBI GI NO: 15229712 NR Description: MYB-family transcription factor, putative
MAEAWTPVLLPATAPCFWQQDTHSVLWRRGDAWTAEENKLFEKALAQIDRNAPDRWEKVAAVLPWKTVDDVRSQYHALEKDVGVIEAGGLVPFPRYSGSVPPPSGFALEDWGGGDRGFRRARGSEEMQERKKGVPWTEEEHKLFLMGLRKYGRGDWRNISRKYVTTRTPTQVASHAQKYFIRLSSGGKDKRRSSIHDITTVNLPGDAPRSSPPAATTNPSAGALVVDVKPFV

SEQ ID NO: 39691 - DNA, 912 bp, Zea mays subsp. mays
  misc_feature (1)..(912): Ceres Seq. ID no. 12360805
gcacgagaccattacctagaacatcctaatcaaaaatatattttatcagcgtgcggccacgtacacggtacacgcccccagctgcttcgaaaccaactccagaaaactcggcacagcctaggccgattcgcctgtgcctgtgcgtacgtgagctgcgaggtagatagatggctgcggtggtggaggcggcgccggctgcggagacggcggcaaaggccgtggcagaggaggaggccggcgtcaccgcgcctgggcctccggttggtggctccaactccaaggccctgatcgtcgttgacaaggtggatgataaacctttttctttgaataatatgccaaggaactccaatgatagagacattgctcttgcaacagtggaaatagagaagataaactctttgattaaagcttgggaagagaatgagaaggcaaaagcagataacaagactgctaagaaacaatctattattctttcatgggagaacacaaagaaggcaatcatagaagctgagttgaaaaagaagaaagaagaactagagaagaaaatggctgaatatgctgagaagatgaaaaacaagaaggcaatcatccataagaaggccgaggaaaagagagcgatggttatggcccagcatggtgaagaaattctcaagactgaggagatggcagctaagtaccgtgccactagggtagctccaaaaatttcttaggtgctttagagcataaggaaggtttgatttttatgctttcttatttgtgcattaaaatgccatggtgcaactttatcaacttatgtaattgttacccttcttaattgtttgtatagactactatttatggtgcacaaatgatactattggtgtataattagaccatcattgaccaaaatgaaaagcatataaatgtgaatgt

SEQ ID NO: 39692 - protein, 180 aa, Zea mays subsp. mays
  peptide (1)..(180): Ceres Seq. ID no. 12360806
  misc_feature (73)..(178): Pfam Name: Pfam Description:  Remorin, C-terminal region
  misc_feature (7)..(178): NCBI GI NO: 32489830 NR Description: OSJNBb0039L24.13
  misc_feature (8)..(178): NCBI GI NO: 34925093 NR Description: Remorin (pp34)
  misc_feature (4)..(178): NCBI GI NO: 4731573 NR Description: remorin 1 [Lycopersicon esculentum]
  misc_feature (11)..(178): NCBI GI NO: 4883530 NR Description: remorin 2 [Lycopersicon esculentum]
  misc_feature (8)..(178): NCBI GI NO: 15233068 NR Description: putative DNA-binding protein; protein id:At3g61260
  misc_feature (8)..(178): NCBI GI NO: 15225899 NR Description: remorin; protein id: At2g45820
  misc_feature (8)..(178): NCBI GI NO: 601843 NR Description: DNA-binding protein
  misc_feature (9)..(178): NCBI GI NO: 15237822 NR Description: putative protein; protein id: At5g23750
  misc_feature (9)..(178): NCBI GI NO: 21555669 NR Description: remorin [Arabidopsis thaliana]
  misc_feature (16)..(177): NCBI GI NO: 15229057 NR Description: remorin -like protein; protein id: At3g48940.1
MAAVVEAAPAAETAAKAVAEEEAGVTAPGPPVGGSNSKALIVVDKVDDKPFSLNNMPRNSNDRDIALATVEIEKINSLIKAWEENEKAKADNKTAKKQSIILSWENTKKAIIEAELKKKKEELEKKMAEYAEKMKNKKAIIHKKAEEKRAMVMAQHGEEILKTEEMAAKYRATRVAPKIS

SEQ ID NO: 39693 - protein, 125 aa, Zea mays subsp. mays
  peptide (1)..(125): Ceres Seq. ID no. 12360807
  misc_feature (18)..(123): Pfam Name: Pfam Description:  Remorin, C-terminal region
  misc_feature (1)..(123): NCBI GI NO: 32489830 NR Description: OSJNBb0039L24.13
  misc_feature (1)..(123): NCBI GI NO: 34925093 NR Description: Remorin (pp34)
  misc_feature (1)..(123): NCBI GI NO: 4731573 NR Description: remorin 1 [Lycopersicon esculentum]
  misc_feature (1)..(123): NCBI GI NO: 4883530 NR Description: remorin 2 [Lycopersicon esculentum]
  misc_feature (1)..(123): NCBI GI NO: 15233068 NR Description: putative DNA-binding protein; protein id:At3g61260
  misc_feature (1)..(123): NCBI GI NO: 15225899 NR Description: remorin; protein id: At2g45820
  misc_feature (1)..(123): NCBI GI NO: 601843 NR Description: DNA-binding protein
  misc_feature (1)..(123): NCBI GI NO: 15237822 NR Description: putative protein; protein id: At5g23750
  misc_feature (1)..(123): NCBI GI NO: 21555669 NR Description: remorin [Arabidopsis thaliana]
  misc_feature (1)..(122): NCBI GI NO: 15229057 NR Description: remorin -like protein; protein id: At3g48940.1
MPRNSNDRDIALATVEIEKINSLIKAWEENEKAKADNKTAKKQSIILSWENTKKAIIEAELKKKKEELEKKMAEYAEKMKNKKAIIHKKAEEKRAMVMAQHGEEILKTEEMAAKYRATRVAPKIS

SEQ ID NO: 39694 - protein, 95 aa, Zea mays subsp. mays
  peptide (1)..(95): Ceres Seq. ID no. 12360808
ARDHYLEHPNQKYILSACGHVHGTRPQLLRNQLQKTRHSLGRFACACAYVSCEVDRWLRWWRRRRLRRRRQRPWQRRRPASPRLGLRLVAPTPRP

SEQ ID NO: 39695 - DNA, 484 bp, Zea mays subsp. mays
  misc_feature (1)..(484): Ceres Seq. ID no. 1679849
gacgaatcgtccatcatcttccccaactccatagtaggccagtccagaacacgagggcggcggctatgggcggacatggccacccttactcgccggcggagctgcagctgccggggttcgtgccgcagcggctgtcgcaggcccagatcgtcgcgcctttcgcgggcaccgcgtgttggccgtgctcggcgcctggctcgtctccgggagatgcggcggcagsggcggcggcagattatccaggaccgaccgcttgctcatgggctggtggctcttcaccgcgctgacccacctcgtcttcgagccacccttcctcttcaccccggacttcttcagcaaggagaacccaaactacttcgacgacctctttaaagagtacagcaaaggtgactccagatacgccgctagggacaccgccatcgtcgcgcttgaagtgataaccgtcggggctgaaaggcctgcatcgctcctcgcagtctatgcg

SEQ ID NO: 39696 - protein, 123 aa, Zea mays subsp. mays
  peptide (1)..(123): Ceres Seq. ID no. 1679850
  misc_feature (75)..(75): Xaa is any aa, unknown or other
DESSIIFPNSIVGQSRTRGRRLWADMATLTRRRSCSCRGSCRSGCRRPRSSRLSRAPRVGRARRLARLREMRRQXRRQIIQDRPLAHGLVALHRADPPRLRATLPLHPGLLQQGEPKLLRRPL

SEQ ID NO: 39697 - protein, 94 aa, Zea mays subsp. mays
  peptide (1)..(94): Ceres Seq. ID no. 1679851
  misc_feature (25)..(57): NCBI GI NO: 34894044 NR Description: putative C-8,7 sterol isomerase
  misc_feature (27)..(57): NCBI GI NO: 4098989 NR Description: phenylalkylamine binding protein homolog
  misc_feature (27)..(57): NCBI GI NO: 15223758 NR Description: C-8,7 sterol isomerase; protein id: At1g20050
  misc_feature (27)..(57): NCBI GI NO: 21554213 NR Description: C-8,7 sterol isomerase [Arabidopsis thaliana]
  misc_feature (74)..(74): Xaa is any aa, unknown or other
RIVHHLPQLHSRPVQNTRAAAMGGHGHPYSPAELQLPGFVPQRLSQAQIVAPFAGTACWPCSAPGSSPGDAAAXAAADYPGPTACSWAGGSSPR

SEQ ID NO: 39698 - protein, 98 aa, Zea mays subsp. mays
  peptide (1)..(98): Ceres Seq. ID no. 1679852
  misc_feature (50)..(50): Xaa is any aa, unknown or other
MATLTRRRSCSCRGSCRSGCRRPRSSRLSRAPRVGRARRLARLREMRRQXRRQIIQDRPLAHGLVALHRADPPRLRATLPLHPGLLQQGEPKLLRRPL

SEQ ID NO: 39699 - DNA, 2141 bp, Zea mays subsp. mays; identical to SEQ ID NO: 39447
  misc_feature (1)..(2141): Ceres Seq. ID no. 12435299

SEQ ID NO: 39700 - protein, 501 aa, Zea mays subsp. mays; identical to SEQ ID NO: 39448
  peptide (1)..(501): Ceres Seq. ID no. 12435300
  misc_feature (29)..(498): NCBI GI NO: 23452823 NR Description: major facilitator superfamily antiporter
  misc_feature (31)..(497): NCBI GI NO: 30684565 NR Description: transporter-related protein [Arabidopsis thaliana]
  misc_feature (1)..(496): NCBI GI NO: 23452821 NR Description: major facilitator superfamily antiporter
  misc_feature (29)..(492): NCBI GI NO: 22326785 NR Description: transporter-like protein; protein id: At5g13740
  misc_feature (42)..(492): NCBI GI NO: 20260160 NR Description: transporter-like protein [Arabidopsis thaliana]
  misc_feature (42)..(469): NCBI GI NO: 10177340 NR Description: transporter-like protein [Arabidopsis thaliana]
  misc_feature (102)..(498): NCBI GI NO: 23452819 NR Description: major facilitator superfamily antiporter
  misc_feature (31)..(493): NCBI GI NO: 15229781 NR Description: transporter-like protein; protein id: At3g43790.1
  misc_feature (102)..(497): NCBI GI NO: 30684567 NR Description: transporter-related protein [Arabidopsis thaliana]
  misc_feature (102)..(497): NCBI GI NO: 21555230 NR Description: transporter-like protein [Arabidopsis thaliana]

SEQ ID NO: 39701 - protein, 425 aa, Zea mays subsp. mays; identical to SEQ ID NO: 39449
  peptide (1)..(425): Ceres Seq. ID no. 12435301
  misc_feature (1)..(422): NCBI GI NO: 23452823 NR Description: major facilitator superfamily antiporter
  misc_feature (1)..(421): NCBI GI NO: 30684565 NR Description: transporter-related protein [Arabidopsis thaliana]
  misc_feature (1)..(420): NCBI GI NO: 23452821 NR Description: major facilitator superfamily antiporter
  misc_feature (1)..(416): NCBI GI NO: 22326785 NR Description: transporter-like protein; protein id: At5g13740
  misc_feature (1)..(416): NCBI GI NO: 20260160 NR Description: transporter-like protein [Arabidopsis thaliana]
  misc_feature (1)..(393): NCBI GI NO: 10177340 NR Description: transporter-like protein [Arabidopsis thaliana]
  misc_feature (26)..(422): NCBI GI NO: 23452819 NR Description: major facilitator superfamily antiporter
  misc_feature (1)..(417): NCBI GI NO: 15229781 NR Description: transporter-like protein; protein id: At3g43790.1
  misc_feature (26)..(421): NCBI GI NO: 30684567 NR Description: transporter-related protein [Arabidopsis thaliana]
  misc_feature (26)..(421): NCBI GI NO: 21555230 NR Description: transporter-like protein [Arabidopsis thaliana]

SEQ ID NO: 39702 - protein, 400 aa, Zea mays subsp. mays; identical to SEQ ID NO: 39450
  peptide (1)..(400): Ceres Seq. ID no. 12435302
  misc_feature (1)..(397): NCBI GI NO: 23452823 NR Description: major facilitator superfamily antiporter
  misc_feature (1)..(396): NCBI GI NO: 30684565 NR Description: transporter-related protein [Arabidopsis thaliana]
  misc_feature (1)..(395): NCBI GI NO: 23452821 NR Description: major facilitator superfamily antiporter
  misc_feature (1)..(391): NCBI GI NO: 22326785 NR Description: transporter-like protein; protein id: At5g13740
  misc_feature (1)..(391): NCBI GI NO: 20260160 NR Description: transporter-like protein [Arabidopsis thaliana]
  misc_feature (1)..(368): NCBI GI NO: 10177340 NR Description: transporter-like protein [Arabidopsis thaliana]
  misc_feature (1)..(397): NCBI GI NO: 23452819 NR Description: major facilitator superfamily antiporter
  misc_feature (1)..(392): NCBI GI NO: 15229781 NR Description: transporter-like protein; protein id: At3g43790.1
  misc_feature (1)..(396): NCBI GI NO: 30684567 NR Description: transporter-related protein [Arabidopsis thaliana]
  misc_feature (1)..(396): NCBI GI NO: 21555230 NR Description: transporter-like protein [Arabidopsis thaliana]

SEQ ID NO: 39703 - DNA, 740 bp, Zea mays subsp. mays
  misc_feature (1)..(740): Ceres Seq. ID no. 12379716
gcacgagaccattacctagaacatcctaatcaaaaaccgatcgagccaccgtacgtcccgccgaggagggaggccggagcgctgcgcagcgaacaacggaacagaggaacgatggcagcagcactgaaagatgcattcgtaaggaagcctgtgctggcaacgatccgcctcgtcctgccagccggcgcagcccgcacgggacctccagtgagcccagcgctgggcccctaccgggtgaacctgatggcgctctgcaaggagatcaacgccaggacgcagaggtacaagcccgacaccccgatacgggtcaccgtgaccgtctacagggacagcaccttccagctcgtggtgaagccgccctcggtgtcgtggctcctcaagaaggccgccgggatccagaccgccagccggttccccggccacgtcaccgccgcgtccctcaccgtccgccacgtgtacgagatcgcaggctgaagctgggtgacgacccctcctgcaagtacgcgtcgcttgaggccatgtgcaagtccgtcgtcgccacggcccgctccatggggatcgccatcgtcagagatctgtgatcgatcgagcagcgcgtttgtctagttggtgctgtaacggctaatagtgttagtgtctcttctttaaaaaaatcagccatggcaggggcaggcgcggtggccttcatagccacagtctggcggcgatgggaaacaattgtttaagatatggtatatact

SEQ ID NO: 39704 - protein, 157 aa, Zea mays subsp. mays
  peptide (1)..(157): Ceres Seq. ID no. 12379717
  misc_feature (54)..(113): Pfam Name: Pfam Description:  Ribosomal protein L11, N-terminal domain
  misc_feature (38)..(156): NCBI GI NO: 37535204 NR Description: putative ribosomal protein L11
  misc_feature (38)..(156): NCBI GI NO: 15237029 NR Description: ribosomal protein L11 homolog
  misc_feature (40)..(156): NCBI GI NO: 15823668 NR Description: mitochondrial ribosomal protein L11
  misc_feature (55)..(156): NCBI GI NO: 19115007 NR Description: probable 50S ribosomal protein L11
  misc_feature (49)..(156): NCBI GI NO: 15606945 NR Description: ribosomal protein L11 [Aquifex aeolicus]
  misc_feature (49)..(156): NCBI GI NO: 22965184 NR Description: hypothetical protein [Rhodopseudomonas palustris]
  misc_feature (49)..(156): NCBI GI NO: 27380526 NR Description: 50S ribosomal Protein L11
  misc_feature (49)..(156): NCBI GI NO: 22966134 NR Description: hypothetical protein [Rhodospirillum rubrum]
  misc_feature (49)..(156): NCBI GI NO: 22998193 NR Description: hypothetical protein [Magnetococcus sp. MC-1]
  misc_feature (49)..(156): NCBI GI NO: 16330011 NR Description: 50S ribosomal protein L11
ARDHYLEHPNQKPIEPPYVPPRREAGALRSEQRNRGTMAAALKDAFVRKPVLATIRLVLPAGAARTGPPVSPALGPYRVNLMALCKEINARTQRYKPDTPIRVTVTVYRDSTFQLVVKPPSVSWLLKKAAGIQTASRFPGHVTAASLTVRHVYEIAG

SEQ ID NO: 39705 - protein, 120 aa, Zea mays subsp. mays
  peptide (1)..(120): Ceres Seq. ID no. 12379718
  misc_feature (17)..(76): Pfam Name: Pfam Description:  Ribosomal protein L11, N-terminal domain
  misc_feature (1)..(119): NCBI GI NO: 37535204 NR Description: putative ribosomal protein L11
  misc_feature (1)..(119): NCBI GI NO: 15237029 NR Description: ribosomal protein L11 homolog
  misc_feature (3)..(119): NCBI GI NO: 15823668 NR Description: mitochondrial ribosomal protein L11
  misc_feature (18)..(119): NCBI GI NO: 19115007 NR Description: probable 50S ribosomal protein L11
  misc_feature (12)..(119): NCBI GI NO: 15606945 NR Description: ribosomal protein L11 [Aquifex aeolicus]
  misc_feature (12)..(119): NCBI GI NO: 22965184 NR Description: hypothetical protein [Rhodopseudomonas palustris]
  misc_feature (12)..(119): NCBI GI NO: 27380526 NR Description: 50S ribosomal Protein L11
  misc_feature (12)..(119): NCBI GI NO: 22966134 NR Description: hypothetical protein [Rhodospirillum rubrum]
  misc_feature (12)..(119): NCBI GI NO: 22998193 NR Description: hypothetical protein [Magnetococcus sp. MC-1]
  misc_feature (12)..(119): NCBI GI NO: 16330011 NR Description: 50S ribosomal protein L11
MAAALKDAFVRKPVLATIRLVLPAGAARTGPPVSPALGPYRVNLMALCKEINARTQRYKPDTPIRVTVTVYRDSTFQLVVKPPSVSWLLKKAAGIQTASRFPGHVTAASLTVRHVYEIAG

SEQ ID NO: 39706 - DNA, 1175 bp, Zea mays subsp. mays; identical to SEQ ID NO: 23594
  misc_feature (1)..(1175): Ceres Seq. ID no. 12566396

SEQ ID NO: 39707 - protein, 283 aa, Zea mays subsp. mays; identical to SEQ ID NO: 23595
  peptide (1)..(283): Ceres Seq. ID no. 12566397
  misc_feature (69)..(273): Pfam Name: Pfam Description:  ER lumen protein retaining receptor
  misc_feature (69)..(283): NCBI GI NO: 6685428 NR Description: ER lumen protein retaining receptor
  misc_feature (69)..(283): NCBI GI NO: 21592401 NR Description: ER lumen retaining receptor
  misc_feature (69)..(283): NCBI GI NO: 18404390 NR Description: ER lumen retaining receptor
  misc_feature (69)..(283): NCBI GI NO: 9293986 NR Description: ER lumen protein-retaining receptor-like protein
  misc_feature (69)..(283): NCBI GI NO: 18397049 NR Description: ER lumen protein retaining receptor
  misc_feature (69)..(283): NCBI GI NO: 14285310 NR Description: ERD2 protein [Scherffelia dubia]
  misc_feature (69)..(282): NCBI GI NO: 22656361 NR Description: endoplasmic reticulum retention receptor
  misc_feature (69)..(283): NCBI GI NO: 17137442 NR Description: KDEL receptor CG5183-PA [Drosophila melanogaster]
  misc_feature (69)..(283): NCBI GI NO: 17551392 NR Description: Yeast Endoplasmic Reticulum retention Defectiverelated ERD-2
  misc_feature (69)..(270): NCBI GI NO: 34870419 NR Description: similar to KDEL

SEQ ID NO: 39708 - protein, 215 aa, Zea mays subsp. mays; identical to SEQ ID NO: 23596
  peptide (1)..(215): Ceres Seq. ID no. 12566398
  misc_feature (1)..(205): Pfam Name: Pfam Description:  ER lumen protein retaining receptor
  misc_feature (1)..(215): NCBI GI NO: 6685428 NR Description: ER lumen protein retaining receptor
  misc_feature (1)..(215): NCBI GI NO: 21592401 NR Description: ER lumen retaining receptor
  misc_feature (1)..(215): NCBI GI NO: 18404390 NR Description: ER lumen retaining receptor
  misc_feature (1)..(215): NCBI GI NO: 9293986 NR Description: ER lumen protein-retaining receptor-like protein
  misc_feature (1)..(215): NCBI GI NO: 18397049 NR Description: ER lumen protein retaining receptor
  misc_feature (1)..(215): NCBI GI NO: 14285310 NR Description: ERD2 protein [Scherffelia dubia]
  misc_feature (1)..(214): NCBI GI NO: 22656361 NR Description: endoplasmic reticulum retention receptor
  misc_feature (1)..(215): NCBI GI NO: 17137442 NR Description: KDEL receptor CG5183-PA [Drosophila melanogaster]
  misc_feature (1)..(215): NCBI GI NO: 17551392 NR Description: Yeast Endoplasmic Reticulum retention Defectiverelated ERD-2
  misc_feature (1)..(202): NCBI GI NO: 34870419 NR Description: similar to KDEL

SEQ ID NO: 39709 - protein, 206 aa, Zea mays subsp. mays; identical to SEQ ID NO: 23597
  peptide (1)..(206): Ceres Seq. ID no. 12566399
  misc_feature (1)..(196): Pfam Name: Pfam Description:  ER lumen protein retaining receptor
  misc_feature (1)..(206): NCBI GI NO: 6685428 NR Description: ER lumen protein retaining receptor
  misc_feature (1)..(206): NCBI GI NO: 21592401 NR Description: ER lumen retaining receptor
  misc_feature (1)..(206): NCBI GI NO: 18404390 NR Description: ER lumen retaining receptor
  misc_feature (1)..(206): NCBI GI NO: 9293986 NR Description: ER lumen protein-retaining receptor-like protein
  misc_feature (1)..(206): NCBI GI NO: 18397049 NR Description: ER lumen protein retaining receptor
  misc_feature (1)..(206): NCBI GI NO: 14285310 NR Description: ERD2 protein [Scherffelia dubia]
  misc_feature (1)..(205): NCBI GI NO: 22656361 NR Description: endoplasmic reticulum retention receptor
  misc_feature (1)..(206): NCBI GI NO: 17137442 NR Description: KDEL receptor CG5183-PA [Drosophila melanogaster]
  misc_feature (1)..(206): NCBI GI NO: 17551392 NR Description: Yeast Endoplasmic Reticulum retention Defectiverelated ERD-2
  misc_feature (1)..(193): NCBI GI NO: 34870419 NR Description: similar to KDEL

SEQ ID NO: 39710 - DNA, 477 bp, Zea mays subsp. mays
  misc_feature (1)..(477): Ceres Seq. ID no. 1682393
aacgaaagcagcaggaagccggcggtgctagggctgtaggcgacccatggctccacagacgaggagagacaggttggcgggggaggcgcggccgagctcgtcggggctaacaccggcgaagccgggggcggtcgaggtgcagcgccgacgggcgggcagcggttggacgagccgtcggatctccatctacgcctcccgagtctacttcctcctcatcatgctccagatcccgctcttcagggtcccttgtagagctggcacatgcacaactcctattcaagtaacatcatctcagttggtctcaaatgatatattcccagcagctgttgtgaaggccatgctctaccctggagctaccgtgagcagcctaactaaaagcaagacatttccgagttggaatgacctgtttgacatgtacaacctgacagaagcaaaaaatgcttcttgcagtagttgatctccagcgtctagagatac

SEQ ID NO: 39711 - protein, 136 aa, Zea mays subsp. mays
  peptide (1)..(136): Ceres Seq. ID no. 1682394
  misc_feature (1)..(133): NCBI GI NO: 34913974 NR Description: B1110C07.25
  misc_feature (39)..(133): NCBI GI NO: 18416514 NR Description: putative protein; protein id: At5g11280
  misc_feature (39)..(133): NCBI GI NO: 17064978 NR Description: putative protein [Arabidopsis thaliana]
  misc_feature (66)..(125): NCBI GI NO: 15220078 NR Description: hypothetical protein; protein id: At1g80200.1
  misc_feature (87)..(133): NCBI GI NO: 8953390 NR Description: putative protein [Arabidopsis thaliana]
MAPQTRRDRLAGEARPSSSGLTPAKPGAVEVQRRRAGSGWTSRRISIYASRVYFLLIMLQIPLFRVPCRAGTCTTPIQVTSSQLVSNDIFPAAVVKAMLYPGATVSSLTKSKTFPSWNDLFDMYNLTEAKNASCSS

SEQ ID NO: 39712 - protein, 79 aa, Zea mays subsp. mays
  peptide (1)..(79): Ceres Seq. ID no. 1682395
  misc_feature (1)..(76): NCBI GI NO: 34913974 NR Description: B1110C07.25
  misc_feature (1)..(76): NCBI GI NO: 18416514 NR Description: putative protein; protein id: At5g11280
  misc_feature (1)..(76): NCBI GI NO: 17064978 NR Description: putative protein [Arabidopsis thaliana]
  misc_feature (9)..(68): NCBI GI NO: 15220078 NR Description: hypothetical protein; protein id: At1g80200.1
  misc_feature (30)..(76): NCBI GI NO: 8953390 NR Description: putative protein [Arabidopsis thaliana]
MLQIPLFRVPCRAGTCTTPIQVTSSQLVSNDIFPAAVVKAMLYPGATVSSLTKSKTFPSWNDLFDMYNLTEAKNASCSS

SEQ ID NO: 39713 - DNA, 697 bp, Zea mays subsp. mays
  misc_feature (1)..(697): Ceres Seq. ID no. 12359244
tttcctaggactctatgctaacttgcgttatcaattgctatgtggagtagaccaatatatggtcaagcgcttcgatgttttgggtgtggcaatcttcttcagcagcagcaagactgatgaatattcagattggtgaggcatcaaggaggacttggcttggcgaggaagctgatccacagtactcagatcgactgttgagagcatacaagagacctgtggaggttgacgcggaccaatcaaggtggtttatatccaaggatgcaattgtatctggccttggtcttctaggtatcaagcagggtggacctgaggcaacattttctaagtctcgtcgaaagagagtcatccgcaaaaaggtcacttcaggttgagtttagtggatttggatagcaatgctggaacaattttgcttctgttccactatgccagagggaggtctacccaaattatggtaaatgagaaaaaggtatcaagtcaaccagcacgtggtctgtcggcgaagggatcaaagggtttgttactgggaagggttagttaaaaggtgccaattactattttataatttaattgcagttatttaaggtaagaaaatatgttgttttcttgtattgctgtgaggcaaatagacacgcttagtggtagttttgtaagattgttaatgtactgactttacatgagaaatggattctgcattttt

SEQ ID NO: 39714 - protein, 98 aa, Zea mays subsp. mays
  peptide (1)..(98): Ceres Seq. ID no. 12359245
  misc_feature (11)..(97): NCBI GI NO: 9759209 NR Description: gb|AAD25674
  misc_feature (11)..(97): NCBI GI NO: 22327037 NR Description: putative protein; protein id: At5g24690
MFWVWQSSSAAARLMNIQIGEASRRTWLGEEADPQYSDRLLRAYKRPVEVDADQSRWFISKDAIVSGLGLLGIKQGGPEATFSKSRRKRVIRKKVTSG

SEQ ID NO: 39715 - protein, 84 aa, Zea mays subsp. mays
  peptide (1)..(84): Ceres Seq. ID no. 12359246
  misc_feature (1)..(83): NCBI GI NO: 9759209 NR Description: gb|AAD25674
  misc_feature (1)..(83): NCBI GI NO: 22327037 NR Description: putative protein; protein id: At5g24690
MNIQIGEASRRTWLGEEADPQYSDRLLRAYKRPVEVDADQSRWFISKDAIVSGLGLLGIKQGGPEATFSKSRRKRVIRKKVTSG

SEQ ID NO: 39716 - DNA, 466 bp, Zea mays subsp. mays
  misc_feature (1)..(466): Ceres Seq. ID no. 1682458
tagatgttccagatgaactccttgttgaaagggtggttggaaggcggcttgatcctgtaacagggaaaatatatcatttgaagtattctccgccagagaatgaagaaatcgcttcaaggcttacacaaagatttgacgatacagaagaaaaggttaagttgaggctggagacttattaccaaaatatcgagtccttgctatcaacatatgagaacattattgtcaaagtgcaaggagatgccacagtggatgctgtctttgctaagatcgacgagctgctgggttctatcctggagaagaaaaatgaaatggtttccagcacatgagcaaggtaaaaatgattgggtgcagtgcagatccgacaagttcatgtaatgcaagtcacctctcatgataggaacttctccaggggaatatatctgaagcacaggacgacacgtacaagtaatgtaagccagtctcacgt

SEQ ID NO: 39717 - protein, 107 aa, Zea mays subsp. mays
  peptide (1)..(107): Ceres Seq. ID no. 1682459
  misc_feature (1)..(107): NCBI GI NO: 1170606 NR Description: ADENYLATE KINASE, CHLOROPLAST
  misc_feature (1)..(106): NCBI GI NO: 15238822 NR Description: putative protein; protein id: At5g47840
  misc_feature (1)..(107): NCBI GI NO: 38175634 NR Description: putative Adenylate kinase, chloroplast
  misc_feature (1)..(100): NCBI GI NO: 22327339 NR Description: adenylate kinase -like protein
  misc_feature (1)..(79): NCBI GI NO: 10176815 NR Description: adenylate kinase-like [Arabidopsis thaliana]
  misc_feature (1)..(93): NCBI GI NO: 7687936 NR Description: possible adenylate kinase [Leishmania major]
  misc_feature (1)..(100): NCBI GI NO: 23097595 NR Description: adenylate kinase [Oceanobacillus iheyensis HTE831]
  misc_feature (1)..(85): NCBI GI NO: 37727511 NR Description: adenylate kinase [Trypanosoma cruzi]
  misc_feature (1)..(94): NCBI GI NO: 19704633 NR Description: Adenylate kinase
  misc_feature (1)..(94): NCBI GI NO: 34763306 NR Description: Adenylate kinase
DVPDELLVERVVGRRLDPVTGKIYHLKYSPPENEEIASRLTQRFDDTEEKVKLRLETYYQNIESLLSTYENIIVKVQGDATVDAVFAKIDELLGSILEKKNEMVSST

SEQ ID NO: 39718 - protein, 55 aa, Zea mays subsp. mays
  peptide (1)..(55): Ceres Seq. ID no. 1682460
MRTLLSKCKEMPQWMLSLLRSTSCWVLSWRRKMKWFPAHEQGKNDWVQCRSDKFM

SEQ ID NO: 39719 - DNA, 1448 bp, Zea mays subsp. mays
  misc_feature (1)..(1448): Ceres Seq. ID no. 12390259
cgcaattaaccctcactaaagggaacaaaagctggagctccaccgcggtggcggccgctctagaactagtggatcccccgggctgcaggaattcgcacgagaccattacctagaacatcctaatcgaaaaacatacaggagttaattgttgggggatgccacactagctcctcacacatggacgatgagtggaggccggtgatggccatgctcgtcttcaacctcatctctgctgtgatgacggcgctggtgaagaaggcgctccagcaagggctcaacgccctggtcctcatcactcttcgccagttggtggccactctcttcctagcaccaatagcctacttcaaagaacggaacacaaggcctaagctcacgctagagatctttgtgtaccacttcttcagtgcagcgcttggtgcttccctgtcgcagtacagcttcttctacgggctcaagttgacaactgcgacgttcgccataacatttgccaacatggctcctgtcctcaccttcctcattgccatagctctacgggtggagtcgctcaacatgaagagcaaatcagggtctgcaaagatggtggggacgctcatgtcgctcggtggagtgctgctgctgagcctctacaagggcatggccgtgacacaccacagcagcggcactcctccgccctctcaagtacaactaggcaacgacggcgacaggaaggtctggatgctggggactgtagcgttactggccaactgcctcgtcttctccctgtggttgctgctgcaaagcaggctgacgaacaagtacccggcgctctactccagcaccgccttcatgttcttcatcagcacgctgcagacaggatcgctgacggtgacggtcgagtggcaccacgcgtcggtgtggattgtcacaaagaagctggagatggtcacgatattgtattcgggaatcatggcgtctgcagcaggcttcctgataatgacctggtgcgtccacaagaggggtccagttttcactgcagccttcatccccatcgtccagatcatggtggccatcatcgatttcttcttcctccatgagcagctataccttggcagtgttctgggatccgcgctgatgatatttggactttaccttctgttgtggggaaagaagaaggatgcaatggcggcatgctctgcaggtacgaccaaacatgacgaagaggccagcatcaacaagtagcttagtgaaataatcagcagtcagcatcatcgagtggtggcaaacacagacatgtactagtggcggcatctgcaattgtttgaagaaaagaaaatctacgatcgatccagaccccttttgccatgcatgcatgagatgtgtttccagcaacactaattaacagaactgccgatcgatgatatcacgagtttattgttcataaccacttgtcaataaaaacttttgctttt

SEQ ID NO: 39720 - protein, 346 aa, Zea mays subsp. mays
  peptide (1)..(346): Ceres Seq. ID no. 12390260
  misc_feature (16)..(149): Pfam Name: Pfam Description:  Integral membrane protein DUF6
  misc_feature (180)..(341): NCBI GI NO: 34897814 NR Description: P0514G12.27
  misc_feature (3)..(157): NCBI GI NO: 34897814 NR Description: P0514G12.27
  misc_feature (3)..(329): NCBI GI NO: 34897816 NR Description: P0514G12.28
  misc_feature (7)..(341): NCBI GI NO: 6815050 NR Description: ESTs AU078644
  misc_feature (7)..(304): NCBI GI NO: 34897774 NR Description: ESTs AU078644
  misc_feature (5)..(339): NCBI GI NO: 30689857 NR Description: nodulin N21 family protein [Arabidopsis thaliana]
  misc_feature (1)..(331): NCBI GI NO: 15234182 NR Description: hypothetical protein; protein id: At4g01440
  misc_feature (28)..(333): NCBI GI NO: 32489301 NR Description: OSJNBa0028I23.24
  misc_feature (1)..(325): NCBI GI NO: 15234185 NR Description: unknown protein; protein id: At4g01450.1
  misc_feature (3)..(346): NCBI GI NO: 18378792 NR Description: expressed protein; protein id: At1g01070
MDDEWRPVMAMLVFNLISAVMTALVKKALQQGLNALVLITLRQLVATLFLAPIAYFKERNTRPKLTLEIFVYHFFSAALGASLSQYSFFYGLKLTTATFAITFANMAPVLTFLIAIALRVESLNMKSKSGSAKMVGTLMSLGGVLLLSLYKGMAVTHHSSGTPPPSQVQLGNDGDRKVWMLGTVALLANCLVFSLWLLLQSRLTNKYPALYSSTAFMFFISTLQTGSLTVTVEWHHASVWIVTKKLEMVTILYSGIMASAAGFLIMTWCVHKRGPVFTAAFIPIVQIMVAIIDFFFLHEQLYLGSVLGSALMIFGLYLLLWGKKKDAMAACSAGTTKHDEEASINK

SEQ ID NO: 39721 - protein, 338 aa, Zea mays subsp. mays
  peptide (1)..(338): Ceres Seq. ID no. 12390261
  misc_feature (8)..(141): Pfam Name: Pfam Description:  Integral membrane protein DUF6
  misc_feature (172)..(333): NCBI GI NO: 34897814 NR Description: P0514G12.27
  misc_feature (1)..(149): NCBI GI NO: 34897814 NR Description: P0514G12.27
  misc_feature (1)..(321): NCBI GI NO: 34897816 NR Description: P0514G12.28
  misc_feature (1)..(333): NCBI GI NO: 6815050 NR Description: ESTs AU078644
  misc_feature (1)..(296): NCBI GI NO: 34897774 NR Description: ESTs AU078644
  misc_feature (1)..(331): NCBI GI NO: 30689857 NR Description: nodulin N21 family protein [Arabidopsis thaliana]
  misc_feature (1)..(323): NCBI GI NO: 15234182 NR Description: hypothetical protein; protein id: At4g01440
  misc_feature (20)..(325): NCBI GI NO: 32489301 NR Description: OSJNBa0028I23.24
  misc_feature (1)..(317): NCBI GI NO: 15234185 NR Description: unknown protein; protein id: At4g01450.1
  misc_feature (1)..(338): NCBI GI NO: 18378792 NR Description: expressed protein; protein id: At1g01070
MAMLVFNLISAVMTALVKKALQQGLNALVLITLRQLVATLFLAPIAYFKERNTRPKLTLEIFVYHFFSAALGASLSQYSFFYGLKLTTATFAITFANMAPVLTFLIAIALRVESLNMKSKSGSAKMVGTLMSLGGVLLLSLYKGMAVTHHSSGTPPPSQVQLGNDGDRKVWMLGTVALLANCLVFSLWLLLQSRLTNKYPALYSSTAFMFFISTLQTGSLTVTVEWHHASVWIVTKKLEMVTILYSGIMASAAGFLIMTWCVHKRGPVFTAAFIPIVQIMVAIIDFFFLHEQLYLGSVLGSALMIFGLYLLLWGKKKDAMAACSAGTTKHDEEASINK

SEQ ID NO: 39722 - protein, 336 aa, Zea mays subsp. mays
  peptide (1)..(336): Ceres Seq. ID no. 12390262
  misc_feature (6)..(139): Pfam Name: Pfam Description:  Integral membrane protein DUF6
  misc_feature (170)..(331): NCBI GI NO: 34897814 NR Description: P0514G12.27
  misc_feature (1)..(147): NCBI GI NO: 34897814 NR Description: P0514G12.27
  misc_feature (1)..(319): NCBI GI NO: 34897816 NR Description: P0514G12.28
  misc_feature (1)..(331): NCBI GI NO: 6815050 NR Description: ESTs AU078644
  misc_feature (1)..(294): NCBI GI NO: 34897774 NR Description: ESTs AU078644
  misc_feature (1)..(329): NCBI GI NO: 30689857 NR Description: nodulin N21 family protein [Arabidopsis thaliana]
  misc_feature (1)..(321): NCBI GI NO: 15234182 NR Description: hypothetical protein; protein id: At4g01440
  misc_feature (18)..(323): NCBI GI NO: 32489301 NR Description: OSJNBa0028I23.24
  misc_feature (1)..(315): NCBI GI NO: 15234185 NR Description: unknown protein; protein id: At4g01450.1
  misc_feature (1)..(336): NCBI GI NO: 18378792 NR Description: expressed protein; protein id: At1g01070
MLVFNLISAVMTALVKKALQQGLNALVLITLRQLVATLFLAPIAYFKERNTRPKLTLEIFVYHFFSAALGASLSQYSFFYGLKLTTATFAITFANMAPVLTFLIAIALRVESLNMKSKSGSAKMVGTLMSLGGVLLLSLYKGMAVTHHSSGTPPPSQVQLGNDGDRKVWMLGTVALLANCLVFSLWLLLQSRLTNKYPALYSSTAFMFFISTLQTGSLTVTVEWHHASVWIVTKKLEMVTILYSGIMASAAGFLIMTWCVHKRGPVFTAAFIPIVQIMVAIIDFFFLHEQLYLGSVLGSALMIFGLYLLLWGKKKDAMAACSAGTTKHDEEASINK

SEQ ID NO: 39723 - DNA, 1252 bp, Zea mays subsp. mays
  misc_feature (1)..(1252): Ceres Seq. ID no. 12383283
gcacgagaccattacctagaacatcctaatcaaaaaaatctggttcgggctcctggatcggacccgaaaaactggtgagatttgacctacagcggagatggccaccggcgacctgcgcagcctcgccaccgtcgcggccgcggtgatcgcgtgcatgggctacgcccgcttcgccgcgcggcgactccgcccgggcctgtcccgccttgcagcgttcctcccggtgctcgccgtcttgcctttcctcccgctcgccttccgtgcgctccacccgcgcggcatctccggcttcttcctcgcctgggccgccgaattcaaactcctgctcctcgcatgcggccagcgcccgctcgatccgagcctcccgctgccctccttcaccgccatcgccaccttccccgtcacactacgggatcccaagagctccgcctcgaggccgggcctggggctcgtggagtccgcctccatggccgcgctgctcgcggccatcgtgtcgctgtactggtacgaggagcggatgaacggttacgtcctgctcacgctctactccgtgcacgtgtacctcgcgctcgagctcgtcctggcggcggccgcggtggcgtcgcgcgcgctgatgggcctggaactggagccccagttcgaccggccctacctctcgtcctcgctgcgggacttctggggccggaggtggaacctctccgttccggcgctgctccgccagtgcgtgttccgccccgtgcgcgcgcgcctcggcgccgccgcgggtgtgctagctgcgttcgtcgtctcgggcctcatgcacgaggccatgttctcctacctcacgctgctgcggccgacgggggaggcggccgcgttcttcacgctgcacggggcgtgcgcggtggcggaggggtggtgggccgcgcacgaggggtggccgcggccgccgcgcgccatggccacgccgctgacactggcgttcgtgggcgtgacggccttctggctcttctttcctccgctcacaaggcccggcgcggacaagcaggccatcgcggagtgcgaggccatggtcgcttttctgcgggacaccgcagcttgggcggtcgactccgcctggtcagtcttgtcaagctggtcgtaaattgtggtccgccgtccgcaacaggcgtgcgctgcgcctgcgcctgcgcctgcgcgtgccgtgtgctttgtcgccgtggcatctgtttgcacttttgttttgggatggtgataatttcagaaatattct

SEQ ID NO: 39724 - protein, 341 aa, Zea mays subsp. mays
  peptide (1)..(341): Ceres Seq. ID no. 12383284
  misc_feature (33)..(304): Pfam Name: Pfam Description:  MBOAT family
  misc_feature (1)..(338): NCBI GI NO: 38345254 NR Description: OSJNBb0011N17.15
  misc_feature (1)..(341): NCBI GI NO: 38345253 NR Description: OSJNBb0011N17.14
  misc_feature (20)..(339): NCBI GI NO: 28812087 NR Description: putative wax synthase protein
  misc_feature (8)..(324): NCBI GI NO: 38347115 NR Description: OSJNBa0009K15.12
  misc_feature (1)..(324): NCBI GI NO: 27728716 NR Description: wax synthase isoform 2 [Vitis vinifera]
  misc_feature (1)..(324): NCBI GI NO: 27728714 NR Description: wax synthase isoform 1 [Vitis vinifera]
  misc_feature (1)..(322): NCBI GI NO: 34911838 NR Description: wax synthase-like protein
  misc_feature (16)..(321): NCBI GI NO: 15231093 NR Description: wax synthase-like protein; protein id: At3g51970.1
  misc_feature (5)..(323): NCBI GI NO: 15240496 NR Description: putative protein; protein id: At5g55340
  misc_feature (5)..(323): NCBI GI NO: 15240497 NR Description: wax synthase-like protein; protein id: At5g55350.1
MATGDLRSLATVAAAVIACMGYARFAARRLRPGLSRLAAFLPVLAVLPFLPLAFRALHPRGISGFFLAWAAEFKLLLLACGQRPLDPSLPLPSFTAIATFPVTLRDPKSSASRPGLGLVESASMAALLAAIVSLYWYEERMNGYVLLTLYSVHVYLALELVLAAAAVASRALMGLELEPQFDRPYLSSSLRDFWGRRWNLSVPALLRQCVFRPVRARLGAAAGVLAAFVVSGLMHEAMFSYLTLLRPTGEAAAFFTLHGACAVAEGWWAAHEGWPRPPRAMATPLTLAFVGVTAFWLFFPPLTRPGADKQAIAECEAMVAFLRDTAAWAVDSAWSVLSSWS

SEQ ID NO: 39725 - protein, 322 aa, Zea mays subsp. mays
  peptide (1)..(322): Ceres Seq. ID no. 12383285
  misc_feature (14)..(285): Pfam Name: Pfam Description:  MBOAT family
  misc_feature (1)..(319): NCBI GI NO: 38345254 NR Description: OSJNBb0011N17.15
  misc_feature (1)..(322): NCBI GI NO: 38345253 NR Description: OSJNBb0011N17.14
  misc_feature (1)..(320): NCBI GI NO: 28812087 NR Description: putative wax synthase protein
  misc_feature (1)..(305): NCBI GI NO: 38347115 NR Description: OSJNBa0009K15.12
  misc_feature (1)..(305): NCBI GI NO: 27728716 NR Description: wax synthase isoform 2 [Vitis vinifera]
  misc_feature (1)..(305): NCBI GI NO: 27728714 NR Description: wax synthase isoform 1 [Vitis vinifera]
  misc_feature (1)..(303): NCBI GI NO: 34911838 NR Description: wax synthase-like protein
  misc_feature (1)..(302): NCBI GI NO: 15231093 NR Description: wax synthase-like protein; protein id: At3g51970.1
  misc_feature (1)..(304): NCBI GI NO: 15240496 NR Description: putative protein; protein id: At5g55340
  misc_feature (1)..(304): NCBI GI NO: 15240497 NR Description: wax synthase-like protein; protein id: At5g55350.1
MGYARFAARRLRPGLSRLAAFLPVLAVLPFLPLAFRALHPRGISGFFLAWAAEFKLLLLACGQRPLDPSLPLPSFTAIATFPVTLRDPKSSASRPGLGLVESASMAALLAAIVSLYWYEERMNGYVLLTLYSVHVYLALELVLAAAAVASRALMGLELEPQFDRPYLSSSLRDFWGRRWNLSVPALLRQCVFRPVRARLGAAAGVLAAFVVSGLMHEAMFSYLTLLRPTGEAAAFFTLHGACAVAEGWWAAHEGWPRPPRAMATPLTLAFVGVTAFWLFFPPLTRPGADKQAIAECEAMVAFLRDTAAWAVDSAWSVLSSWS

SEQ ID NO: 39726 - protein, 306 aa, Zea mays subsp. mays
  peptide (1)..(306): Ceres Seq. ID no. 12383286
MRPAPARSEPPAALLHRHRHLPRHTTGSQELRLEAGPGARGVRLHGRAARGHRVAVLVRGADERLRPAHALLRARVPRARARPGGGRGGVARADGPGTGAPVRPALPLVLAAGLLGPEVEPLRSGAAPPVRVPPRARAPRRRRGCASCVRRLGPHARGHVLLPHAAAADGGGGRVLHAARGVRGGGGVVGRARGVAAAAARHGHAADTGVRGRDGLLALLSSAHKARRGQAGHRGVRGHGRFSAGHRSLGGRLRLVSLVKLVVNCGPPSATGVRCACACACACRVLCRRGICLHFCFGMVIISEIF

SEQ ID NO: 39727 - DNA, 696 bp, Zea mays subsp. mays
  misc_feature (1)..(696): Ceres Seq. ID no. 12377779
  misc_feature (690)..(690): n is a, c, t, g, unknown, or other
aaacactgtcgccgtccttctgtcgacgtacagcagatggagaactgcgaggtactcttcccgggaggcagcagcggggccaacgcgttcaccaggccagagcaggagaggaagcgcgggcagccatggacggaggaggagcacaagttgtttctcttgggcctgaagaaatatggccggggggattggaggaacatatcgcgcaattttgttcagaccaggacgcctactcaggtggtcagccatgcgcagaagtacttcatgaggcacaactccggcggcaaggacaagagaagatccagcatccacgacatcaccacagttaagctgagcgacgaccaggaccagcctccgtcctcgccatcccagtcctctctgatcactgaccagttcaacgcattagctctgacatccggcgctgcgtattcgccctccaattaacctttgcggctttgccggactactgggatatgtatatgccaatctttggaacggggtttgcaagatcaacgcctgcagtgtggcccgttcaattggatggaagctagaacattctgttttttttgggtgcaattcagtctgcagcaccatgaatctatcagatttctatctacttgtatagtacagactggagagaccgggagtgttaacaagtttgttgtatcatcttgtgtggtgtaataaacctgnaatttg

SEQ ID NO: 39728 - protein, 146 aa, Zea mays subsp. mays
  peptide (1)..(146): Ceres Seq. ID no. 12377780
  misc_feature (40)..(87): Pfam Name: Pfam Description:  Myb-like DNA-binding domain
  misc_feature (20)..(146): NCBI GI NO: 34895714 NR Description: putative myb-related transcription activator
  misc_feature (23)..(124): NCBI GI NO: 18874263 NR Description: MYB-like transcription factor DIVARICATA
  misc_feature (31)..(138): NCBI GI NO: 18874265 NR Description: MYB-like transcription factor DVL1
  misc_feature (33)..(145): NCBI GI NO: 34908386 NR Description: P0529E05.19
  misc_feature (21)..(125): NCBI GI NO: 12005328 NR Description: unknown [Hevea brasiliensis]
  misc_feature (33)..(134): NCBI GI NO: 15237776 NR Description: I-box binding factor - like protein
  misc_feature (22)..(115): NCBI GI NO: 7446171 NR Description: probable MYB family transcription factor
  misc_feature (22)..(115): NCBI GI NO: 30687381 NR Description: MYB family transcription factor -related
  misc_feature (22)..(136): NCBI GI NO: 34914460 NR Description: putative syringolide-induced protein 1-3-1B
  misc_feature (33)..(112): NCBI GI NO: 15240915 NR Description: myb family transcription factor
KHCRRPSVDVQQMENCEVLFPGGSSGANAFTRPEQERKRGQPWTEEEHKLFLLGLKKYGRGDWRNISRNFVQTRTPTQVVSHAQKYFMRHNSGGKDKRRSSIHDITTVKLSDDQDQPPSSPSQSSLITDQFNALALTSGAAYSPSN

SEQ ID NO: 39729 - protein, 134 aa, Zea mays subsp. mays
  peptide (1)..(134): Ceres Seq. ID no. 12377781
  misc_feature (28)..(75): Pfam Name: Pfam Description:  Myb-like DNA-binding domain
  misc_feature (8)..(134): NCBI GI NO: 34895714 NR Description: putative myb-related transcription activator
  misc_feature (11)..(112): NCBI GI NO: 18874263 NR Description: MYB-like transcription factor DIVARICATA
  misc_feature (19)..(126): NCBI GI NO: 18874265 NR Description: MYB-like transcription factor DVL1
  misc_feature (21)..(133): NCBI GI NO: 34908386 NR Description: P0529E05.19
  misc_feature (9)..(113): NCBI GI NO: 12005328 NR Description: unknown [Hevea brasiliensis]
  misc_feature (21)..(122): NCBI GI NO: 15237776 NR Description: I-box binding factor - like protein
  misc_feature (10)..(103): NCBI GI NO: 7446171 NR Description: probable MYB family transcription factor
  misc_feature (10)..(103): NCBI GI NO: 30687381 NR Description: MYB family transcription factor -related
  misc_feature (10)..(124): NCBI GI NO: 34914460 NR Description: putative syringolide-induced protein 1-3-1B
  misc_feature (21)..(100): NCBI GI NO: 15240915 NR Description: myb family transcription factor
MENCEVLFPGGSSGANAFTRPEQERKRGQPWTEEEHKLFLLGLKKYGRGDWRNISRNFVQTRTPTQVVSHAQKYFMRHNSGGKDKRRSSIHDITTVKLSDDQDQPPSSPSQSSLITDQFNALALTSGAAYSPSN

SEQ ID NO: 39730 - protein, 107 aa, Zea mays subsp. mays
  peptide (1)..(107): Ceres Seq. ID no. 12377782
TLSPSFCRRTADGELRGTLPGRQQRGQRVHQARAGEEARAAMDGGGAQVVSLGPEEIWPGGLEEHIAQFCSDQDAYSGGQPCAEVLHEAQLRRQGQEKIQHPRHHHS

SEQ ID NO: 39731 - DNA, 1079 bp, Zea mays subsp. mays
  misc_feature (1)..(1079): Ceres Seq. ID no. 14305350
ctatttgcggaaaggaacttctgttagtgctggccaaacatcaagttcatcaaatggaacaactgcaggagaaaggcctctcctacgtgagaaattgtcaaagggaaaggatggctttgttgctgctgatttcacagctacagaagctcattgtgctgtaccctcgactccaatactttggttccagcaggcagatgagtgcatgcacctatgcatttatcagcacaaaagtctcactatcttactgctggttcctgcttcctcagtgataaatggagaagagggcattactcatgtgaagaaggcgatccttgaaaatgcatcacagaagattgtcactgttgagcagaaattgacacggggatggggaggagaaaatgcgtatcatgttagtggatatcgttatttgcttgttgatccggagagaagagtatcaagagcctccccacctgggaaagtcaccaccctagcaaaggattctctacttgccctcaacatgctaagacaagaagtagatctagagaagtcaagatacaagagaggtgacccttgtcgtgataaggatttcgaagtatgtatcagaacaaaaaacaatgcgtgggttattgctaaaatcagtcaaggaagggagctttacatggctctagagaagggtggtgaaacgcttctatatgcatccacagctgtagagaaattcagcaacaggtactgtgagggagtattctctacagattagaagcaccagagggagatcttagcttttccatacattacctattatgtacatcctgttttttccccagctgtatcgttgccccccattgttgagagactcggaccactctttgcgaagggaataaggagttcgtatcagttgtacagctgctctgctaccgtgtgctatctgcaaaagaatagcctagtctgggaataacgcagagcgggatagagtttgtttgttcacgggtcttatgtccttccttaacgcagagcattgtgcgtgttttcattttgctgtaacagccggcgatttacctgcagactgggaaagtaacttagcgtttcatttggtattctgc

SEQ ID NO: 39732 - protein, 244 aa, Zea mays subsp. mays
  peptide (1)..(244): Ceres Seq. ID no. 14305351
  misc_feature (1)..(244): NCBI GI NO: 38175489 NR Description: putative myrosinase precursor
  misc_feature (8)..(244): NCBI GI NO: 15220866 NR Description: myrosinase precursor -related
  misc_feature (8)..(244): NCBI GI NO: 25372816 NR Description: F23A5.27 [imported] - Arabidopsis thaliana
  misc_feature (16)..(244): NCBI GI NO: 18394314 NR Description: expressed protein [Arabidopsis thaliana]
  misc_feature (16)..(244): NCBI GI NO: 21618002 NR Description: unknown [Arabidopsis thaliana]
  misc_feature (16)..(244): NCBI GI NO: 30684673 NR Description: expressed protein [Arabidopsis thaliana]
  misc_feature (8)..(235): NCBI GI NO: 14517360 NR Description: At1g80910/F23A5_21 [Arabidopsis thaliana]
  misc_feature (1)..(244): NCBI GI NO: 18266049 NR Description: myrosinase precursor [Brassica oleracea]
YLRKGTSVSAGQTSSSSNGTTAGERPLLREKLSKGKDGFVAADFTATEAHCAVPSTPILWFQQADECMHLCIYQHKSLTILLLVPASSVINGEEGITHVKKAILENASQKIVTVEQKLTRGWGGENAYHVSGYRYLLVDPERRVSRASPPGKVTTLAKDSLLALNMLRQEVDLEKSRYKRGDPCRDKDFEVCIRTKNNAWVIAKISQGRELYMALEKGGETLLYASTAVEKFSNRYCEGVFSTD

SEQ ID NO: 39733 - protein, 177 aa, Zea mays subsp. mays
  peptide (1)..(177): Ceres Seq. ID no. 14305352
  misc_feature (1)..(177): NCBI GI NO: 38175489 NR Description: putative myrosinase precursor
  misc_feature (1)..(177): NCBI GI NO: 15220866 NR Description: myrosinase precursor -related
  misc_feature (1)..(177): NCBI GI NO: 25372816 NR Description: F23A5.27 [imported] - Arabidopsis thaliana
  misc_feature (1)..(177): NCBI GI NO: 18394314 NR Description: expressed protein [Arabidopsis thaliana]
  misc_feature (1)..(177): NCBI GI NO: 21618002 NR Description: unknown [Arabidopsis thaliana]
  misc_feature (1)..(177): NCBI GI NO: 30684673 NR Description: expressed protein [Arabidopsis thaliana]
  misc_feature (1)..(168): NCBI GI NO: 14517360 NR Description: At1g80910/F23A5_21 [Arabidopsis thaliana]
  misc_feature (1)..(177): NCBI GI NO: 18266049 NR Description: myrosinase precursor [Brassica oleracea]
MHLCIYQHKSLTILLLVPASSVINGEEGITHVKKAILENASQKIVTVEQKLTRGWGGENAYHVSGYRYLLVDPERRVSRASPPGKVTTLAKDSLLALNMLRQEVDLEKSRYKRGDPCRDKDFEVCIRTKNNAWVIAKISQGRELYMALEKGGETLLYASTAVEKFSNRYCEGVFSTD

SEQ ID NO: 39734 - DNA, 1208 bp, Zea mays subsp. mays
  misc_feature (1)..(1208): Ceres Seq. ID no. 12416178
tatgctacgccaagcccgcaattaaccctcactaaagggaacaaaagctggagctccaccgcggtggcggccgctctagaactagtggatcccccgggctgcaggaattcgcacgagaccattacctagaacatcctaatcgaaaagttgcgttccagggcgagctatcgcgcagcaggcacagcgccctacaacgcccggccgtgcaaactaaccttcggatcagatggagacgccggcggcggactcctccggcggcgaccgctacaggtcccacctggctggcgagggcgagaagcacaccgtgtggcggcacggcgcgccgccctcgtacgacgccgtgaacgcgctcttcgaggccgagcgcacgcaggagtggccggcggggtcgctggaggagatcgtgcagaacgcgatcaagacgtgggagatggagctgtcgcacaaggcgcggctgtcggacttcaagtccgtgagccccggcaggttcaggctgtccgtgaacggcggtcgggcccggagcggggaggagacgctggccgtgggcagctacaacgcgctgctggacagcccgctcctggcgcgcgcgggcgcgtacgacgcctccgccgagacgttccggtcctcgcacgacctgttccgcgccgcgttcccgcgcggcttcgcctgggaggtgctcaaggtctactccggcccgccgctgctcgccttcaagttccggcactggggccacaaggaggggccctacaagggccacgccgccaccggcgacaaggtcgagttcttcggcgtcgccgtgcttaaggtggacgatgagctgcgagcggaagacgtggaggtgtactacgacccgggcgagcttttgggaggccttctcaagggacccaaggtggcttcctccgaggaggaccgccgcgaggccgctgccgtgtcggcgtcaggtgctgtcccgccgccgctagcttgcccctttctcaaccccgggaagccacagtgatcaaccagcaccccccatttatgtagcggtttggtgaataagtgaaagcttaaaatgacggtgttcctggtcgtccatggacatcactgagggtacttgtaccccattgattaattgatgtttcatgaccagaagaaattgttcgcgtaataattgtgtgatattccttcacccaaaaataaataaaaataaagcaacgcgtaattgttcc

SEQ ID NO: 39735 - protein, 256 aa, Zea mays subsp. mays
  peptide (1)..(256): Ceres Seq. ID no. 12416179
  misc_feature (1)..(254): NCBI GI NO: 34910862 NR Description: putative pathogenesis related protein
  misc_feature (5)..(254): NCBI GI NO: 34910864 NR Description: putative pathogenesis related protein
  misc_feature (12)..(226): NCBI GI NO: 18412106 NR Description: expressed protein; protein id: At1g78780
  misc_feature (21)..(226): NCBI GI NO: 25372796 NR Description: hypothetical protein F9K20.18
  misc_feature (8)..(226): NCBI GI NO: 34904652 NR Description: putative pathogenesis related protein
  misc_feature (5)..(227): NCBI GI NO: 34904656 NR Description: putative pathogenesis related protein
  misc_feature (5)..(225): NCBI GI NO: 1346809 NR Description: Pathogen-related protein
  misc_feature (69)..(226): NCBI GI NO: 30699354 NR Description: expressed protein [Arabidopsis thaliana]
  misc_feature (28)..(226): NCBI GI NO: 17227713 NR Description: similar to pathogenesis related protein
  misc_feature (25)..(231): NCBI GI NO: 17232111 NR Description: similar to pathogenesis related protein
METPAADSSGGDRYRSHLAGEGEKHTVWRHGAPPSYDAVNALFEAERTQEWPAGSLEEIVQNAIKTWEMELSHKARLSDFKSVSPGRFRLSVNGGRARSGEETLAVGSYNALLDSPLLARAGAYDASAETFRSSHDLFRAAFPRGFAWEVLKVYSGPPLLAFKFRHWGHKEGPYKGHAATGDKVEFFGVAVLKVDDELRAEDVEVYYDPGELLGGLLKGPKVASSEEDRREAAAVSASGAVPPPLACPFLNPGKPQ

SEQ ID NO: 39736 - protein, 188 aa, Zea mays subsp. mays
  peptide (1)..(188): Ceres Seq. ID no. 12416180
  misc_feature (1)..(186): NCBI GI NO: 34910862 NR Description: putative pathogenesis related protein
  misc_feature (1)..(186): NCBI GI NO: 34910864 NR Description: putative pathogenesis related protein
  misc_feature (1)..(158): NCBI GI NO: 18412106 NR Description: expressed protein; protein id: At1g78780
  misc_feature (1)..(158): NCBI GI NO: 25372796 NR Description: hypothetical protein F9K20.18
  misc_feature (1)..(158): NCBI GI NO: 34904652 NR Description: putative pathogenesis related protein
  misc_feature (1)..(159): NCBI GI NO: 34904656 NR Description: putative pathogenesis related protein
  misc_feature (1)..(157): NCBI GI NO: 1346809 NR Description: Pathogen-related protein
  misc_feature (1)..(158): NCBI GI NO: 30699354 NR Description: expressed protein [Arabidopsis thaliana]
  misc_feature (1)..(158): NCBI GI NO: 17227713 NR Description: similar to pathogenesis related protein
  misc_feature (1)..(163): NCBI GI NO: 17232111 NR Description: similar to pathogenesis related protein
MELSHKARLSDFKSVSPGRFRLSVNGGRARSGEETLAVGSYNALLDSPLLARAGAYDASAETFRSSHDLFRAAFPRGFAWEVLKVYSGPPLLAFKFRHWGHKEGPYKGHAATGDKVEFFGVAVLKVDDELRAEDVEVYYDPGELLGGLLKGPKVASSEEDRREAAAVSASGAVPPPLACPFLNPGKPQ

SEQ ID NO: 39737 - DNA, 738 bp, Zea mays subsp. mays
  misc_feature (1)..(738): Ceres Seq. ID no. 12369342
catggaagttgtcgattcctccgtcgccatctggcgctccgacgagtccgggatctggagcgtcctatacgtgctcgatgtcctctggagcctgctgaccggccgcctggtgcgagagaaggtggacccggccgtgcaaagcgccgtcgacagtcagatgaacgccgcggactcgcaggacatggcgccgacactggcggacatgttcgagacgggcgccgccgacgccaagggcatgccggccgccgccgtcgcggcgctccccatcatggccttcaccgagcacaccgtcgccgacggctccggggagcccatcggctgctccgtctgccttcaggacttcgaggcaggcgagacggcgcggagcttgccggagtgcgggcacacgttccacctgccgtgcatcgacgtctggctgctccggccacgcctcgtgcccactgtgtcgtcgcgcggtctaagccggttcgcacacttttcgttaggatgtctttgggcaaccgtgagccgatgcgcgtgcacacgtgtcccagaccaggagcacagtatagtagggtagtaggagtgcaggacacctggttctttcttgcataccttgattatttttttccttcttttttctacgtcttgagcacgcatgtacagatacagtacgtggctcacattgtctcacacacactgtggatgtaaatatgtatagggtaaatgttgtaaacaatgtaatatacttgtacattg

SEQ ID NO: 39738 - protein, 229 aa, Zea mays subsp. mays
  peptide (1)..(229): Ceres Seq. ID no. 12369343
HGSCRFLRRHLALRRVRDLERPIRARCPLEPADRPPGAREGGPGRAKRRRQSDERRGLAGHGADTGGHVRDGRRRRQGHAGRRRRGAPHHGLHRAHRRRRLRGAHRLLRLPSGLRGRRDGAELAGVRAHVPPAVHRRLAAPATPRAHCVVARSKPVRTLFVRMSLGNREPMRVHTCPRPGAQYSRVVGVQDTWFFLAYLDYFFPSFFYVLSTHVQIQYVAHIVSHTLWM

SEQ ID NO: 39739 - protein, 185 aa, Zea mays subsp. mays
  peptide (1)..(185): Ceres Seq. ID no. 12369344
  misc_feature (107)..(141): Pfam Name: RING finger Pfam Description: Zinc finger, C3HC4 type
  misc_feature (1)..(141): NCBI GI NO: 18855037 NR Description: putative zinc finger protein [Oryza sativa]
  misc_feature (1)..(141): NCBI GI NO: 37536572 NR Description: hypothetical protein
  misc_feature (1)..(185): NCBI GI NO: 7485279 NR Description: hypothetical protein A_TM017A05
  misc_feature (1)..(185): NCBI GI NO: 25411815 NR Description: hypothetical protein At2g17730
  misc_feature (1)..(141): NCBI GI NO: 26452210 NR Description: unknown protein [Arabidopsis thaliana]
  misc_feature (1)..(141): NCBI GI NO: 30680091 NR Description: expressed protein [Arabidopsis thaliana]
  misc_feature (1)..(146): NCBI GI NO: 15239242 NR Description: putative protein; protein id: At5g66070.1
  misc_feature (1)..(141): NCBI GI NO: 26451101 NR Description: unknown protein [Arabidopsis thaliana]
  misc_feature (1)..(141): NCBI GI NO: 27524902 NR Description: NEP1-interacting protein [Arabidopsis thaliana]
  misc_feature (1)..(146): NCBI GI NO: 33146606 NR Description: putative NEP1-interacting protein 2
MEVVDSSVAIWRSDESGIWSVLYVLDVLWSLLTGRLVREKVDPAVQSAVDSQMNAADSQDMAPTLADMFETGAADAKGMPAAAVAALPIMAFTEHTVADGSGEPIGCSVCLQDFEAGETARSLPECGHTFHLPCIDVWLLRPRLVPTVSSRGLSRFAHFSLGCLWATVSRCACTRVPDQEHSIVG

SEQ ID NO: 39740 - protein, 133 aa, Zea mays subsp. mays
  peptide (1)..(133): Ceres Seq. ID no. 12369345
  misc_feature (55)..(89): Pfam Name: RING finger Pfam Description: Zinc finger, C3HC4 type
  misc_feature (1)..(89): NCBI GI NO: 18855037 NR Description: putative zinc finger protein [Oryza sativa]
  misc_feature (1)..(89): NCBI GI NO: 37536572 NR Description: hypothetical protein
  misc_feature (1)..(133): NCBI GI NO: 7485279 NR Description: hypothetical protein A_TM017A05
  misc_feature (1)..(133): NCBI GI NO: 25411815 NR Description: hypothetical protein At2g17730
  misc_feature (1)..(89): NCBI GI NO: 26452210 NR Description: unknown protein [Arabidopsis thaliana]
  misc_feature (1)..(89): NCBI GI NO: 30680091 NR Description: expressed protein [Arabidopsis thaliana]
  misc_feature (1)..(94): NCBI GI NO: 15239242 NR Description: putative protein; protein id: At5g66070.1
  misc_feature (1)..(89): NCBI GI NO: 26451101 NR Description: unknown protein [Arabidopsis thaliana]
  misc_feature (1)..(89): NCBI GI NO: 27524902 NR Description: NEP1-interacting protein [Arabidopsis thaliana]
  misc_feature (1)..(94): NCBI GI NO: 33146606 NR Description: putative NEP1-interacting protein 2
MNAADSQDMAPTLADMFETGAADAKGMPAAAVAALPIMAFTEHTVADGSGEPIGCSVCLQDFEAGETARSLPECGHTFHLPCIDVWLLRPRLVPTVSSRGLSRFAHFSLGCLWATVSRCACTRVPDQEHSIVG

SEQ ID NO: 39741 - DNA, 711 bp, Zea mays subsp. mays
  misc_feature (1)..(711): Ceres Seq. ID no. 12416722
gtctggatggcccaggaacggcgcaccgtggagtccctctctgatttttggcgagcagaacatacctgagacgacaggtagaagacgactgactgcctcgagcagcagagatcagggaggccgagggcgggatgacgatccggttcgtgctgttcgtcaacaagcagggccagacgcggctggcgcagtactacgagcacctctccctcgacgagcgacgggccctcgagggcgagatcgtccgcaagtgcctcgcccgcactgaccagcagtgttcgtttgtggagcaccggaactacaaggtcgtttacagacgctacgcctcccttttcttcctcgtcggcgtcgacagcgatgagaatgagttagctatccttgaattcatacatcttctggtggaaactatggatcgccacttcggcaatgtgtgcgagctcgatatcatgttccatctggagaaagtgcacttcatgttggaagagatggtgatgaatggttgcattgtggagacaagtaaacagaacatcttggcaccaatacaacttatggagaaaacttcctaaaatagtgatatccatttgtgtagttttacatccacttcttagcacatttgcctgtctgcccctttccataaaatttccctctgtatgtgagagtgcaaaacaatctctgtaaccatggagtattgaattgacctgattgtgtgctttc

SEQ ID NO: 39742 - protein, 143 aa, Zea mays subsp. mays
  peptide (1)..(143): Ceres Seq. ID no. 12416723
  misc_feature (3)..(143): Pfam Name: Pfam Description:  Clathrin adaptor complex small chain
  misc_feature (1)..(143): NCBI GI NO: 40253273 NR Description: putative clathrin coat assembly protein AP17
  misc_feature (1)..(143): NCBI GI NO: 37533546 NR Description: putative clathrin assembly protein
  misc_feature (1)..(141): NCBI GI NO: 15224841 NR Description: putative clathrin assembly protein
  misc_feature (3)..(143): NCBI GI NO: 23510210 NR Description: clathrin assembly protein, putative
  misc_feature (3)..(143): NCBI GI NO: 13431288 NR Description: Adapter-related protein complex 4 sigma 1 subunit
  misc_feature (3)..(143): NCBI GI NO: 23482798 NR Description: putative clathrin assembly protein
  misc_feature (3)..(143): NCBI GI NO: 17998681 NR Description: adaptor-related protein complex AP-4, sigma 1
  misc_feature (3)..(141): NCBI GI NO: 26788038 NR Description: SI:dZ234G15
  misc_feature (1)..(136): NCBI GI NO: 19114322 NR Description: putative clathrin-associated protein
  misc_feature (3)..(143): NCBI GI NO: 37544043 NR Description: similar to adaptor-related protein complex 1 sigma2 subunit
MTIRFVLFVNKQGQTRLAQYYEHLSLDERRALEGEIVRKCLARTDQQCSFVEHRNYKVVYRRYASLFFLVGVDSDENELAILEFIHLLVETMDRHFGNVCELDIMFHLEKVHFMLEEMVMNGCIVETSKQNILAPIQLMEKTS

SEQ ID NO: 39743 - protein, 87 aa, Zea mays subsp. mays
  peptide (1)..(87): Ceres Seq. ID no. 12416724
SGWPRNGAPWSPSLIFGEQNIPETTGRRRLTASSSRDQGGRGRDDDPVRAVRQQAGPDAAGAVLRAPLPRRATGPRGRDRPQVPRPH

SEQ ID NO: 39744 - DNA, 758 bp, Zea mays subsp. mays
  misc_feature (1)..(758): Ceres Seq. ID no. 12416542
atttggtatgaacgtgcttgatctggttgaatggaggaacaagaatgtgacaggcatatatcattattggcaggagcgcaatgctgatcataccctatggaagcttgggtctttaccacctggacttcttgctttctatggcttggttgaagcattggatcccaaatggcatgttttgggacttggctacacaactgttgatcttgctactatcaaggaaggggcagtactgcactacaatggaaatatgaagccatggctcaaaataggaatggagaagtacaagagcttttgggataactatgtggactattcacatcctttgattcagcagtgcttcatgcgttgattgatgtgtatcgacattataaatttttgtaagctctgtggtagatatgttccaagcgcatgctccaactgccacacggaaacattgtaattaaatcagtgggcttcgctctcaagttataatctctgacaaaacatcagtggctgtctatagtatctgtatttgatgaaatacagcaatcacatatctccagagtccagccacaggtaaacaacacatgagctaagaccgcgatgtagtaggctgctacttgaatacatccattacatacattcattacttgtgaccattgatgtaattttccattttttatttattgggtgagacaaccacagaatggagataatgtagaattgattttaaattattgacttgttacaagttttcagttatgtatccatatttattg

SEQ ID NO: 39745 - protein, 115 aa, Zea mays subsp. mays
  peptide (1)..(115): Ceres Seq. ID no. 12416543
  misc_feature (1)..(113): NCBI GI NO: 32492171 NR Description: OSJNBb0034I13.1
  misc_feature (1)..(112): NCBI GI NO: 18399484 NR Description: Expressed protein; protein id: At2g20810
  misc_feature (1)..(95): NCBI GI NO: 25411994 NR Description: hypothetical protein At2g20810
  misc_feature (1)..(112): NCBI GI NO: 15293067 NR Description: unknown protein [Arabidopsis thaliana]
  misc_feature (1)..(112): NCBI GI NO: 7485958 NR Description: hypothetical protein F22I13
  misc_feature (1)..(114): NCBI GI NO: 37533460 NR Description: hypothetical protein
  misc_feature (1)..(112): NCBI GI NO: 30691875 NR Description: glycosyltransferase family 8
  misc_feature (1)..(112): NCBI GI NO: 7271113 NR Description: 68 kDa protein [Cicer arietinum]
  misc_feature (1)..(112): NCBI GI NO: 15233046 NR Description: putative protein; protein id: At3g61130
  misc_feature (1)..(112): NCBI GI NO: 15227235 NR Description: hypothetical protein; protein id: At2g46480.1
FGMNVLDLVEWRNKNVTGIYHYWQERNADHTLWKLGSLPPGLLAFYGLVEALDPKWHVLGLGYTTVDLATIKEGAVLHYNGNMKPWLKIGMEKYKSFWDNYVDYSHPLIQQCFMR

SEQ ID NO: 39746 - protein, 113 aa, Zea mays subsp. mays
  peptide (1)..(113): Ceres Seq. ID no. 12416544
  misc_feature (1)..(111): NCBI GI NO: 32492171 NR Description: OSJNBb0034I13.1
  misc_feature (1)..(110): NCBI GI NO: 18399484 NR Description: Expressed protein; protein id: At2g20810
  misc_feature (1)..(93): NCBI GI NO: 25411994 NR Description: hypothetical protein At2g20810
  misc_feature (1)..(110): NCBI GI NO: 15293067 NR Description: unknown protein [Arabidopsis thaliana]
  misc_feature (1)..(110): NCBI GI NO: 7485958 NR Description: hypothetical protein F22I13
  misc_feature (1)..(112): NCBI GI NO: 37533460 NR Description: hypothetical protein
  misc_feature (1)..(110): NCBI GI NO: 30691875 NR Description: glycosyltransferase family 8
  misc_feature (1)..(110): NCBI GI NO: 7271113 NR Description: 68 kDa protein [Cicer arietinum]
  misc_feature (1)..(110): NCBI GI NO: 15233046 NR Description: putative protein; protein id: At3g61130
  misc_feature (1)..(110): NCBI GI NO: 15227235 NR Description: hypothetical protein; protein id: At2g46480.1
MNVLDLVEWRNKNVTGIYHYWQERNADHTLWKLGSLPPGLLAFYGLVEALDPKWHVLGLGYTTVDLATIKEGAVLHYNGNMKPWLKIGMEKYKSFWDNYVDYSHPLIQQCFMR

SEQ ID NO: 39747 - DNA, 475 bp, Zea mays subsp. mays
  misc_feature (1)..(475): Ceres Seq. ID no. 5006193
acccacgcccccaacgccaagaacgtcgacgggcgcgacggcatggcggcggcggacccggacaccgaggtgcaggcggagttcccacccctcgtccgccagtacaaaagcggttcttcaacctggccccgctcccggccggcaccgacccggccacgggcgtcgtgtccaaggacgtcgtcgtcgacccggccaccggcctctgggcgcgcctcttcctccccgccggcagccacgggaagaagctccccgtcgtcgtctactaccatggcggcgcctacgtgatcggctcggcggccgacccgatgacgcacggctacctcaacgcgctcgtcgccaaggccggcgtcctcgcggtcgcgctcgagtaccgcctcgcgccggagcacccgctcccggccgcctacgaggactcatgggagggactcaagtgggtggccacccacgcctccgcctccgccgccgcgggaggagg

SEQ ID NO: 39748 - protein, 158 aa, Zea mays subsp. mays
  peptide (1)..(158): Ceres Seq. ID no. 5006194
  misc_feature (32)..(155): Pfam Name: Pfam Description:  Aminotransferase class-III
PTPPTPRTSTGATAWRRRTRTPRCRRSSHPSSASTKAVLQPGPAPGRHRPGHGRRVQGRRRRPGHRPLGAPLPPRRQPREEAPRRRLLPWRRLRDRLGGRPDDARLPQRARRQGRRPRGRARVPPRAGAPAPGRLRGLMGGTQVGGHPRLRLRRRGRR

SEQ ID NO: 39749 - protein, 157 aa, Zea mays subsp. mays
  peptide (1)..(157): Ceres Seq. ID no. 5006195
  misc_feature (79)..(127): Pfam Name: Pfam Description:  Carboxylesterase
  misc_feature (46)..(149): NCBI GI NO: 34393323 NR Description: putative cell death associated protein
  misc_feature (45)..(143): NCBI GI NO: 18401743 NR Description: expressed protein; protein id: At1g47480
  misc_feature (43)..(156): NCBI GI NO: 38344841 NR Description: OSJNBa0064H22.22
  misc_feature (45)..(145): NCBI GI NO: 21536771 NR Description: unknown [Arabidopsis thaliana]
  misc_feature (36)..(152): NCBI GI NO: 15222795 NR Description: unknown protein; protein id: At1g49660.1
  misc_feature (36)..(147): NCBI GI NO: 34393904 NR Description: putative cell death associated protein
  misc_feature (36)..(152): NCBI GI NO: 15227669 NR Description: putative esterase; protein id: At2g03550.1
  misc_feature (36)..(152): NCBI GI NO: 28393060 NR Description: putative esterase [Arabidopsis thaliana]
  misc_feature (45)..(149): NCBI GI NO: 15222791 NR Description: hypothetical protein; protein id: At1g49640.1
  misc_feature (36)..(152): NCBI GI NO: 21537287 NR Description: putative esterase [Arabidopsis thaliana]
PRPQRQERRRARRHGGGGPGHRGAGGVPTPRPPVQKRFFNLAPLPAGTDPATGVVSKDVVVDPATGLWARLFLPAGSHGKKLPVVVYYHGGAYVIGSAADPMTHGYLNALVAKAGVLAVALEYRLAPEHPLPAAYEDSWEGLKWVATHASASAAAGG

SEQ ID NO: 39750 - protein, 94 aa, Zea mays subsp. mays
  peptide (1)..(94): Ceres Seq. ID no. 5006196
  misc_feature (37)..(94): Pfam Name: Pfam Description:  Glycoprotein GG/GX
  misc_feature (3)..(94): NCBI GI NO: 11359723 NR Description: proteophosphoglycan, membrane-associated
  misc_feature (1)..(94): NCBI GI NO: 31559809 NR Description: polycystic kidney disease 1 like 3
  misc_feature (43)..(94): NCBI GI NO: 81286 NR Description: extensin - Volvox carteri (fragment)
THAPNAKNVDGRDGMAAADPDTEVQAEFPPLVRQYKSGSSTWPRSRPAPTRPRASCPRTSSSTRPPASGRASSSPPAATGRSSPSSSTTMAAPT

SEQ ID NO: 39751 - DNA, 417 bp, Zea mays subsp. mays
  misc_feature (1)..(417): Ceres Seq. ID no. 1682636
agtgaggagggactagggagacagggggagggaacaagccgggcgcagtcacggcatcaaacacgagccgcggcatgggcaacagcctgcggtgctgcctggcgtgcgtgctgccgtgcggcgcgctggacctggtgcggatcgtgcacctcagcggccgcgtcgacgagtacggccgcgccgtgtcggccggggaggtgctggcggcgcaccccaaccacgtgctcagctggccctgctcgtcgccgcagggggtcgtgcgcaggatcctcatcgtgtcgccggactcggagctcgagcgcggggagatctacttcctcatcccggccgcgtccgtgcccgacgccaagaagggcggcggcggggctagcacgccaggccgccacgtgcgcagcaagtccgaaggcagcgtcgtcg

SEQ ID NO: 39752 - protein, 139 aa, Zea mays subsp. mays
  peptide (1)..(139): Ceres Seq. ID no. 1682637
SEEGLGRQGEGTSRAQSRHQTRAAAWATACGAAWRACCRAARWTWCGSCTSAAASTSTAAPCRPGRCWRRTPTTCSAGPARRRRGSCAGSSSCRRTRSSSAGRSTSSSRPRPCPTPRRAAAGLARQAATCAASPKAASS

SEQ ID NO: 39753 - protein, 114 aa, Zea mays subsp. mays
  peptide (1)..(114): Ceres Seq. ID no. 1682638
  misc_feature (1)..(113): NCBI GI NO: 34896112 NR Description: P0701D05.10
  misc_feature (1)..(93): NCBI GI NO: 18390706 NR Description: expressed protein; protein id: At1g06980
  misc_feature (1)..(93): NCBI GI NO: 15227725 NR Description: hypothetical protein; protein id: At2g30230.1
  misc_feature (1)..(112): NCBI GI NO: 34907910 NR Description: P0439E11.22
  misc_feature (25)..(102): NCBI GI NO: 34896398 NR Description: hypothetical protein
  misc_feature (3)..(93): NCBI GI NO: 34909702 NR Description: B1131G08.9
  misc_feature (1)..(96): NCBI GI NO: 18396990 NR Description: Expressed protein; protein id: At1g29195
MGNSLRCCLACVLPCGALDLVRIVHLSGRVDEYGRAVSAGEVLAAHPNHVLSWPCSSPQGVVRRILIVSPDSELERGEIYFLIPAASVPDAKKGGGGASTPGRHVRSKSEGSVV

SEQ ID NO: 39754 - DNA, 1019 bp, Zea mays subsp. mays
  misc_feature (1)..(1019): Ceres Seq. ID no. 13492109
acttcacaccatttcagcattgtaccctatgttcatgccaccatggaagggcttcgtattggagcaccgattatgcaggtttatcatgagaaatcttttatcttacctgatgtttcaagggtgcttgcttgcctttatgagaaggatgtcaagtttgagactcacacagcctcatacaggagcctactcggattgcaggcatcatctcatgctccagttccattctatgaaggccctacttttctagaagaatccagagaaatctgccgttatatagcagaaaagtatgaaaatcaaggatatccgttcctccttggaaaggatgcccttgagagggcttcaattgaacaatggctccacaacgaggagcatgctttcaaccctccgagccgggccttgttctttcatttggcctttcccctgggtgaaggagaagatgatgatattgatgttcatacaaggaagctagaagaggttctggaagtttatgagcaaaggctcagtgacagcgaattccttgttggaaacaagttcactcttgccgaccttgttcacctgccaaattcccactatatcaaagcatctaacaagtttctttacctttatgattcgaggaaaaatgtaaggaggtggtgggatgctatttctgaccggagttcttggaagaaagtgctgaggtatatgaagagcgtggaggagaagaacaaacaagaagaactcaagaagcagcagcagcagcaggaagaggctcctagaacctccaccgacccaactcgggtagactcgagaaagcagagcagaacagagcctcggacaatattggttcctcctgctgataacgagtcatcagcttcgatagttcctcgaacaaagaagcctcttcctggtgatcacttagtgtctactcaacaaattgatggtgttggtatgccagccacaaattgatggtgatggtcgtcttagtggtgtttgtcttgtcttttattgtttggttctttaacaagagttatatttttacc

SEQ ID NO: 39755 - protein, 314 aa, Zea mays subsp. mays
  peptide (1)..(314): Ceres Seq. ID no. 13492110
  misc_feature (15)..(314): NCBI GI NO: 11385483 NR Description: glutathione S-transferase GST 16 [Zea mays]
  misc_feature (37)..(139): NCBI GI NO: 37536564 NR Description: putative glutathione S-transferase
  misc_feature (153)..(224): NCBI GI NO: 37536564 NR Description: putative glutathione S-transferase
  misc_feature (37)..(165): NCBI GI NO: 11385479 NR Description: glutathione S-transferase GST 14 [Zea mays]
  misc_feature (154)..(224): NCBI GI NO: 11385479 NR Description: glutathione S-transferase GST 14 [Zea mays]
  misc_feature (37)..(229): NCBI GI NO: 11385469 NR Description: glutathione S-transferase GST 9 [Zea mays]
  misc_feature (154)..(280): NCBI GI NO: 22758271 NR Description: Putative glutathione S-transferase
  misc_feature (37)..(139): NCBI GI NO: 22758271 NR Description: Putative glutathione S-transferase
  misc_feature (37)..(229): NCBI GI NO: 11385475 NR Description: glutathione S-transferase GST 12 [Zea mays]
  misc_feature (20)..(225): NCBI GI NO: 22758267 NR Description: Putative glutathione S-transferase
TSHHFSIVPYVHATMEGLRIGAPIMQVYHEKSFILPDVSRVLACLYEKDVKFETHTASYRSLLGLQASSHAPVPFYEGPTFLEESREICRYIAEKYENQGYPFLLGKDALERASIEQWLHNEEHAFNPPSRALFFHLAFPLGEGEDDDIDVHTRKLEEVLEVYEQRLSDSEFLVGNKFTLADLVHLPNSHYIKASNKFLYLYDSRKNVRRWWDAISDRSSWKKVLRYMKSVEEKNKQEELKKQQQQQEEAPRTSTDPTRVDSRKQSRTEPRTILVPPADNESSASIVPRTKKPLPGDHLVSTQQIDGVGMPATN

SEQ ID NO: 39756 - protein, 300 aa, Zea mays subsp. mays; identical to SEQ ID NO: 29497
  peptide (1)..(300): Ceres Seq. ID no. 13492111
  misc_feature (1)..(300): NCBI GI NO: 11385483 NR Description: glutathione S-transferase GST 16 [Zea mays]
  misc_feature (23)..(125): NCBI GI NO: 37536564 NR Description: putative glutathione S-transferase
  misc_feature (139)..(210): NCBI GI NO: 37536564 NR Description: putative glutathione S-transferase
  misc_feature (23)..(151): NCBI GI NO: 11385479 NR Description: glutathione S-transferase GST 14 [Zea mays]
  misc_feature (140)..(210): NCBI GI NO: 11385479 NR Description: glutathione S-transferase GST 14 [Zea mays]
  misc_feature (23)..(215): NCBI GI NO: 11385469 NR Description: glutathione S-transferase GST 9 [Zea mays]
  misc_feature (140)..(266): NCBI GI NO: 22758271 NR Description: Putative glutathione S-transferase
  misc_feature (23)..(125): NCBI GI NO: 22758271 NR Description: Putative glutathione S-transferase
  misc_feature (23)..(215): NCBI GI NO: 11385475 NR Description: glutathione S-transferase GST 12 [Zea mays]
  misc_feature (6)..(211): NCBI GI NO: 22758267 NR Description: Putative glutathione S-transferase

SEQ ID NO: 39757 - protein, 290 aa, Zea mays subsp. mays; identical to SEQ ID NO: 29498
  peptide (1)..(290): Ceres Seq. ID no. 13492112
  misc_feature (1)..(290): NCBI GI NO: 11385483 NR Description: glutathione S-transferase GST 16 [Zea mays]
  misc_feature (13)..(115): NCBI GI NO: 37536564 NR Description: putative glutathione S-transferase
  misc_feature (129)..(200): NCBI GI NO: 37536564 NR Description: putative glutathione S-transferase
  misc_feature (13)..(141): NCBI GI NO: 11385479 NR Description: glutathione S-transferase GST 14 [Zea mays]
  misc_feature (130)..(200): NCBI GI NO: 11385479 NR Description: glutathione S-transferase GST 14 [Zea mays]
  misc_feature (13)..(205): NCBI GI NO: 11385469 NR Description: glutathione S-transferase GST 9 [Zea mays]
  misc_feature (130)..(256): NCBI GI NO: 22758271 NR Description: Putative glutathione S-transferase
  misc_feature (13)..(115): NCBI GI NO: 22758271 NR Description: Putative glutathione S-transferase
  misc_feature (13)..(205): NCBI GI NO: 11385475 NR Description: glutathione S-transferase GST 12 [Zea mays]
  misc_feature (1)..(201): NCBI GI NO: 22758267 NR Description: Putative glutathione S-transferase

SEQ ID NO: 39758 - DNA, 774 bp, Zea mays subsp. mays
  misc_feature (1)..(774): Ceres Seq. ID no. 12363622
gcgagccgaaccggagcgtcaagcaaacatccgtcgatcccgattccgaccactgcgctcgcgccatcgcgccatccacccggcattgtgcgcccgagccgggctcgttggatggcgtccggaggcgccgcccgcggtcgccttgctgaggagcgcaaggcgtggcgcaagagccatcccctcggctttgtggccaagccggcgatgctgccggatggttctgtcaatctcatgctctggaactgcgtcgtccccggcaagtaaggcactgattgggaaggtggatatttcccggtcactctccatttcactgaaaattacccaagtaaccccccaacctgcaagttcccacgaaggtttttccatgtcaatgtctatgattctggggatgtatgcctgtcaatacttggtgatgcatgggcgccttctatcacagtgcggcaaattctaataggcatccaggagctgctggagaacccaaacccagcctctcccgcacaggattttgcttacgatgtttttgcagagaatatgccagaatacaagagacgcgtccgtgagcaagccaagaggtatccgtcgctcgtgtagccgtggacctctgcaacacaattgctgctaaccaagtagtcactcactttggtgtagtggaacttgttcatgacgtgcttaactatggtgtctagttagccgtacgcttgttggaactgctaaagtgcagcttattggaactgctaaaatgcccttgactacgtcttattattatggtttatc

SEQ ID NO: 39759 - protein, 149 aa, Zea mays subsp. mays
  peptide (1)..(149): Ceres Seq. ID no. 12363623
RAEPERQANIRRSRFRPLRSRHRAIHPALCARAGLVGWRPEAPPAVALLRSARRGARAIPSALWPSRRCCRMVLSISCSGTASSPASKALIGKVDISRSLSISLKITQVTPQPASSHEGFSMSMSMILGMYACQYLVMHGRLLSQCGKF

SEQ ID NO: 39760 - protein, 87 aa, Zea mays subsp. mays
  peptide (1)..(87): Ceres Seq. ID no. 12363624
  misc_feature (38)..(87): NCBI GI NO: 38345867 NR Description: OSJNBa0064M23.9
  misc_feature (40)..(87): NCBI GI NO: 37536440 NR Description: putative ubiquitin-conjugating enzyme
  misc_feature (40)..(87): NCBI GI NO: 20975734 NR Description: putative ubiquitin-conjugating enzyme
  misc_feature (40)..(87): NCBI GI NO: 25446690 NR Description: Putative ubiquitin-conjugating enzyme
  misc_feature (38)..(87): NCBI GI NO: 15230881 NR Description: E2 ubiquitin-conjugating-like enzyme, Ahus5
  misc_feature (42)..(87): NCBI GI NO: 7621708 NR Description: putative E2 enzyme Ubc9 [Dictyostelium discoideum]
  misc_feature (42)..(87): NCBI GI NO: 30584109 NR Description: Homo sapiens ubiquitin-conjugating enzyme E2I
  misc_feature (42)..(87): NCBI GI NO: 2194010 NR Description: Chain A, Human Ubiquitin-Conjugating Enzyme Ubc9
  misc_feature (42)..(87): NCBI GI NO: 3212324 NR Description: Human Ubc9
  misc_feature (42)..(87): NCBI GI NO: 20150955 NR Description: Chain A
ASRTGASSKHPSIPIPTTALAPSRHPPGIVRPSRARWMASGGAARGRLAEERKAWRKSHPLGFVAKPAMLPDGSVNLMLWNCVVPGK

SEQ ID NO: 39761 - protein, 78 aa, Zea mays subsp. mays
  peptide (1)..(78): Ceres Seq. ID no. 12363625
MVLSISCSGTASSPASKALIGKVDISRSLSISLKITQVTPQPASSHEGFSMSMSMILGMYACQYLVMHGRLLSQCGKF

SEQ ID NO: 39762 - DNA, 475 bp, Zea mays subsp. mays
  misc_feature (1)..(475): Ceres Seq. ID no. 1680426
  misc_feature (469)..(469): n is a, c, t, g, unknown, or other
gtattctgtcgtaatcctgccattcatttccatccagacgaccagaggccagagggcgttgctgcgctgcgttccgctctcccttttctgctgcgacgacggctggtcgagcgccgccacactttgcagcttccttggctcttcgcaggtgacgagcgcccaccagtcagacatgggacaaggtggacaagagaagtcgttcaatttccttcaagttttgctagagggcagcatagctggaggaactgctggtgttgtggtggaaacagcactttacccgattgatactataaaaaccaggcttcaggctgctcgaggtggaagccggattgaatggaaaggcttgtattctggattagctggaaatctcactggcgtccttccggcctctgcgatatttgtcggggtgtatgagccaactaaaagamaattactggaaacccttcctgaaaatctgagtgcagttgcncatttt

SEQ ID NO: 39763 - protein, 94 aa, Zea mays subsp. mays
  peptide (1)..(94): Ceres Seq. ID no. 1680427
VFCRNPAIHFHPDDQRPEGVAALRSALPFLLRRRLVERRHTLQLPWLFAGDERPPVRHGTRWTREVVQFPSSFARGQHSWRNCWCCGGNSTLPD

SEQ ID NO: 39764 - protein, 158 aa, Zea mays subsp. mays
  peptide (1)..(158): Ceres Seq. ID no. 1680428
  misc_feature (58)..(157): NCBI GI NO: 34394981 NR Description: mitochondrial aspartate-glutamate carrier protein-like
  misc_feature (63)..(157): NCBI GI NO: 7486053 NR Description: hypothetical protein F23K16
  misc_feature (63)..(157): NCBI GI NO: 18420458 NR Description: mitochondrial carrier protein family
  misc_feature (63)..(157): NCBI GI NO: 18399114 NR Description: allinase, putative; protein id: At1g34065.1
  misc_feature (78)..(144): NCBI GI NO: 31208625 NR Description: ENSANGP00000011068 [Anopheles gambiae]
  misc_feature (78)..(157): NCBI GI NO: 24650120 NR Description: CG4743-PA [Drosophila melanogaster]
  misc_feature (78)..(157): NCBI GI NO: 27754081 NR Description: RIKEN cDNA 4930433D19; expressed sequence AW557176
  misc_feature (78)..(147): NCBI GI NO: 34857703 NR Description: similar to RIKEN cDNA 4930433D19
  misc_feature (78)..(147): NCBI GI NO: 32415055 NR Description: hypothetical protein
  misc_feature (74)..(146): NCBI GI NO: 23509092 NR Description: mitochondrial carrier protein, putative
  misc_feature (143)..(143): Xaa is any aa, unknown or other
  misc_feature (156)..(156): Xaa is any aa, unknown or other
YSVVILPFISIQTTRGQRALLRCVPLSLFCCDDGWSSAATLCSFLGSSQVTSAHQSDMGQGGQEKSFNFLQVLLEGSIAGGTAGVVVETALYPIDTIKTRLQAARGGSRIEWKGLYSGLAGNLTGVLPASAIFVGVYEPTKRXLLETLPENLSAVXHF

SEQ ID NO: 39765 - protein, 101 aa, Zea mays subsp. mays
  peptide (1)..(101): Ceres Seq. ID no. 1680429
  misc_feature (1)..(100): NCBI GI NO: 34394981 NR Description: mitochondrial aspartate-glutamate carrier protein-like
  misc_feature (6)..(100): NCBI GI NO: 7486053 NR Description: hypothetical protein F23K16
  misc_feature (6)..(100): NCBI GI NO: 18420458 NR Description: mitochondrial carrier protein family
  misc_feature (6)..(100): NCBI GI NO: 18399114 NR Description: allinase, putative; protein id: At1g34065.1
  misc_feature (21)..(87): NCBI GI NO: 31208625 NR Description: ENSANGP00000011068 [Anopheles gambiae]
  misc_feature (21)..(100): NCBI GI NO: 24650120 NR Description: CG4743-PA [Drosophila melanogaster]
  misc_feature (21)..(100): NCBI GI NO: 27754081 NR Description: RIKEN cDNA 4930433D19; expressed sequence AW557176
  misc_feature (21)..(90): NCBI GI NO: 34857703 NR Description: similar to RIKEN cDNA 4930433D19
  misc_feature (21)..(90): NCBI GI NO: 32415055 NR Description: hypothetical protein
  misc_feature (17)..(89): NCBI GI NO: 23509092 NR Description: mitochondrial carrier protein, putative
  misc_feature (86)..(86): Xaa is any aa, unknown or other
  misc_feature (99)..(99): Xaa is any aa, unknown or other
MGQGGQEKSFNFLQVLLEGSIAGGTAGVVVETALYPIDTIKTRLQAARGGSRIEWKGLYSGLAGNLTGVLPASAIFVGVYEPTKRXLLETLPENLSAVXHF

SEQ ID NO: 39766 - DNA, 738 bp, Zea mays subsp. mays
  misc_feature (1)..(738): Ceres Seq. ID no. 13566549
tttcaaaatggtgttggttgtgaggaatgatctgaagatggggaaggggaagattgccgcacagtgcagtcatgcaactcttgggctattcaaaaaactccaacagagagctccaaaatcactaagaaggtgggagcggtgtgggcaagttaaagtggttgtgaaaatagaaagcgaggaagacatgctagttttacaagggagagcaaaagtctttaaatctgccaactcacataaccatagacgctggaagaacacagattgctccaaattcaaggacagtcatggctattctggggccagctgatatggttgatgatgttactggcggtctgaagcttttgtagaaaaccaccttgtcagcattttcaacttgggtcttcatagagcagtgctgggactttgcagggccacagtggtctctgcacttgtactgatgtgcggcagaagaatgaaccttggccccgttggttgacctgagtttcttgtccatgaatttatttggaaggagagcttgcattcttttttcacttgtaccgaccgttatctttggagttgtgatgttagcagttcgaattctggtgttgacaacttatagaccatcatttcttctgtaacatagataagaaaatactatttgactattgtccatttccccttttttattttctttttaataattcgtgcagtagtggacacaatactgagttgctttggagaagtcatcttgattgcggc

SEQ ID NO: 39767 - protein, 101 aa, Zea mays subsp. mays
  peptide (1)..(101): Ceres Seq. ID no. 13566550
  misc_feature (10)..(73): Pfam Name: Pfam Description:  Domain of unknown function UPF0099
  misc_feature (1)..(73): NCBI GI NO: 15228442 NR Description: expressed protein [Arabidopsis thaliana]
  misc_feature (1)..(73): NCBI GI NO: 18418110 NR Description: expressed protein [Arabidopsis thaliana]
  misc_feature (1)..(73): NCBI GI NO: 21592675 NR Description: unknown [Arabidopsis thaliana]
  misc_feature (1)..(73): NCBI GI NO: 11357729 NR Description: hypothetical protein F2K13_20 - Arabidopsisthaliana
  misc_feature (1)..(70): NCBI GI NO: 38345901 NR Description: OSJNBa0060D06.11
  misc_feature (1)..(71): NCBI GI NO: 7706351 NR Description: CGI-147 protein [Homo sapiens]
  misc_feature (1)..(71): NCBI GI NO: 11359891 NR Description: hypothetical protein DKFZp434A1535
  misc_feature (1)..(71): NCBI GI NO: 40889414 NR Description: Chain A, Crystal Structure Of Bit1
  misc_feature (1)..(70): NCBI GI NO: 27674393 NR Description: similar to Protein CGI-147 [Rattus norvegicus]
  misc_feature (1)..(70): NCBI GI NO: 29428218 NR Description: Protein CGI-147
FKMVLVVRNDLKMGKGKIAAQCSHATLGLFKKLQQRAPKSLRRWERCGQVKVVVKIESEEDMLVLQGRAKVFKSANSHNHRRWKNTDCSKFKDSHGYSGAS

SEQ ID NO: 39768 - protein, 99 aa, Zea mays subsp. mays
  peptide (1)..(99): Ceres Seq. ID no. 13566551
  misc_feature (8)..(71): Pfam Name: Pfam Description:  Domain of unknown function UPF0099
  misc_feature (1)..(71): NCBI GI NO: 15228442 NR Description: expressed protein [Arabidopsis thaliana]
  misc_feature (1)..(71): NCBI GI NO: 18418110 NR Description: expressed protein [Arabidopsis thaliana]
  misc_feature (1)..(71): NCBI GI NO: 21592675 NR Description: unknown [Arabidopsis thaliana]
  misc_feature (1)..(71): NCBI GI NO: 11357729 NR Description: hypothetical protein F2K13_20 - Arabidopsisthaliana
  misc_feature (1)..(68): NCBI GI NO: 38345901 NR Description: OSJNBa0060D06.11
  misc_feature (1)..(69): NCBI GI NO: 7706351 NR Description: CGI-147 protein [Homo sapiens]
  misc_feature (1)..(69): NCBI GI NO: 11359891 NR Description: hypothetical protein DKFZp434A1535
  misc_feature (1)..(69): NCBI GI NO: 40889414 NR Description: Chain A, Crystal Structure Of Bit1
  misc_feature (1)..(68): NCBI GI NO: 27674393 NR Description: similar to Protein CGI-147 [Rattus norvegicus]
  misc_feature (1)..(68): NCBI GI NO: 29428218 NR Description: Protein CGI-147
MVLVVRNDLKMGKGKIAAQCSHATLGLFKKLQQRAPKSLRRWERCGQVKVVVKIESEEDMLVLQGRAKVFKSANSHNHRRWKNTDCSKFKDSHGYSGAS

SEQ ID NO: 39769 - protein, 89 aa, Zea mays subsp. mays
  peptide (1)..(89): Ceres Seq. ID no. 13566552
  misc_feature (1)..(61): Pfam Name: Pfam Description:  Domain of unknown function UPF0099
  misc_feature (1)..(61): NCBI GI NO: 15228442 NR Description: expressed protein [Arabidopsis thaliana]
  misc_feature (1)..(61): NCBI GI NO: 18418110 NR Description: expressed protein [Arabidopsis thaliana]
  misc_feature (1)..(61): NCBI GI NO: 21592675 NR Description: unknown [Arabidopsis thaliana]
  misc_feature (1)..(61): NCBI GI NO: 11357729 NR Description: hypothetical protein F2K13_20 - Arabidopsisthaliana
  misc_feature (1)..(58): NCBI GI NO: 38345901 NR Description: OSJNBa0060D06.11
  misc_feature (1)..(59): NCBI GI NO: 7706351 NR Description: CGI-147 protein [Homo sapiens]
  misc_feature (1)..(59): NCBI GI NO: 11359891 NR Description: hypothetical protein DKFZp434A1535
  misc_feature (1)..(59): NCBI GI NO: 40889414 NR Description: Chain A, Crystal Structure Of Bit1
  misc_feature (1)..(58): NCBI GI NO: 27674393 NR Description: similar to Protein CGI-147 [Rattus norvegicus]
  misc_feature (1)..(58): NCBI GI NO: 29428218 NR Description: Protein CGI-147
MGKGKIAAQCSHATLGLFKKLQQRAPKSLRRWERCGQVKVVVKIESEEDMLVLQGRAKVFKSANSHNHRRWKNTDCSKFKDSHGYSGAS

SEQ ID NO: 39770 - DNA, 529 bp, Zea mays subsp. mays
  misc_feature (1)..(529): Ceres Seq. ID no. 12416340
  misc_feature (503)..(503): n is a, c, t, g, unknown, or other
  misc_feature (502)..(502): n is a, c, t, g, unknown, or other
atcccctcctcagccatcgcctccctctcccctcaacccagcgcccccctcccgccgccgctagggtttctcctccctccccgcccacccccaaatcatttccgaagcttccagtgcgccgcagtcatgagcgacggcaaggactccctcgacctctccgccctcggcgctgccatccccaactcggccgagctcagcgcggaggacaaggctaaccttgtggcgtcgatcaagaacacgctcgagggattggcgtcgcggcataccgacgtgctcgagagcctcgagcccaaggtcaggaagcgcgtcgagaagctcagggagatccagggcgaacacgacgaacttgaggcaaaatttttcgaggagagagctgctctagaagctaagtatcagaagttgtatgaaccactttactcaaagcgttacgaaattgtcaatggtgtggtcgaggttgagggtatcacagtagaaagtgcagctgaaacccctgcggagcaanngagtggagatgagacctctgctgatc

SEQ ID NO: 39771 - protein, 176 aa, Zea mays subsp. mays
  peptide (1)..(176): Ceres Seq. ID no. 12416341
  misc_feature (100)..(175): Pfam Name: NAP Pfam Description: Nucleosome assembly protein
  misc_feature (43)..(175): NCBI GI NO: 21898560 NR Description: nucleosome/chromatin assembly factor group A
  misc_feature (43)..(171): NCBI GI NO: 29569109 NR Description: nucleosome/chromatin assembly factor group A
  misc_feature (43)..(175): NCBI GI NO: 15224782 NR Description: putative nucleosome assembly protein
  misc_feature (43)..(175): NCBI GI NO: 8777435 NR Description: nucleosome assembly protein [Arabidopsis thaliana]
  misc_feature (43)..(175): NCBI GI NO: 18423918 NR Description: nucleosome assembly protein; protein id:At5g56950
  misc_feature (43)..(167): NCBI GI NO: 7488816 NR Description: nucleosome assembly protein 1 - garden pea
  misc_feature (43)..(172): NCBI GI NO: 40287518 NR Description: induced stolon tip protein NAP1Ps
  misc_feature (62)..(170): NCBI GI NO: 2129840 NR Description: nucleosome assembly protein 1 - soybean
  misc_feature (43)..(175): NCBI GI NO: 549975 NR Description: nucleosome assembly protein I-like protein
  misc_feature (43)..(175): NCBI GI NO: 15236115 NR Description: nucleosome assembly protein I-like protein
  misc_feature (168)..(168): Xaa is any aa, unknown or other
IPSSAIASLSPQPSAPLPPPLGFLLPPRPPPNHFRSFQCAAVMSDGKDSLDLSALGAAIPNSAELSAEDKANLVASIKNTLEGLASRHTDVLESLEPKVRKRVEKLREIQGEHDELEAKFFEERAALEAKYQKLYEPLYSKRYEIVNGVVEVEGITVESAAETPAEQXSGDETSAD

SEQ ID NO: 39772 - protein, 134 aa, Zea mays subsp. mays
  peptide (1)..(134): Ceres Seq. ID no. 12416342
  misc_feature (58)..(133): Pfam Name: NAP Pfam Description: Nucleosome assembly protein
  misc_feature (1)..(133): NCBI GI NO: 21898560 NR Description: nucleosome/chromatin assembly factor group A
  misc_feature (1)..(129): NCBI GI NO: 29569109 NR Description: nucleosome/chromatin assembly factor group A
  misc_feature (1)..(133): NCBI GI NO: 15224782 NR Description: putative nucleosome assembly protein
  misc_feature (1)..(133): NCBI GI NO: 8777435 NR Description: nucleosome assembly protein [Arabidopsis thaliana]
  misc_feature (1)..(133): NCBI GI NO: 18423918 NR Description: nucleosome assembly protein; protein id:At5g56950
  misc_feature (1)..(125): NCBI GI NO: 7488816 NR Description: nucleosome assembly protein 1 - garden pea
  misc_feature (1)..(130): NCBI GI NO: 40287518 NR Description: induced stolon tip protein NAP1Ps
  misc_feature (20)..(128): NCBI GI NO: 2129840 NR Description: nucleosome assembly protein 1 - soybean
  misc_feature (1)..(133): NCBI GI NO: 549975 NR Description: nucleosome assembly protein I-like protein
  misc_feature (1)..(133): NCBI GI NO: 15236115 NR Description: nucleosome assembly protein I-like protein
  misc_feature (126)..(126): Xaa is any aa, unknown or other
MSDGKDSLDLSALGAAIPNSAELSAEDKANLVASIKNTLEGLASRHTDVLESLEPKVRKRVEKLREIQGEHDELEAKFFEERAALEAKYQKLYEPLYSKRYEIVNGVVEVEGITVESAAETPAEQXSGDETSAD

SEQ ID NO: 39773 - DNA, 1046 bp, Zea mays subsp. mays
  misc_feature (1)..(1046): Ceres Seq. ID no. 13493323
taatcgaaaaatcgccgccgcatccacccacgggcccaccaaacgacctcgctgcgcccacccgtccgcccccatctagctcagcggtcccgcacaaccgaccactcggcagaatgccgccgcttcggcctccgccgccgcggctcctgctcaacaacgtctcgtgcatgcggaacgcgcagacggtgctccgcgacatcaacctcagcgtccacgacggcacagccctcgtcctgaccggtgcgaacggctccggcaagaccaccctcctccgcatgctggcgggcttttcgcgtccctcggcgggggagatcctctggaatggtcacgacatcacctccccgggcgttttccagcagtacaagctgcagctcaactggatgtcgctcaaggacgccgtcaaagagaagctcacggtgctcgagaacgtccagtggttcgagctcctcgaggggaaggacggcagcaggtcgggcccagccatcgagctcatgggcctcggcaggctcatgaacgagaaggccaggatgctctccatggggcagaggaagcggctgcagctcgccaggctgctcgctatcgaccgacccatctggctgctggacgagccctcagtcgcgctggacgcagagggtaccaggctgcttgaatacattatcgcagagcatcggaagaagggtggcatcgtgtttgtggccacacatctgcccattcagattgaggattctatgtcgcttcggcttccgcagaggtttccccggaggaagacgctggttgatcttgtccgctgatgtcaatgtgagattgtgagcacaggaatttagctgtatctctctaattcctctccagctatctgtctgattgctgttggagcaattactctggtgctgcatttgtcatcctatttttgacaacatggcaacacattgtcgatgttgataatctgtaggggtctttgtgatcaccgattcgatgcattggcccatgtatttggggacactagaaagcatttgccatggctgatatatgtatggctgttctttgtg

SEQ ID NO: 39774 - protein, 262 aa, Zea mays subsp. mays
  peptide (1)..(262): Ceres Seq. ID no. 13493324
  misc_feature (73)..(234): Pfam Name: Pfam Description:  ABC transporter
  misc_feature (42)..(261): NCBI GI NO: 15221728 NR Description: ABC transporter family protein
  misc_feature (56)..(260): NCBI GI NO: 39545846 NR Description: OSJNBb0060E08.17
  misc_feature (49)..(251): NCBI GI NO: 23016499 NR Description: hypothetical protein
  misc_feature (47)..(239): NCBI GI NO: 22962200 NR Description: hypothetical protein [Rhodopseudomonas palustris]
  misc_feature (48)..(247): NCBI GI NO: 15802754 NR Description: ATP binding protein of heme exporter A
  misc_feature (55)..(247): NCBI GI NO: 24113587 NR Description: Heme exporter protein A
  misc_feature (55)..(247): NCBI GI NO: 9911057 NR Description: HEME EXPORTER PROTEIN A
  misc_feature (55)..(247): NCBI GI NO: 16130138 NR Description: ATP binding protein of heme exporter A
  misc_feature (55)..(247): NCBI GI NO: 26248584 NR Description: Heme exporter protein A [Escherichia coli CFT073]
  misc_feature (43)..(252): NCBI GI NO: 22965489 NR Description: hypothetical protein [Rhodospirillum rubrum]
IEKSPPHPPTGPPNDLAAPTRPPPSSSAVPHNRPLGRMPPLRPPPPRLLLNNVSCMRNAQTVLRDINLSVHDGTALVLTGANGSGKTTLLRMLAGFSRPSAGEILWNGHDITSPGVFQQYKLQLNWMSLKDAVKEKLTVLENVQWFELLEGKDGSRSGPAIELMGLGRLMNEKARMLSMGQRKRLQLARLLAIDRPIWLLDEPSVALDAEGTRLLEYIIAEHRKKGGIVFVATHLPIQIEDSMSLRLPQRFPRRKTLVDLVR

SEQ ID NO: 39775 - protein, 225 aa, Zea mays subsp. mays
  peptide (1)..(225): Ceres Seq. ID no. 13493325
  misc_feature (36)..(197): Pfam Name: Pfam Description:  ABC transporter
  misc_feature (5)..(224): NCBI GI NO: 15221728 NR Description: ABC transporter family protein
  misc_feature (19)..(223): NCBI GI NO: 39545846 NR Description: OSJNBb0060E08.17
  misc_feature (12)..(214): NCBI GI NO: 23016499 NR Description: hypothetical protein
  misc_feature (10)..(202): NCBI GI NO: 22962200 NR Description: hypothetical protein [Rhodopseudomonas palustris]
  misc_feature (11)..(210): NCBI GI NO: 15802754 NR Description: ATP binding protein of heme exporter A
  misc_feature (18)..(210): NCBI GI NO: 24113587 NR Description: Heme exporter protein A
  misc_feature (18)..(210): NCBI GI NO: 9911057 NR Description: HEME EXPORTER PROTEIN A
  misc_feature (18)..(210): NCBI GI NO: 16130138 NR Description: ATP binding protein of heme exporter A
  misc_feature (18)..(210): NCBI GI NO: 26248584 NR Description: Heme exporter protein A [Escherichia coli CFT073]
  misc_feature (6)..(215): NCBI GI NO: 22965489 NR Description: hypothetical protein [Rhodospirillum rubrum]
MPPLRPPPPRLLLNNVSCMRNAQTVLRDINLSVHDGTALVLTGANGSGKTTLLRMLAGFSRPSAGEILWNGHDITSPGVFQQYKLQLNWMSLKDAVKEKLTVLENVQWFELLEGKDGSRSGPAIELMGLGRLMNEKARMLSMGQRKRLQLARLLAIDRPIWLLDEPSVALDAEGTRLLEYIIAEHRKKGGIVFVATHLPIQIEDSMSLRLPQRFPRRKTLVDLVR

SEQ ID NO: 39776 - protein, 207 aa, Zea mays subsp. mays
  peptide (1)..(207): Ceres Seq. ID no. 13493326
  misc_feature (18)..(179): Pfam Name: Pfam Description:  ABC transporter
  misc_feature (1)..(206): NCBI GI NO: 15221728 NR Description: ABC transporter family protein
  misc_feature (1)..(205): NCBI GI NO: 39545846 NR Description: OSJNBb0060E08.17
  misc_feature (1)..(196): NCBI GI NO: 23016499 NR Description: hypothetical protein
  misc_feature (1)..(184): NCBI GI NO: 22962200 NR Description: hypothetical protein [Rhodopseudomonas palustris]
  misc_feature (1)..(192): NCBI GI NO: 15802754 NR Description: ATP binding protein of heme exporter A
  misc_feature (1)..(192): NCBI GI NO: 24113587 NR Description: Heme exporter protein A
  misc_feature (1)..(192): NCBI GI NO: 9911057 NR Description: HEME EXPORTER PROTEIN A
  misc_feature (1)..(192): NCBI GI NO: 16130138 NR Description: ATP binding protein of heme exporter A
  misc_feature (1)..(192): NCBI GI NO: 26248584 NR Description: Heme exporter protein A [Escherichia coli CFT073]
  misc_feature (1)..(197): NCBI GI NO: 22965489 NR Description: hypothetical protein [Rhodospirillum rubrum]
MRNAQTVLRDINLSVHDGTALVLTGANGSGKTTLLRMLAGFSRPSAGEILWNGHDITSPGVFQQYKLQLNWMSLKDAVKEKLTVLENVQWFELLEGKDGSRSGPAIELMGLGRLMNEKARMLSMGQRKRLQLARLLAIDRPIWLLDEPSVALDAEGTRLLEYIIAEHRKKGGIVFVATHLPIQIEDSMSLRLPQRFPRRKTLVDLVR

SEQ ID NO: 39777 - DNA, 926 bp, Zea mays subsp. mays
  misc_feature (1)..(926): Ceres Seq. ID no. 12416929
  misc_feature (535)..(535): n is a, c, t, g, unknown, or other
  misc_feature (708)..(708): n is a, c, t, g, unknown, or other
  misc_feature (752)..(752): n is a, c, t, g, unknown, or other
accagcgcagaatcagcaaacgcgccattgacgcgcactcgtagtcttgactcttgcgtgcttccctcgtcttctcggacgttccgttccatcgccatggcggaccagcttagcgaggagcagattgccgagttcaaggaagctttcagcctcttcgacaaggacggcgacggttgcatcacaaccaaggagctcggaaccgtgatgcggtctctcgggcagaaccccaccgaggcggagctgcaggacatgatcgccgaggtggacagcaacggcagcggcaccatcgacgagcaggagttcctgggcctgatggcgcgcaagatgagggacgcggagtcggaggaggagctcagggaggcgttccgcgtgttcgacaaggaccagaacggggtgatctccgcggccgagctccggcacgtgatgaccaacctcggggagaagctgagcgagcaggaggtggccgagatggtccgcgaggccgacgtggaccgcgacggccacatcaactacgacgagttcgtcaaggtcatgncggccaagcgaaggagcaagaggacggaggagaaggcgacgcgcggcaagaagaagccggcggcggcgccgtccgacgccggcaagcgtggccagaaatgcgtgatcctgtgagccggagcttcggtcgtccagtacatgctggtgctgcgtgcgtgtcacccgctcgacctntgcttccggcacaccagctgcgggaagctccacttctgctgttntgcaggtgaatgtagctgtttgtaaacttatcagagcgtgtttgggagcatgattgaatgggaaccccctcagttcctccaatccaagggattttagtcatctcgatctcctctaatctccttgcccccaaacaaaccattaaataagaaaaacggaggaagtaactgtttgcc

SEQ ID NO: 39778 - protein, 215 aa, Zea mays subsp. mays
  peptide (1)..(215): Ceres Seq. ID no. 12416930
  misc_feature (44)..(72): Pfam Name: Pfam Description:  EF hand
  misc_feature (33)..(215): NCBI GI NO: 7441481 NR Description: probable calmodulin - rice
  misc_feature (33)..(215): NCBI GI NO: 34909152 NR Description: putative calmodulin
  misc_feature (33)..(215): NCBI GI NO: 30683369 NR Description: calmodulin [Arabidopsis thaliana]
  misc_feature (33)..(215): NCBI GI NO: 115492 NR Description: Calmodulin-related protein
  misc_feature (33)..(181): NCBI GI NO: 1076793 NR Description: calmodulin cam2 - maize
  misc_feature (33)..(181): NCBI GI NO: 1754999 NR Description: calmodulin TaCaM2-2
  misc_feature (33)..(181): NCBI GI NO: 34903330 NR Description: unnamed protein product
  misc_feature (33)..(181): NCBI GI NO: 100665 NR Description: calmodulin 2 (clone lambda DASH) - rice
  misc_feature (33)..(181): NCBI GI NO: 2129978 NR Description: calmodulin PCM2/PCM4/PCM5/PCM6/PCM7/PCM8 - potato
  misc_feature (33)..(181): NCBI GI NO: 20186 NR Description: calmodulin [Oryza sativa]
  misc_feature (179)..(179): Xaa is any aa, unknown or other
TSAESANAPLTRTRSLDSCVLPSSSRTFRSIAMADQLSEEQIAEFKEAFSLFDKDGDGCITTKELGTVMRSLGQNPTEAELQDMIAEVDSNGSGTIDEQEFLGLMARKMRDAESEEELREAFRVFDKDQNGVISAAELRHVMTNLGEKLSEQEVAEMVREADVDRDGHINYDEFVKVMXAKRRSKRTEEKATRGKKKPAAAPSDAGKRGQKCVIL

SEQ ID NO: 39779 - protein, 183 aa, Zea mays subsp. mays
  peptide (1)..(183): Ceres Seq. ID no. 12416931
  misc_feature (12)..(40): Pfam Name: Pfam Description:  EF hand
  misc_feature (1)..(183): NCBI GI NO: 7441481 NR Description: probable calmodulin - rice
  misc_feature (1)..(183): NCBI GI NO: 34909152 NR Description: putative calmodulin
  misc_feature (1)..(183): NCBI GI NO: 30683369 NR Description: calmodulin [Arabidopsis thaliana]
  misc_feature (1)..(183): NCBI GI NO: 115492 NR Description: Calmodulin-related protein
  misc_feature (1)..(149): NCBI GI NO: 1076793 NR Description: calmodulin cam2 - maize
  misc_feature (1)..(149): NCBI GI NO: 1754999 NR Description: calmodulin TaCaM2-2
  misc_feature (1)..(149): NCBI GI NO: 34903330 NR Description: unnamed protein product
  misc_feature (1)..(149): NCBI GI NO: 100665 NR Description: calmodulin 2 (clone lambda DASH) - rice
  misc_feature (1)..(149): NCBI GI NO: 2129978 NR Description: calmodulin PCM2/PCM4/PCM5/PCM6/PCM7/PCM8 - potato
  misc_feature (1)..(149): NCBI GI NO: 20186 NR Description: calmodulin [Oryza sativa]
  misc_feature (147)..(147): Xaa is any aa, unknown or other
MADQLSEEQIAEFKEAFSLFDKDGDGCITTKELGTVMRSLGQNPTEAELQDMIAEVDSNGSGTIDEQEFLGLMARKMRDAESEEELREAFRVFDKDQNGVISAAELRHVMTNLGEKLSEQEVAEMVREADVDRDGHINYDEFVKVMXAKRRSKRTEEKATRGKKKPAAAPSDAGKRGQKCVIL

SEQ ID NO: 39780 - protein, 147 aa, Zea mays subsp. mays
  peptide (1)..(147): Ceres Seq. ID no. 12416932
  misc_feature (1)..(147): NCBI GI NO: 7441481 NR Description: probable calmodulin - rice
  misc_feature (1)..(147): NCBI GI NO: 34909152 NR Description: putative calmodulin
  misc_feature (1)..(147): NCBI GI NO: 30683369 NR Description: calmodulin [Arabidopsis thaliana]
  misc_feature (1)..(147): NCBI GI NO: 115492 NR Description: Calmodulin-related protein
  misc_feature (1)..(113): NCBI GI NO: 1076793 NR Description: calmodulin cam2 - maize
  misc_feature (1)..(113): NCBI GI NO: 1754999 NR Description: calmodulin TaCaM2-2
  misc_feature (1)..(113): NCBI GI NO: 34903330 NR Description: unnamed protein product
  misc_feature (1)..(113): NCBI GI NO: 100665 NR Description: calmodulin 2 (clone lambda DASH) - rice
  misc_feature (1)..(113): NCBI GI NO: 2129978 NR Description: calmodulin PCM2/PCM4/PCM5/PCM6/PCM7/PCM8 - potato
  misc_feature (1)..(113): NCBI GI NO: 20186 NR Description: calmodulin [Oryza sativa]
  misc_feature (111)..(111): Xaa is any aa, unknown or other
MRSLGQNPTEAELQDMIAEVDSNGSGTIDEQEFLGLMARKMRDAESEEELREAFRVFDKDQNGVISAAELRHVMTNLGEKLSEQEVAEMVREADVDRDGHINYDEFVKVMXAKRRSKRTEEKATRGKKKPAAAPSDAGKRGQKCVIL

SEQ ID NO: 39781 - DNA, 891 bp, Zea mays subsp. mays
  misc_feature (1)..(891): Ceres Seq. ID no. 12416118
  misc_feature (882)..(882): n is a, c, t, g, unknown, or other
  misc_feature (875)..(875): n is a, c, t, g, unknown, or other
  misc_feature (796)..(796): n is a, c, t, g, unknown, or other
  misc_feature (885)..(885): n is a, c, t, g, unknown, or other
  misc_feature (884)..(884): n is a, c, t, g, unknown, or other
  misc_feature (883)..(883): n is a, c, t, g, unknown, or other
  misc_feature (716)..(716): n is a, c, t, g, unknown, or other
  misc_feature (501)..(501): n is a, c, t, g, unknown, or other
taatccgaactatttcttttcgtcaaactaaagtgaagacaacgttttgctccgcaggacatgttcacggcgggtacggacacgtcgtcgatcatcgtggagtgggcgatggcggagatgctcaagaacccgagcgtcatggcgcgcgcgcaggaggagctggaccgcgcggtgggccggggccggcgcctggaggagtcggacctgcccggcctcccctacctgcaggcggtgtgcaaggaggccatgcggctgcacccgtccacgccgctcagcctcccgcacttctccttggacgcctgcgacgacgtcgacggctaccgcgtcccggccaacacccgcctgctcgtcaacgtctgggccatcggccgggacccggaggcctgggagaggcccctcgacttccgccccgagcgcttcctgcccgggggcggcgcggagaaggtcgacccgctggggaactgcttcgagctcatcccgttcggcgccggccggaggatntgcgcggggaagctggcgggcatggtgttcgtgcagtacttcctgggcacgctgctgcacgcgttcgactggcgcctgcctgacggcgaggagaagctggacatgagcgagacgttcggcctcgcgctgcccaaggcagtgccgctccgcgccgtcgccacgccacggctcgtgccggaagcctatgcctgagcctgagttagctgtcagagttnttcacgcgtgctgtcccaacaagcatggtttggcttggatggtttactctgttggtgttgctgccttcctgcatacgtgngcatacactagtattctgtgttgatcctacacttgttgcctggtatagtacacaacatttgaacagatgatggttgatntgaactnnnnggagtt

SEQ ID NO: 39782 - protein, 210 aa, Zea mays subsp. mays
  peptide (1)..(210): Ceres Seq. ID no. 12416119
  misc_feature (1)..(199): Pfam Name: Pfam Description:  Cytochrome P450
  misc_feature (1)..(209): NCBI GI NO: 30421433 NR Description: flavonoid 3',5'-hydroxylase [Gossypium hirsutum]
  misc_feature (1)..(209): NCBI GI NO: 37545079 NR Description: flavonoid 3', 5'-hydroxylase [Glycine max]
  misc_feature (1)..(209): NCBI GI NO: 5915819 NR Description: Flavonoid 3',5'-hydroxylase
  misc_feature (1)..(210): NCBI GI NO: 22759901 NR Description: flavonoid 3',5'-hydroxylase
  misc_feature (1)..(209): NCBI GI NO: 1345642 NR Description: Flavonoid 3',5'-hydroxylase 1
  misc_feature (1)..(210): NCBI GI NO: 1345643 NR Description: Flavonoid 3',5'-hydroxylase 2
  misc_feature (1)..(209): NCBI GI NO: 584998 NR Description: Flavonoid 3',5'-hydroxylase
  misc_feature (1)..(210): NCBI GI NO: 3954807 NR Description: flavonoid 3',5'-hydroxylase [Catharanthus roseus]
  misc_feature (1)..(209): NCBI GI NO: 12231884 NR Description: flavonoid 3',5'-hydroxylase [Lycianthes rantonnei]
  misc_feature (1)..(210): NCBI GI NO: 5915817 NR Description: Flavonoid 3',5'-hydroxylase
  misc_feature (147)..(147): Xaa is any aa, unknown or other
MFTAGTDTSSIIVEWAMAEMLKNPSVMARAQEELDRAVGRGRRLEESDLPGLPYLQAVCKEAMRLHPSTPLSLPHFSLDACDDVDGYRVPANTRLLVNVWAIGRDPEAWERPLDFRPERFLPGGGAEKVDPLGNCFELIPFGAGRRXCAGKLAGMVFVQYFLGTLLHAFDWRLPDGEEKLDMSETFGLALPKAVPLRAVATPRLVPEAYA

SEQ ID NO: 39783 - protein, 194 aa, Zea mays subsp. mays
  peptide (1)..(194): Ceres Seq. ID no. 12416120
  misc_feature (1)..(183): Pfam Name: Pfam Description:  Cytochrome P450
  misc_feature (1)..(193): NCBI GI NO: 30421433 NR Description: flavonoid 3',5'-hydroxylase [Gossypium hirsutum]
  misc_feature (1)..(193): NCBI GI NO: 37545079 NR Description: flavonoid 3', 5'-hydroxylase [Glycine max]
  misc_feature (1)..(193): NCBI GI NO: 5915819 NR Description: Flavonoid 3',5'-hydroxylase
  misc_feature (1)..(194): NCBI GI NO: 22759901 NR Description: flavonoid 3',5'-hydroxylase
  misc_feature (1)..(193): NCBI GI NO: 1345642 NR Description: Flavonoid 3',5'-hydroxylase 1
  misc_feature (1)..(194): NCBI GI NO: 1345643 NR Description: Flavonoid 3',5'-hydroxylase 2
  misc_feature (1)..(193): NCBI GI NO: 584998 NR Description: Flavonoid 3',5'-hydroxylase
  misc_feature (1)..(194): NCBI GI NO: 3954807 NR Description: flavonoid 3',5'-hydroxylase [Catharanthus roseus]
  misc_feature (1)..(193): NCBI GI NO: 12231884 NR Description: flavonoid 3',5'-hydroxylase [Lycianthes rantonnei]
  misc_feature (1)..(194): NCBI GI NO: 5915817 NR Description: Flavonoid 3',5'-hydroxylase
  misc_feature (131)..(131): Xaa is any aa, unknown or other
MAEMLKNPSVMARAQEELDRAVGRGRRLEESDLPGLPYLQAVCKEAMRLHPSTPLSLPHFSLDACDDVDGYRVPANTRLLVNVWAIGRDPEAWERPLDFRPERFLPGGGAEKVDPLGNCFELIPFGAGRRXCAGKLAGMVFVQYFLGTLLHAFDWRLPDGEEKLDMSETFGLALPKAVPLRAVATPRLVPEAYA

SEQ ID NO: 39784 - protein, 193 aa, Zea mays subsp. mays
  peptide (1)..(193): Ceres Seq. ID no. 12416121
  misc_feature (167)..(167): Xaa is any aa, unknown or other
IRTISFRQTKVKTTFCSAGHVHGGYGHVVDHRGVGDGGDAQEPERHGARAGGAGPRGGPGPAPGGVGPARPPLPAGGVQGGHAAAPVHAAQPPALLLGRLRRRRRLPRPGQHPPARQRLGHRPGPGGLGEAPRLPPRALPARGRRGEGRPAGELLRAHPVRRRPEDXRGEAGGHGVRAVLPGHAAARVRLAPA

SEQ ID NO: 39785 - DNA, 1254 bp, Zea mays subsp. mays; identical to SEQ ID NO: 28413
  misc_feature (1)..(1254): Ceres Seq. ID no. 13498495

SEQ ID NO: 39786 - protein, 417 aa, Zea mays subsp. mays; identical to SEQ ID NO: 28414
  peptide (1)..(417): Ceres Seq. ID no. 13498496
  misc_feature (96)..(199): Pfam Name: I, L, M and V Pfam Description: tRNA synthetases class I
  misc_feature (45)..(413): NCBI GI NO: 37535144 NR Description: putative cysteinyl-tRNA synthetase
  misc_feature (65)..(408): NCBI GI NO: 25293240 NR Description: probable cysteinyl-tRNA synthetase
  misc_feature (73)..(408): NCBI GI NO: 18402580 NR Description: cysteinyl-tRNA synthetase -related
  misc_feature (65)..(415): NCBI GI NO: 15241557 NR Description: cysteine-tRNA ligase -related protein
  misc_feature (65)..(384): NCBI GI NO: 9758060 NR Description: cysteine-tRNA ligase [Arabidopsis thaliana]
  misc_feature (66)..(402): NCBI GI NO: 23055378 NR Description: hypothetical protein [Geobacter metallireducens]
  misc_feature (66)..(408): NCBI GI NO: 23001592 NR Description: hypothetical protein [Magnetococcus sp. MC-1]
  misc_feature (64)..(380): NCBI GI NO: 15228880 NR Description: cysteine-tRNA ligase-related protein
  misc_feature (66)..(409): NCBI GI NO: 39998454 NR Description: cysteinyl-tRNA synthetase
  misc_feature (66)..(390): NCBI GI NO: 34497201 NR Description: cysteinyl-tRNA synthetase

SEQ ID NO: 39787 - protein, 397 aa, Zea mays subsp. mays; identical to SEQ ID NO: 28415
  peptide (1)..(397): Ceres Seq. ID no. 13498497
  misc_feature (76)..(179): Pfam Name: I, L, M and V Pfam Description: tRNA synthetases class I
  misc_feature (25)..(393): NCBI GI NO: 37535144 NR Description: putative cysteinyl-tRNA synthetase
  misc_feature (45)..(388): NCBI GI NO: 25293240 NR Description: probable cysteinyl-tRNA synthetase
  misc_feature (53)..(388): NCBI GI NO: 18402580 NR Description: cysteinyl-tRNA synthetase -related
  misc_feature (45)..(395): NCBI GI NO: 15241557 NR Description: cysteine-tRNA ligase -related protein
  misc_feature (45)..(364): NCBI GI NO: 9758060 NR Description: cysteine-tRNA ligase [Arabidopsis thaliana]
  misc_feature (46)..(382): NCBI GI NO: 23055378 NR Description: hypothetical protein [Geobacter metallireducens]
  misc_feature (46)..(388): NCBI GI NO: 23001592 NR Description: hypothetical protein [Magnetococcus sp. MC-1]
  misc_feature (44)..(360): NCBI GI NO: 15228880 NR Description: cysteine-tRNA ligase-related protein
  misc_feature (46)..(389): NCBI GI NO: 39998454 NR Description: cysteinyl-tRNA synthetase
  misc_feature (46)..(370): NCBI GI NO: 34497201 NR Description: cysteinyl-tRNA synthetase

SEQ ID NO: 39788 - protein, 385 aa, Zea mays subsp. mays; identical to SEQ ID NO: 28416
  peptide (1)..(385): Ceres Seq. ID no. 13498498
  misc_feature (64)..(167): Pfam Name: I, L, M and V Pfam Description: tRNA synthetases class I
  misc_feature (13)..(381): NCBI GI NO: 37535144 NR Description: putative cysteinyl-tRNA synthetase
  misc_feature (33)..(376): NCBI GI NO: 25293240 NR Description: probable cysteinyl-tRNA synthetase
  misc_feature (41)..(376): NCBI GI NO: 18402580 NR Description: cysteinyl-tRNA synthetase -related
  misc_feature (33)..(383): NCBI GI NO: 15241557 NR Description: cysteine-tRNA ligase -related protein
  misc_feature (33)..(352): NCBI GI NO: 9758060 NR Description: cysteine-tRNA ligase [Arabidopsis thaliana]
  misc_feature (34)..(370): NCBI GI NO: 23055378 NR Description: hypothetical protein [Geobacter metallireducens]
  misc_feature (34)..(376): NCBI GI NO: 23001592 NR Description: hypothetical protein [Magnetococcus sp. MC-1]
  misc_feature (32)..(348): NCBI GI NO: 15228880 NR Description: cysteine-tRNA ligase-related protein
  misc_feature (34)..(377): NCBI GI NO: 39998454 NR Description: cysteinyl-tRNA synthetase
  misc_feature (34)..(358): NCBI GI NO: 34497201 NR Description: cysteinyl-tRNA synthetase

SEQ ID NO: 39789 - DNA, 1142 bp, Zea mays subsp. mays
  misc_feature (1)..(1142): Ceres Seq. ID no. 13499219
tagaacatcctaatcgaaaaatgacaatacccggcggcgagcaacggatcctccctgtcccggccgtgctcttcatccgccgcccgggcgcgcctttcggcaacgcgatgcacgagcgcttccgcgtgctggagctgccctcgccggcctcgggcgagcaggcagcggctttcctcgccgccgccgcggcagagccggacccgcctcgcgccgcggtcgtcatgggaggcggcgccgtccgcgcggacgcggcgttcctcgacgccgtcccctcggtccgctgcctcgtcagcacggccgcgggcgttgaccacatcgacctcgccgagtgcgcgcgccgcggcgtcgccgtcgccaactctgggacagtctacgccgccgacgtcgcagaccacgccgtccgcatgctcatcgacgtgcttcgccgcgtgtcggcggcggggcggttcgtacggcgcgggctatggccgctgcaggagggcgagtaccctctcggctccaagctagggggcaagcgtgtgggcatcatcggattggggaacattggttcgctggttgcaaagaggctggaagctttcggctgtgtcatctgctacaattccagaagacgcatggactcagtctcctacagatacttctccaacgttcagcgtcttgcttccgaatcagacgtgctcgttgtcgcatgcgcactgaacaaagagacacgccacattgtgaatgaggatgtcctggaggccctggggaaggatggggtcgtcataaacattggccgaggcgcaagcatcgacgaggcggccttagtcagcgcgctgaaagagggaaggatcgctggagctgggctcgaagtctttgagaacgaacccaaggtgcctccggagctcatgtccatggacagtgtggtgctgacgcctcattcagcggttttcacgacggagtcgagggcggacctgtgtcagcacctgatttgcaacctggaagcgttctttgccggtaagccactcatcacgcccgtgctgcgtttgacagagtaggtcgtgttgcaggctagttaagctattgggaggtaactaaattgttatttgtatatatagctgcaaactatagggctgtgttccttataaaatggatccattgattcg

SEQ ID NO: 39790 - protein, 343 aa, Zea mays subsp. mays
  peptide (1)..(343): Ceres Seq. ID no. 13499220
  misc_feature (7)..(339): NCBI GI NO: 38345306 NR Description: OSJNBb0085F13.6
  misc_feature (39)..(339): NCBI GI NO: 21636166 NR Description: unknown [Aegilops tauschii]
  misc_feature (19)..(339): NCBI GI NO: 7485630 NR Description: probable glycerate dehydrogenase
  misc_feature (20)..(338): NCBI GI NO: 15222015 NR Description: oxidoreductase family [Arabidopsis thaliana]
  misc_feature (58)..(338): NCBI GI NO: 38345308 NR Description: OSJNBb0085F13.13
  misc_feature (22)..(339): NCBI GI NO: 34904262 NR Description: putative Caulobacter crescentus D-isomer specific2-hydroxyacid dehydrogenases family
  misc_feature (73)..(339): NCBI GI NO: 15220005 NR Description: oxidoreductase family [Arabidopsis thaliana]
  misc_feature (20)..(338): NCBI GI NO: 23104708 NR Description: hypothetical protein [Azotobacter vinelandii]
  misc_feature (10)..(338): NCBI GI NO: 23011804 NR Description: hypothetical protein
  misc_feature (45)..(330): NCBI GI NO: 22979887 NR Description: hypothetical protein [Ralstonia metallidurans]
EHPNRKMTIPGGEQRILPVPAVLFIRRPGAPFGNAMHERFRVLELPSPASGEQAAAFLAAAAAEPDPPRAAVVMGGGAVRADAAFLDAVPSVRCLVSTAAGVDHIDLAECARRGVAVANSGTVYAADVADHAVRMLIDVLRRVSAAGRFVRRGLWPLQEGEYPLGSKLGGKRVGIIGLGNIGSLVAKRLEAFGCVICYNSRRRMDSVSYRYFSNVQRLASESDVLVVACALNKETRHIVNEDVLEALGKDGVVINIGRGASIDEAALVSALKEGRIAGAGLEVFENEPKVPPELMSMDSVVLTPHSAVFTTESRADLCQHLICNLEAFFAGKPLITPVLRLTE

SEQ ID NO: 39791 - protein, 337 aa, Zea mays subsp. mays
  peptide (1)..(337): Ceres Seq. ID no. 13499221
  misc_feature (1)..(333): NCBI GI NO: 38345306 NR Description: OSJNBb0085F13.6
  misc_feature (33)..(333): NCBI GI NO: 21636166 NR Description: unknown [Aegilops tauschii]
  misc_feature (13)..(333): NCBI GI NO: 7485630 NR Description: probable glycerate dehydrogenase
  misc_feature (14)..(332): NCBI GI NO: 15222015 NR Description: oxidoreductase family [Arabidopsis thaliana]
  misc_feature (52)..(332): NCBI GI NO: 38345308 NR Description: OSJNBb0085F13.13
  misc_feature (16)..(333): NCBI GI NO: 34904262 NR Description: putative Caulobacter crescentus D-isomer specific2-hydroxyacid dehydrogenases family
  misc_feature (67)..(333): NCBI GI NO: 15220005 NR Description: oxidoreductase family [Arabidopsis thaliana]
  misc_feature (14)..(332): NCBI GI NO: 23104708 NR Description: hypothetical protein [Azotobacter vinelandii]
  misc_feature (4)..(332): NCBI GI NO: 23011804 NR Description: hypothetical protein
  misc_feature (39)..(324): NCBI GI NO: 22979887 NR Description: hypothetical protein [Ralstonia metallidurans]
MTIPGGEQRILPVPAVLFIRRPGAPFGNAMHERFRVLELPSPASGEQAAAFLAAAAAEPDPPRAAVVMGGGAVRADAAFLDAVPSVRCLVSTAAGVDHIDLAECARRGVAVANSGTVYAADVADHAVRMLIDVLRRVSAAGRFVRRGLWPLQEGEYPLGSKLGGKRVGIIGLGNIGSLVAKRLEAFGCVICYNSRRRMDSVSYRYFSNVQRLASESDVLVVACALNKETRHIVNEDVLEALGKDGVVINIGRGASIDEAALVSALKEGRIAGAGLEVFENEPKVPPELMSMDSVVLTPHSAVFTTESRADLCQHLICNLEAFFAGKPLITPVLRLTE

SEQ ID NO: 39792 - protein, 308 aa, Zea mays subsp. mays
  peptide (1)..(308): Ceres Seq. ID no. 13499222
  misc_feature (1)..(304): NCBI GI NO: 38345306 NR Description: OSJNBb0085F13.6
  misc_feature (4)..(304): NCBI GI NO: 21636166 NR Description: unknown [Aegilops tauschii]
  misc_feature (1)..(304): NCBI GI NO: 7485630 NR Description: probable glycerate dehydrogenase
  misc_feature (1)..(303): NCBI GI NO: 15222015 NR Description: oxidoreductase family [Arabidopsis thaliana]
  misc_feature (23)..(303): NCBI GI NO: 38345308 NR Description: OSJNBb0085F13.13
  misc_feature (1)..(304): NCBI GI NO: 34904262 NR Description: putative Caulobacter crescentus D-isomer specific2-hydroxyacid dehydrogenases family
  misc_feature (38)..(304): NCBI GI NO: 15220005 NR Description: oxidoreductase family [Arabidopsis thaliana]
  misc_feature (1)..(303): NCBI GI NO: 23104708 NR Description: hypothetical protein [Azotobacter vinelandii]
  misc_feature (1)..(303): NCBI GI NO: 23011804 NR Description: hypothetical protein
  misc_feature (10)..(295): NCBI GI NO: 22979887 NR Description: hypothetical protein [Ralstonia metallidurans]
MHERFRVLELPSPASGEQAAAFLAAAAAEPDPPRAAVVMGGGAVRADAAFLDAVPSVRCLVSTAAGVDHIDLAECARRGVAVANSGTVYAADVADHAVRMLIDVLRRVSAAGRFVRRGLWPLQEGEYPLGSKLGGKRVGIIGLGNIGSLVAKRLEAFGCVICYNSRRRMDSVSYRYFSNVQRLASESDVLVVACALNKETRHIVNEDVLEALGKDGVVINIGRGASIDEAALVSALKEGRIAGAGLEVFENEPKVPPELMSMDSVVLTPHSAVFTTESRADLCQHLICNLEAFFAGKPLITPVLRLTE

SEQ ID NO: 39793 - DNA, 868 bp, Zea mays subsp. mays
  misc_feature (1)..(868): Ceres Seq. ID no. 12358010
gtattgcgggaactgaaagcaaaccaaaaaagaaagagagggggagagacacagaggcctcactccacacactgtcttgtctctcagtcccagagctttcttggatcgcgaggaatccactggaaattttgcaattgtagtagagaactgtatcgtccgacgaaggtgcatggtgttggccatgggtcacggcagggaacagagacgagcaggtcggcgctctccccccagctcattgatcctgtcctcgctataaggtagtcctgcggtggcctccgaatttcactcaatcgaacacgacatgaagcggccacgcggcgccagtccccctctggctgcgatgaccaatccgaacgatgatggttacggcgtggtcgggatggaggcggacgcagacgcggacgcggacgaggagatgatggcgtgcggcggcggcggggagaagaagcggcgcctgagctccgagcaggtgcgcgcgctggagcggagcttcgaggtggagaacaagctggagccggagcgcaaggcgcggctggcgcgcgacctcggcctgcagccgcgccaggtcgccgtctggttccagaaccgccgcgcccgctggaagaccaagcagctggagcgcgactactccgcgctccgccagtcctacgacgcgctgcggcacgaccacgacgcgctgcgccgcgacaaggacgccctcctcgccgagatcaaggagctcaaggcgaagctcggggacgaggaggcagcggcgagcttcacgtcggtcaaggcggagccggcggcctcggacgggcctccccccgtaggggtggggtcgtccgagagtgactccagcgcggtgctgaacgacgcggacccgcccgtg

SEQ ID NO: 39794 - protein, 189 aa, Zea mays subsp. mays
  peptide (1)..(189): Ceres Seq. ID no. 12358011
  misc_feature (48)..(102): Pfam Name: Pfam Description:  Homeobox domain
  misc_feature (1)..(186): NCBI GI NO: 5006853 NR Description: homeodomain leucine zipper protein [Oryza sativa]
  misc_feature (20)..(188): NCBI GI NO: 33943626 NR Description: homeodomain leucine-zipper protein Hox8
  misc_feature (20)..(188): NCBI GI NO: 37533686 NR Description: putative homeodomain leucine zipper protein
  misc_feature (3)..(184): NCBI GI NO: 18034439 NR Description: homeodomain leucine zipper protein CPHB-4
  misc_feature (41)..(154): NCBI GI NO: 34902432 NR Description: Unknown protein
  misc_feature (36)..(164): NCBI GI NO: 22651698 NR Description: homeodomain protein Hfi22 [Nicotiana tabacum]
  misc_feature (10)..(188): NCBI GI NO: 8133126 NR Description: hb-6-like protein
  misc_feature (26)..(159): NCBI GI NO: 5305602 NR Description: homeobox protein ATHB6 [Arabidopsis thaliana]
  misc_feature (26)..(159): NCBI GI NO: 25386231 NR Description: homeodomain transcription factor (ATHB-6)
  misc_feature (26)..(159): NCBI GI NO: 18399966 NR Description: homeodomain transcription factor
MKRPRGASPPLAAMTNPNDDGYGVVGMEADADADADEEMMACGGGGEKKRRLSSEQVRALERSFEVENKLEPERKARLARDLGLQPRQVAVWFQNRRARWKTKQLERDYSALRQSYDALRHDHDALRRDKDALLAEIKELKAKLGDEEAAASFTSVKAEPAASDGPPPVGVGSSESDSSAVLNDADPPV

SEQ ID NO: 39795 - protein, 176 aa, Zea mays subsp. mays
  peptide (1)..(176): Ceres Seq. ID no. 12358012
  misc_feature (35)..(89): Pfam Name: Pfam Description:  Homeobox domain
  misc_feature (1)..(173): NCBI GI NO: 5006853 NR Description: homeodomain leucine zipper protein [Oryza sativa]
  misc_feature (7)..(175): NCBI GI NO: 33943626 NR Description: homeodomain leucine-zipper protein Hox8
  misc_feature (7)..(175): NCBI GI NO: 37533686 NR Description: putative homeodomain leucine zipper protein
  misc_feature (1)..(171): NCBI GI NO: 18034439 NR Description: homeodomain leucine zipper protein CPHB-4
  misc_feature (28)..(141): NCBI GI NO: 34902432 NR Description: Unknown protein
  misc_feature (23)..(151): NCBI GI NO: 22651698 NR Description: homeodomain protein Hfi22 [Nicotiana tabacum]
  misc_feature (1)..(175): NCBI GI NO: 8133126 NR Description: hb-6-like protein
  misc_feature (13)..(146): NCBI GI NO: 5305602 NR Description: homeobox protein ATHB6 [Arabidopsis thaliana]
  misc_feature (13)..(146): NCBI GI NO: 18399966 NR Description: homeodomain transcription factor
  misc_feature (13)..(146): NCBI GI NO: 25386231 NR Description: homeodomain transcription factor (ATHB-6)
MTNPNDDGYGVVGMEADADADADEEMMACGGGGEKKRRLSSEQVRALERSFEVENKLEPERKARLARDLGLQPRQVAVWFQNRRARWKTKQLERDYSALRQSYDALRHDHDALRRDKDALLAEIKELKAKLGDEEAAASFTSVKAEPAASDGPPPVGVGSSESDSSAVLNDADPPV

SEQ ID NO: 39796 - protein, 163 aa, Zea mays subsp. mays
  peptide (1)..(163): Ceres Seq. ID no. 12358013
  misc_feature (22)..(76): Pfam Name: Pfam Description:  Homeobox domain
  misc_feature (1)..(160): NCBI GI NO: 5006853 NR Description: homeodomain leucine zipper protein [Oryza sativa]
  misc_feature (1)..(162): NCBI GI NO: 33943626 NR Description: homeodomain leucine-zipper protein Hox8
  misc_feature (1)..(162): NCBI GI NO: 37533686 NR Description: putative homeodomain leucine zipper protein
  misc_feature (1)..(158): NCBI GI NO: 18034439 NR Description: homeodomain leucine zipper protein CPHB-4
  misc_feature (15)..(128): NCBI GI NO: 34902432 NR Description: Unknown protein
  misc_feature (10)..(138): NCBI GI NO: 22651698 NR Description: homeodomain protein Hfi22 [Nicotiana tabacum]
  misc_feature (1)..(162): NCBI GI NO: 8133126 NR Description: hb-6-like protein
  misc_feature (1)..(133): NCBI GI NO: 5305602 NR Description: homeobox protein ATHB6 [Arabidopsis thaliana]
  misc_feature (1)..(133): NCBI GI NO: 18399966 NR Description: homeodomain transcription factor
  misc_feature (1)..(133): NCBI GI NO: 25386231 NR Description: homeodomain transcription factor (ATHB-6)
MEADADADADEEMMACGGGGEKKRRLSSEQVRALERSFEVENKLEPERKARLARDLGLQPRQVAVWFQNRRARWKTKQLERDYSALRQSYDALRHDHDALRRDKDALLAEIKELKAKLGDEEAAASFTSVKAEPAASDGPPPVGVGSSESDSSAVLNDADPPV

SEQ ID NO: 39797 - DNA, 1182 bp, Zea mays subsp. mays
  misc_feature (1)..(1182): Ceres Seq. ID no. 12359313
acggactggggaccgtctctctcctgtcgagctcccacgtactcgtgcacacaacacagctgctgctcaaagagccacatgcctagtagactagtcttagtagctagcttagagagagggaggggagaggatcagaggaggcgaggggaaggaaggagaggagaagaagcaaccaaccaagaacaagagaaggtaagaaggcgttagctaggctaccggagaggaggagagccggcgcaccatggatcaacagcagcaccaggagcggccgtgggaggtgtaccgggagtgcatgcgcaaccacgcggcgaagctcgggacatacgcctccgacggatgctgcgagtacacccccgacgacggccagcccgcagcgatgctctgcgccgcctgcggctgccaccgcaacttccaccggaaggcgttcctcgccgacgctgcggcgggagcgcacggcggcgcgcacggggcaatgctgccctctcccggcgcgtccccgggctacggcatgcaccacatggcgattgctgcggccggcatgggcggtgacgccggcgcgcacggctcctgctccgggtccgggggcaggcgccggacgcggaccaagttcacggacgagcagaaggagcgcatggcgcggttggcggagcggctcggctggcggatgcccaagcgggagcccggccgcgcgctgggggacgacgaggtgggccgcttctgccgggagatcggggtcaccaggcaggtcttcaaggtatggatgcacaaccacaagtccggtggtggcggcagccagggcgagggcgccagcgctggcgctgccggagccgctcagacgacgtcgtcgtccacgacgcgtggcggcggcggcggcggcgttgttggaggaggcgggagcatgtccacggcgatgatgggcgccgacgtcgaggacgacgaggaggtgaggggcagcgagatgtgcatgtaggctgtagccgcgccccgcgttacgtacgtggcatgcgcggcggcaatggcacggcacggcattgcctcgcccttggctgcgatcgaggattaacatctccttttgctgctaattcctttgggtccttttgcttcgatgtgttgatgattgattgtttatgatgagatattcattgttatcacggctatgctaattaatgctgtgtcagtgtc

SEQ ID NO: 39798 - protein, 242 aa, Zea mays subsp. mays
  peptide (1)..(242): Ceres Seq. ID no. 12359314
  misc_feature (14)..(60): Pfam Name: Pfam Description:  ZF-HD protein dimerisation region
  misc_feature (4)..(242): NCBI GI NO: 28301934 NR Description: putative ZF-HD homeobox protein
  misc_feature (84)..(217): NCBI GI NO: 32480091 NR Description: OSJNBb0086G13.8
  misc_feature (14)..(95): NCBI GI NO: 32480091 NR Description: OSJNBb0086G13.8
  misc_feature (14)..(182): NCBI GI NO: 15233925 NR Description: putative protein; protein id: At4g24660
  misc_feature (111)..(223): NCBI GI NO: 13277220 NR Description: ZF-HD homeobox protein [Flaveria bidentis]
  misc_feature (3)..(60): NCBI GI NO: 13277220 NR Description: ZF-HD homeobox protein [Flaveria bidentis]
  misc_feature (104)..(228): NCBI GI NO: 15228530 NR Description: unknown protein; protein id: At3g28920
  misc_feature (6)..(60): NCBI GI NO: 15228530 NR Description: unknown protein; protein id: At3g28920
  misc_feature (14)..(208): NCBI GI NO: 15242243 NR Description: putative protein; protein id: At5g15210.1
  misc_feature (14)..(178): NCBI GI NO: 18398714 NR Description: expressed protein; protein id: At2g18350
MDQQQHQERPWEVYRECMRNHAAKLGTYASDGCCEYTPDDGQPAAMLCAACGCHRNFHRKAFLADAAAGAHGGAHGAMLPSPGASPGYGMHHMAIAAAGMGGDAGAHGSCSGSGGRRRTRTKFTDEQKERMARLAERLGWRMPKREPGRALGDDEVGRFCREIGVTRQVFKVWMHNHKSGGGGSQGEGASAGAAGAAQTTSSSTTRGGGGGGVVGGGGSMSTAMMGADVEDDEEVRGSEMCM

SEQ ID NO: 39799 - protein, 225 aa, Zea mays subsp. mays
  peptide (1)..(225): Ceres Seq. ID no. 12359315
  misc_feature (1)..(43): Pfam Name: Pfam Description:  ZF-HD protein dimerisation region
  misc_feature (1)..(225): NCBI GI NO: 28301934 NR Description: putative ZF-HD homeobox protein
  misc_feature (67)..(200): NCBI GI NO: 32480091 NR Description: OSJNBb0086G13.8
  misc_feature (1)..(78): NCBI GI NO: 32480091 NR Description: OSJNBb0086G13.8
  misc_feature (1)..(165): NCBI GI NO: 15233925 NR Description: putative protein; protein id: At4g24660
  misc_feature (94)..(206): NCBI GI NO: 13277220 NR Description: ZF-HD homeobox protein [Flaveria bidentis]
  misc_feature (1)..(43): NCBI GI NO: 13277220 NR Description: ZF-HD homeobox protein [Flaveria bidentis]
  misc_feature (87)..(211): NCBI GI NO: 15228530 NR Description: unknown protein; protein id: At3g28920
  misc_feature (1)..(43): NCBI GI NO: 15228530 NR Description: unknown protein; protein id: At3g28920
  misc_feature (1)..(191): NCBI GI NO: 15242243 NR Description: putative protein; protein id: At5g15210.1
  misc_feature (1)..(161): NCBI GI NO: 18398714 NR Description: expressed protein; protein id: At2g18350
MRNHAAKLGTYASDGCCEYTPDDGQPAAMLCAACGCHRNFHRKAFLADAAAGAHGGAHGAMLPSPGASPGYGMHHMAIAAAGMGGDAGAHGSCSGSGGRRRTRTKFTDEQKERMARLAERLGWRMPKREPGRALGDDEVGRFCREIGVTRQVFKVWMHNHKSGGGGSQGEGASAGAAGAAQTTSSSTTRGGGGGGVVGGGGSMSTAMMGADVEDDEEVRGSEMCM

SEQ ID NO: 39800 - protein, 197 aa, Zea mays subsp. mays
  peptide (1)..(197): Ceres Seq. ID no. 12359316
  misc_feature (1)..(197): NCBI GI NO: 28301934 NR Description: putative ZF-HD homeobox protein
  misc_feature (39)..(172): NCBI GI NO: 32480091 NR Description: OSJNBb0086G13.8
  misc_feature (1)..(50): NCBI GI NO: 32480091 NR Description: OSJNBb0086G13.8
  misc_feature (1)..(137): NCBI GI NO: 15233925 NR Description: putative protein; protein id: At4g24660
  misc_feature (66)..(178): NCBI GI NO: 13277220 NR Description: ZF-HD homeobox protein [Flaveria bidentis]
  misc_feature (1)..(15): NCBI GI NO: 13277220 NR Description: ZF-HD homeobox protein [Flaveria bidentis]
  misc_feature (59)..(183): NCBI GI NO: 15228530 NR Description: unknown protein; protein id: At3g28920
  misc_feature (1)..(15): NCBI GI NO: 15228530 NR Description: unknown protein; protein id: At3g28920
  misc_feature (1)..(163): NCBI GI NO: 15242243 NR Description: putative protein; protein id: At5g15210.1
  misc_feature (1)..(133): NCBI GI NO: 18398714 NR Description: expressed protein; protein id: At2g18350
MLCAACGCHRNFHRKAFLADAAAGAHGGAHGAMLPSPGASPGYGMHHMAIAAAGMGGDAGAHGSCSGSGGRRRTRTKFTDEQKERMARLAERLGWRMPKREPGRALGDDEVGRFCREIGVTRQVFKVWMHNHKSGGGGSQGEGASAGAAGAAQTTSSSTTRGGGGGGVVGGGGSMSTAMMGADVEDDEEVRGSEMCM

SEQ ID NO: 39801 - DNA, 704 bp, Zea mays subsp. mays
  misc_feature (1)..(704): Ceres Seq. ID no. 12416245
gtgtgcacatgtgtctggcagcgtgccccaaggagctgcaggtggagcgcggtggcacggtggcgtgccggagcgcgtgtgaggcgttcgggcaggaccagtactgctgcagcggcgcgtacgcgacgccggcggcgtgccgcccgacggcctactcgtccatcttcaagtcggcgtgcccgcgcgcgtacagctacgcctacgacgacggctccagcaccttcacctgccacagcgccgccggctacaccatcgccttctgcctccctccgtcgtccgggttgcacggctctgatgtcactcccctcgtttcgccgccggcgtctgggcaaagcaccggcagagttggcggcgatggcgtcggaagcgccgaccagccgcctcatcctgctactggcaacagtgatggagggggctaccatcagctgtggatgacgatgtcgctagccagcacgctccacgatcagctgtggcttctgctgcctctgcctgcagtgctcttgctcctcctctgaccaccctcccggcctcccctcgctcaccatgaagatgaaatgaagctcttgtactgtaaggttcactcattgacggtatagtccccatgcgtagcagcggtagtaaaaccatccatcatgcccagtggggacggaaacatgtacagaatacagatacagactggatccgtttacgtatagattacgacg

SEQ ID NO: 39802 - protein, 170 aa, Zea mays subsp. mays
  peptide (1)..(170): Ceres Seq. ID no. 12416246
  misc_feature (7)..(87): Pfam Name: Pfam Description:  Thaumatin family
  misc_feature (7)..(150): NCBI GI NO: 34905146 NR Description: putative pathogenesis-related protein
  misc_feature (7)..(87): NCBI GI NO: 15238593 NR Description: thaumatin-like protein; protein id: At5g24620.1
  misc_feature (6)..(108): NCBI GI NO: 37531036 NR Description: putative thaumatin-like protein
  misc_feature (8)..(158): NCBI GI NO: 7442168 NR Description: pathogenesis-related protein F20M13
  misc_feature (8)..(158): NCBI GI NO: 18420282 NR Description: putative thaumatin-like protein
  misc_feature (8)..(158): NCBI GI NO: 21592749 NR Description: putative thaumatin-like protein
  misc_feature (7)..(112): NCBI GI NO: 25296204 NR Description: hypothetical protein T20H2.19
  misc_feature (7)..(112): NCBI GI NO: 30686652 NR Description: thaumatin family [Arabidopsis thaliana]
  misc_feature (7)..(97): NCBI GI NO: 30692042 NR Description: thaumatin family [Arabidopsis thaliana]
  misc_feature (6)..(87): NCBI GI NO: 30686314 NR Description: thaumatin family [Arabidopsis thaliana]
VHMCLAACPKELQVERGGTVACRSACEAFGQDQYCCSGAYATPAACRPTAYSSIFKSACPRAYSYAYDDGSSTFTCHSAAGYTIAFCLPPSSGLHGSDVTPLVSPPASGQSTGRVGGDGVGSADQPPHPATGNSDGGGYHQLWMTMSLASTLHDQLWLLLPLPAVLLLLL

SEQ ID NO: 39803 - protein, 168 aa, Zea mays subsp. mays
  peptide (1)..(168): Ceres Seq. ID no. 12416247
  misc_feature (5)..(85): Pfam Name: Pfam Description:  Thaumatin family
  misc_feature (5)..(148): NCBI GI NO: 34905146 NR Description: putative pathogenesis-related protein
  misc_feature (5)..(85): NCBI GI NO: 15238593 NR Description: thaumatin-like protein; protein id: At5g24620.1
  misc_feature (4)..(106): NCBI GI NO: 37531036 NR Description: putative thaumatin-like protein
  misc_feature (6)..(156): NCBI GI NO: 7442168 NR Description: pathogenesis-related protein F20M13
  misc_feature (6)..(156): NCBI GI NO: 21592749 NR Description: putative thaumatin-like protein
  misc_feature (6)..(156): NCBI GI NO: 18420282 NR Description: putative thaumatin-like protein
  misc_feature (5)..(110): NCBI GI NO: 25296204 NR Description: hypothetical protein T20H2.19
  misc_feature (5)..(110): NCBI GI NO: 30686652 NR Description: thaumatin family [Arabidopsis thaliana]
  misc_feature (5)..(95): NCBI GI NO: 30692042 NR Description: thaumatin family [Arabidopsis thaliana]
  misc_feature (4)..(85): NCBI GI NO: 30686314 NR Description: thaumatin family [Arabidopsis thaliana]
MCLAACPKELQVERGGTVACRSACEAFGQDQYCCSGAYATPAACRPTAYSSIFKSACPRAYSYAYDDGSSTFTCHSAAGYTIAFCLPPSSGLHGSDVTPLVSPPASGQSTGRVGGDGVGSADQPPHPATGNSDGGGYHQLWMTMSLASTLHDQLWLLLPLPAVLLLLL

SEQ ID NO: 39804 - protein, 144 aa, Zea mays subsp. mays
  peptide (1)..(144): Ceres Seq. ID no. 12416248
VCTCVWQRAPRSCRWSAVARWRAGARVRRSGRTSTAAAARTRRRRRAARRPTRPSSSRRARARTATPTTTAPAPSPATAPPATPSPSASLRRPGCTALMSLPSFRRRRLGKAPAELAAMASEAPTSRLILLLATVMEGATISCG

SEQ ID NO: 39805 - DNA, 1263 bp, Zea mays subsp. mays
  misc_feature (1)..(1263): Ceres Seq. ID no. 15180126
cagctgctcctggccgtcgacaccagcaactacgcctcgtggatcccttgcgccggctgcgcgggctgccccacgtcgtccgcggcgcccttcgacccggccgcgtccgcctcgtaccgcacggtgccctgcgggtcgccgctgtgcgcgcaggcacccaacgcggcgtccccgcccggcggcaaggcctgcggcttcagcctcacctacgccgactcctcgctgcaggccgcgctgtcgcaggactccctcgccgtcgcaggcaacgccgtgaaggcctacaccttcgggtgcctgcagagggccactggcacggctgcgccgccgcaggggctgctgggtctcggccgcggcccgctgtcgttcctttcgcagaccaaggacatgtacgaggccaccttctcgtactgtctccccagcttcaagtcgctcaacttctctggaacgctccggctcgggcgcaacggccagccgcagcgcatcaagacgacgccgctgctggccaacccgcaccggtcgtcgctctactacgtgaacatgaccggcgtccgcgtgggcaggaaggtggtgcccatcccggcgttcgacccggcgacgggcgcgggcaccgtgctggactctggcaccatgttcacccggctggtggcgccggcgtacgtggccgtgcgggacgaggtccggcgccgcgtcggcgcgcccgtatcctcgctgggagggttcgacacgtgcttcaacaccaccgccgtcgcgtggccgcccatgacgctgctgttcgacggcatgcaggtgacgttgccggaggagaacgtggtcatccacagcacgtacgcgaccatcagctgcctggccatggccgcggcgcccgacggcgtcaacaccgtgctcaacgtcatcccagcatgcagcagcagaaccaccgtgtgctcttcgacgtgcccaacggacgcgtcggcttcgcgcgcgagcgctgcactgccgcttgatcagcttgctcgcgcgcctgcgcgcgggctcggattcgggttatatttagttaaacctacgttctacggttgtggacgtcatgcactgctgtcggagtgggtgattaataatttaactttccttttctttttaatctcgttgctcttcagatttaccatatgtgtttcacattcaccgcgttatgtggtttaggggctgaatgattggggtctaaataatgtactgcatattccagttttggattaagcacggtcgtcgtttaggcttgatatgcctaac

SEQ ID NO: 39806 - protein, 391 aa, Zea mays subsp. mays
  peptide (1)..(391): Ceres Seq. ID no. 15180127
  misc_feature (1)..(298): Pfam Name: Pfam Description:  Eukaryotic aspartyl protease
  misc_feature (1)..(298): NCBI GI NO: 34899068 NR Description: similar to nucleoid DNA-binding-like protein
  misc_feature (2)..(298): NCBI GI NO: 20161865 NR Description: putative nucleoid DNA-binding-like protein
  misc_feature (2)..(298): NCBI GI NO: 15232503 NR Description: nucleoid DNA-binding - like protein
  misc_feature (2)..(298): NCBI GI NO: 21617933 NR Description: nucleoid DNA-binding-like protein
  misc_feature (2)..(298): NCBI GI NO: 15240680 NR Description: nucleoid DNA-binding-related protein
  misc_feature (2)..(298): NCBI GI NO: 18391062 NR Description: expressed protein [Arabidopsis thaliana]
  misc_feature (2)..(298): NCBI GI NO: 21450872 NR Description: unknown protein [Arabidopsis thaliana]
  misc_feature (4)..(297): NCBI GI NO: 15223368 NR Description: chloroplast nucleoid DNA binding protein -related
  misc_feature (4)..(297): NCBI GI NO: 15228618 NR Description: expressed protein [Arabidopsis thaliana]
  misc_feature (4)..(297): NCBI GI NO: 21594980 NR Description: chloroplast nucleoid DNA binding protein, putative
QLLLAVDTSNYASWIPCAGCAGCPTSSAAPFDPAASASYRTVPCGSPLCAQAPNAASPPGGKACGFSLTYADSSLQAALSQDSLAVAGNAVKAYTFGCLQRATGTAAPPQGLLGLGRGPLSFLSQTKDMYEATFSYCLPSFKSLNFSGTLRLGRNGQPQRIKTTPLLANPHRSSLYYVNMTGVRVGRKVVPIPAFDPATGAGTVLDSGTMFTRLVAPAYVAVRDEVRRRVGAPVSSLGGFDTCFNTTAVAWPPMTLLFDGMQVTLPEENVVIHSTYATISCLAMAAAPDGVNTVLNVIPACSSRTTVCSSTCPTDASASRASAALPLDQLARAPARGLGFGLYLVKPTFYGCGRHALLSEWVINNLTFLFFLISLLFRFTICVSHSPRYVV

SEQ ID NO: 39807 - protein, 326 aa, Zea mays subsp. mays
  peptide (1)..(326): Ceres Seq. ID no. 15180128
  misc_feature (299)..(326): NCBI GI NO: 34899068 NR Description: similar to nucleoid DNA-binding-like protein
  misc_feature (299)..(325): NCBI GI NO: 20161865 NR Description: putative nucleoid DNA-binding-like protein
  misc_feature (299)..(324): NCBI GI NO: 15232503 NR Description: nucleoid DNA-binding - like protein
  misc_feature (299)..(324): NCBI GI NO: 21617933 NR Description: nucleoid DNA-binding-like protein
  misc_feature (299)..(324): NCBI GI NO: 15240680 NR Description: nucleoid DNA-binding-related protein
  misc_feature (299)..(323): NCBI GI NO: 18391062 NR Description: expressed protein [Arabidopsis thaliana]
  misc_feature (299)..(323): NCBI GI NO: 21450872 NR Description: unknown protein [Arabidopsis thaliana]
  misc_feature (299)..(325): NCBI GI NO: 34910676 NR Description: P0690B02.2
AAPGRRHQQLRLVDPLRRLRGLPHVVRGALRPGRVRLVPHGALRVAAVRAGTQRGVPARRQGLRLQPHLRRLLAAGRAVAGLPRRRRQRREGLHLRVPAEGHWHGCAAAGAAGSRPRPAVVPFADQGHVRGHLLVLSPQLQVAQLLWNAPARAQRPAAAHQDDAAAGQPAPVVALLREHDRRPRGQEGGAHPGVRPGDGRGHRAGLWHHVHPAGGAGVRGRAGRGPAPRRRARILAGRVRHVLQHHRRRVAAHDAAVRRHAGDVAGGERGHPQHVRDHQLPGHGRGARRRQHRAQRHPSMQQQNHRVLFDVPNGRVGFARERCTAA

SEQ ID NO: 39808 - protein, 263 aa, Zea mays subsp. mays
  peptide (1)..(263): Ceres Seq. ID no. 15180129
  misc_feature (1)..(170): Pfam Name: Pfam Description:  Eukaryotic aspartyl protease
  misc_feature (1)..(170): NCBI GI NO: 34899068 NR Description: similar to nucleoid DNA-binding-like protein
  misc_feature (1)..(170): NCBI GI NO: 20161865 NR Description: putative nucleoid DNA-binding-like protein
  misc_feature (1)..(170): NCBI GI NO: 15232503 NR Description: nucleoid DNA-binding - like protein
  misc_feature (1)..(170): NCBI GI NO: 21617933 NR Description: nucleoid DNA-binding-like protein
  misc_feature (1)..(170): NCBI GI NO: 15240680 NR Description: nucleoid DNA-binding-related protein
  misc_feature (1)..(170): NCBI GI NO: 18391062 NR Description: expressed protein [Arabidopsis thaliana]
  misc_feature (1)..(170): NCBI GI NO: 21450872 NR Description: unknown protein [Arabidopsis thaliana]
  misc_feature (1)..(169): NCBI GI NO: 15223368 NR Description: chloroplast nucleoid DNA binding protein -related
  misc_feature (1)..(169): NCBI GI NO: 15228618 NR Description: expressed protein [Arabidopsis thaliana]
  misc_feature (1)..(169): NCBI GI NO: 21594980 NR Description: chloroplast nucleoid DNA binding protein, putative
MYEATFSYCLPSFKSLNFSGTLRLGRNGQPQRIKTTPLLANPHRSSLYYVNMTGVRVGRKVVPIPAFDPATGAGTVLDSGTMFTRLVAPAYVAVRDEVRRRVGAPVSSLGGFDTCFNTTAVAWPPMTLLFDGMQVTLPEENVVIHSTYATISCLAMAAAPDGVNTVLNVIPACSSRTTVCSSTCPTDASASRASAALPLDQLARAPARGLGFGLYLVKPTFYGCGRHALLSEWVINNLTFLFFLISLLFRFTICVSHSPRYVV

SEQ ID NO: 39809 - DNA, 625 bp, Zea mays subsp. mays
  misc_feature (1)..(625): Ceres Seq. ID no. 13491331
atttgactgggattcaggtgacggcacaagaagtgtcaacgatgctccggtgggggcacaacagcatcatcttcctgataaacaatggagggtacacaatcgaggtggagattcacgatggcccttataacgttatcaagaactggaactacaccggtctggtggaagcgttccacaatggcgagggcgcgtgctacacagcaaaggttcgaacagaggaggagctgacggaggcactggaggcagctctgggacctaagaaggactgcttatgcttcatcgaggtcatcgtgcataaggatgacaccagcaaagagcttctcgagtggggatctagggtttctgcggcgaatagccgtccacctaatcctcagtgaatacatcaggtctcccgaattgtcctgtaaaccgatccgctttctggtgacgtccatagcaagaagtctcggcgatgacatgctgccgatttctgaataaatcgtccctgcaattcactggtgttgaagtcctcgttgtaaagatacaaagacgtttggaagaatcactgacaacgtaaactctacgtatcttacgtgaaatagccccgtgatctacatatatataaagcagattttgagagtactag

SEQ ID NO: 39810 - protein, 124 aa, Zea mays subsp. mays
  peptide (1)..(124): Ceres Seq. ID no. 13491332
  misc_feature (5)..(124): NCBI GI NO: 19851518 NR Description: pyruvate decarboxylase [Zea mays]
  misc_feature (5)..(124): NCBI GI NO: 34896032 NR Description: Similar to Zea mays mRNA for pyruvate decarboxylase
  misc_feature (20)..(124): NCBI GI NO: 729304 NR Description: Pyruvate decarboxylase isozyme 2 (PDC)
  misc_feature (5)..(124): NCBI GI NO: 6469312 NR Description: pyruvate decarboxylase [Saccharum officinarum]
  misc_feature (5)..(124): NCBI GI NO: 29373077 NR Description: pyruvate decarboxylase 1 [Lotus corniculatus]
  misc_feature (5)..(124): NCBI GI NO: 1706328 NR Description: Pyruvate decarboxylase isozyme 2 (PDC)
  misc_feature (5)..(124): NCBI GI NO: 17225598 NR Description: pyruvate decarboxylase [Fragaria x ananassa]
  misc_feature (5)..(124): NCBI GI NO: 19851524 NR Description: pyruvate decarboxylase [Zea mays]
  misc_feature (5)..(124): NCBI GI NO: 19851522 NR Description: pyruvate decarboxylase [Zea mays]
  misc_feature (5)..(124): NCBI GI NO: 10121330 NR Description: pyruvate decarboxylase [Fragaria x ananassa]
LTGIQVTAQEVSTMLRWGHNSIIFLINNGGYTIEVEIHDGPYNVIKNWNYTGLVEAFHNGEGACYTAKVRTEEELTEALEAALGPKKDCLCFIEVIVHKDDTSKELLEWGSRVSAANSRPPNPQ

SEQ ID NO: 39811 - protein, 111 aa, Zea mays subsp. mays
  peptide (1)..(111): Ceres Seq. ID no. 13491333
  misc_feature (1)..(111): NCBI GI NO: 19851518 NR Description: pyruvate decarboxylase [Zea mays]
  misc_feature (1)..(111): NCBI GI NO: 34896032 NR Description: Similar to Zea mays mRNA for pyruvate decarboxylase
  misc_feature (7)..(111): NCBI GI NO: 729304 NR Description: Pyruvate decarboxylase isozyme 2 (PDC)
  misc_feature (1)..(111): NCBI GI NO: 6469312 NR Description: pyruvate decarboxylase [Saccharum officinarum]
  misc_feature (1)..(111): NCBI GI NO: 29373077 NR Description: pyruvate decarboxylase 1 [Lotus corniculatus]
  misc_feature (1)..(111): NCBI GI NO: 1706328 NR Description: Pyruvate decarboxylase isozyme 2 (PDC)
  misc_feature (1)..(111): NCBI GI NO: 17225598 NR Description: pyruvate decarboxylase [Fragaria x ananassa]
  misc_feature (1)..(111): NCBI GI NO: 19851522 NR Description: pyruvate decarboxylase [Zea mays]
  misc_feature (1)..(111): NCBI GI NO: 19851524 NR Description: pyruvate decarboxylase [Zea mays]
  misc_feature (1)..(111): NCBI GI NO: 10121330 NR Description: pyruvate decarboxylase [Fragaria x ananassa]
MLRWGHNSIIFLINNGGYTIEVEIHDGPYNVIKNWNYTGLVEAFHNGEGACYTAKVRTEEELTEALEAALGPKKDCLCFIEVIVHKDDTSKELLEWGSRVSAANSRPPNPQ

SEQ ID NO: 39812 - DNA, 796 bp, Zea mays subsp. mays
  misc_feature (1)..(796): Ceres Seq. ID no. 12454792
aacatcaacaccagacagcactacagtctacagcagcagggcaccaccaccacagcaatgcagcagaacgccgcccgcctgctggccgccgccgtggcctgcctggcgctggcgctggcgccatcctcggacgcgcaggggacggcggtgccgtcgtgcgcggcgaagcttgtgccgtgcacggggtacctcaactccacgtccacggcggcgcccgcggcggcctgctgcgggccgctcagggaggcagcggccaacgagacggcgtgcctctgcgccatgctgctcaacagggccgcgctgcgggcgttcggcgtggcgcccgagcagggcctggtcctcgcccggcggtgcaacgtcaccaccgacgcctccgcctgcgccgccgccggaggctcagccacgggcggcagtactgctgcatcttcagcttccaccggcagcgcttcctcctcctcctctttcttcttcagtggccaaaccaacagccaacggaggcggcgtggcgcgtcgcctgagcatgactggcgcgtcctcattgctaggcttcagtttcatctggtggtgggcggtcatggcgtaggagtatctgccgtggcaccggcgattttcctggctggatccagaattccagacttatatgtactactgttgagtagcaggtttcattgcttctttttatatataatatgccctgttgtaccactaccattgatgccgtgagcagaacaagagaaaaaaattgtcaagaacgatgcaaacaaccagaaggaaagaacgtactctcattttaaat

SEQ ID NO: 39813 - protein, 240 aa, Zea mays subsp. mays
  peptide (1)..(240): Ceres Seq. ID no. 12454793
  misc_feature (53)..(127): Pfam Name: Pfam Description:  Protease inhibitor/seed storage/LTP family
  misc_feature (27)..(138): NCBI GI NO: 15221585 NR Description: unknown protein; protein id: At1g62790.1
  misc_feature (27)..(138): NCBI GI NO: 30696757 NR Description: protease inhibitor/seed storage/lipid transfer
  misc_feature (27)..(127): NCBI GI NO: 6630451 NR Description: F23N19.16 [Arabidopsis thaliana]
  misc_feature (26)..(158): NCBI GI NO: 18410388 NR Description: lipid transfer protein, putative
  misc_feature (41)..(163): NCBI GI NO: 15221052 NR Description: lipid transfer protein, putative
  misc_feature (26)..(158): NCBI GI NO: 21593596 NR Description: lipid transfer protein, putative
  misc_feature (38)..(145): NCBI GI NO: 37531932 NR Description: putative proline-rich cell wall protein
  misc_feature (26)..(128): NCBI GI NO: 25406276 NR Description: probable lipid transfer protein F6D5.5
  misc_feature (30)..(170): NCBI GI NO: 28269449 NR Description: putative protease inhibitor
  misc_feature (49)..(128): NCBI GI NO: 15223104 NR Description: lipid transfer protein, putative
NINTRQHYSLQQQGTTTTAMQQNAARLLAAAVACLALALAPSSDAQGTAVPSCAAKLVPCTGYLNSTSTAAPAAACCGPLREAAANETACLCAMLLNRAALRAFGVAPEQGLVLARRCNVTTDASACAAAGGSATGGSTAASSASTGSASSSSSFFFSGQTNSQRRRRGASPEHDWRVLIARLQFHLVVGGHGVGVSAVAPAIFLAGSRIPDLYVLLLSSRFHCFFLYIICPVVPLPLMP

SEQ ID NO: 39814 - protein, 221 aa, Zea mays subsp. mays
  peptide (1)..(221): Ceres Seq. ID no. 12454794
  misc_feature (34)..(108): Pfam Name: Pfam Description:  Protease inhibitor/seed storage/LTP family
  misc_feature (8)..(119): NCBI GI NO: 15221585 NR Description: unknown protein; protein id: At1g62790.1
  misc_feature (8)..(119): NCBI GI NO: 30696757 NR Description: protease inhibitor/seed storage/lipid transfer
  misc_feature (8)..(108): NCBI GI NO: 6630451 NR Description: F23N19.16 [Arabidopsis thaliana]
  misc_feature (7)..(139): NCBI GI NO: 18410388 NR Description: lipid transfer protein, putative
  misc_feature (22)..(144): NCBI GI NO: 15221052 NR Description: lipid transfer protein, putative
  misc_feature (7)..(139): NCBI GI NO: 21593596 NR Description: lipid transfer protein, putative
  misc_feature (19)..(126): NCBI GI NO: 37531932 NR Description: putative proline-rich cell wall protein
  misc_feature (7)..(109): NCBI GI NO: 25406276 NR Description: probable lipid transfer protein F6D5.5
  misc_feature (11)..(151): NCBI GI NO: 28269449 NR Description: putative protease inhibitor
  misc_feature (30)..(109): NCBI GI NO: 15223104 NR Description: lipid transfer protein, putative
MQQNAARLLAAAVACLALALAPSSDAQGTAVPSCAAKLVPCTGYLNSTSTAAPAAACCGPLREAAANETACLCAMLLNRAALRAFGVAPEQGLVLARRCNVTTDASACAAAGGSATGGSTAASSASTGSASSSSSFFFSGQTNSQRRRRGASPEHDWRVLIARLQFHLVVGGHGVGVSAVAPAIFLAGSRIPDLYVLLLSSRFHCFFLYIICPVVPLPLMP

SEQ ID NO: 39815 - protein, 193 aa, Zea mays subsp. mays
  peptide (1)..(193): Ceres Seq. ID no. 12454795
  misc_feature (12)..(166): NCBI GI NO: 3044086 NR Description: unknown [Myxococcus xanthus]
TSTPDSTTVYSSRAPPPQQCSRTPPACWPPPWPAWRWRWRHPRTRRGRRCRRARRSLCRARGTSTPRPRRRPRRPAAGRSGRQRPTRRRASAPCCSTGPRCGRSAWRPSRAWSSPGGATSPPTPPPAPPPEAQPRAAVLLHLQLPPAALPPPPLSSSVAKPTANGGGVARRLSMTGASSLLGFSFIWWWAVMA

SEQ ID NO: 39816 - DNA, 468 bp, Zea mays subsp. mays
  misc_feature (1)..(468): Ceres Seq. ID no. 2790932
gtagtacatcacgagtgctccaaacaaatagagttttccttcaccgagccagacccagaagaaggggagccggaggtagaaagaccagagaagatggcgaccaccgagccggcggcggtgaggctggtgggctccttcgccagcccgttcgtccaccgcgccgaggtggccctgcgcctcaaaggggtgccctacgagctcatcctggaggacctgggcaacaagagcgagctgctgctggcacacaaccccgtgcacaaactcgtgcccgtgctcctccacggcgacagggccatctccgagtcgctcgtcatcctcgagtacgtcgacgaggccttcgacgggccgcctctcctccccgcggaaccccacgcgagggcggacgcgcggttctgggcccacttcatcgaccaaaagttcgcgcggccgttctggatgtcgttctggacggacgacgaggagcgcagg

SEQ ID NO: 39817 - protein, 156 aa, Zea mays subsp. mays
  peptide (1)..(156): Ceres Seq. ID no. 2790933
  misc_feature (39)..(155): NCBI GI NO: 11385507 NR Description: glutathione S-transferase GST 28 [Zea mays]
  misc_feature (40)..(155): NCBI GI NO: 4468798 NR Description: GST7 protein [Zea mays]
  misc_feature (32)..(155): NCBI GI NO: 19386816 NR Description: putative glutathione S-transferase GST 24
  misc_feature (40)..(155): NCBI GI NO: 19386820 NR Description: putative glutathione S-transferase GST 24
  misc_feature (35)..(155): NCBI GI NO: 11385493 NR Description: glutathione S-transferase GST 21 [Zea mays]
  misc_feature (39)..(155): NCBI GI NO: 11385509 NR Description: glutathione S-transferase GST 29 [Zea mays]
  misc_feature (40)..(155): NCBI GI NO: 34896730 NR Description: putative glutathione transferase
  misc_feature (40)..(148): NCBI GI NO: 19386817 NR Description: putative glutathione S-transferase GST 24
  misc_feature (32)..(153): NCBI GI NO: 13699857 NR Description: glutathione S-transferase GST 24 [Zea mays]
  misc_feature (32)..(155): NCBI GI NO: 19386822 NR Description: putative glutathione S-transferase GST 24
VVHHECSKQIEFSFTEPDPEEGEPEVERPEKMATTEPAAVRLVGSFASPFVHRAEVALRLKGVPYELILEDLGNKSELLLAHNPVHKLVPVLLHGDRAISESLVILEYVDEAFDGPPLLPAEPHARADARFWAHFIDQKFARPFWMSFWTDDEERR

SEQ ID NO: 39818 - protein, 155 aa, Zea mays subsp. mays
  peptide (1)..(155): Ceres Seq. ID no. 2790934
STSRVLQTNRVFLHRARPRRRGAGGRKTREDGDHRAGGGEAGGLLRQPVRPPRRGGPAPQRGALRAHPGGPGQQERAAAGTQPRAQTRARAPPRRQGHLRVARHPRVRRRGLRRAASPPRGTPREGGRAVLGPLHRPKVRAAVLDVVLDGRRGAQ

SEQ ID NO: 39819 - protein, 125 aa, Zea mays subsp. mays
  peptide (1)..(125): Ceres Seq. ID no. 2790935
  misc_feature (8)..(124): NCBI GI NO: 11385507 NR Description: glutathione S-transferase GST 28 [Zea mays]
  misc_feature (9)..(124): NCBI GI NO: 4468798 NR Description: GST7 protein [Zea mays]
  misc_feature (1)..(124): NCBI GI NO: 19386816 NR Description: putative glutathione S-transferase GST 24
  misc_feature (9)..(124): NCBI GI NO: 19386820 NR Description: putative glutathione S-transferase GST 24
  misc_feature (4)..(124): NCBI GI NO: 11385493 NR Description: glutathione S-transferase GST 21 [Zea mays]
  misc_feature (8)..(124): NCBI GI NO: 11385509 NR Description: glutathione S-transferase GST 29 [Zea mays]
  misc_feature (9)..(124): NCBI GI NO: 34896730 NR Description: putative glutathione transferase
  misc_feature (9)..(117): NCBI GI NO: 19386817 NR Description: putative glutathione S-transferase GST 24
  misc_feature (1)..(122): NCBI GI NO: 13699857 NR Description: glutathione S-transferase GST 24 [Zea mays]
  misc_feature (1)..(124): NCBI GI NO: 19386822 NR Description: putative glutathione S-transferase GST 24
MATTEPAAVRLVGSFASPFVHRAEVALRLKGVPYELILEDLGNKSELLLAHNPVHKLVPVLLHGDRAISESLVILEYVDEAFDGPPLLPAEPHARADARFWAHFIDQKFARPFWMSFWTDDEERR

SEQ ID NO: 39820 - DNA, 693 bp, Zea mays subsp. mays
  misc_feature (1)..(693): Ceres Seq. ID no. 12359278
agcaaacaagagctaagctactagagacatggccgacaaccttatcaagcccgtggctttgctgctgctgctcctgaacctgtgcatgtacgtcatcctggccatcatcggcggctgggctctgaacgtggccatcgaccgcggcttcatcatcggcccggagctgcggcttcccgcgcatttccaccctatcttcttccccatcggcaacttcgccaccggcttcttcgtcctcttctccctcatagcgggcgtcgtcgggatcgcctccgccatggtgggcttcaaccacctccgcttctggaactacgaaagccagcagcccgcggcggcgttggggattgtggcgtgggcgctcacagtcctagccatgggcctagcttgtcaggaaatctctttcgaccgaagaaacgccaagctgggcaccatggagaccttcaccatcatcctaacagtgacgcagttcttctacgtgctcgcgatacgcgggggaaggcacggacccgtccacgtggagcgccgcggcaactttgcatgaaagaccaccgacaaatattcattcatttgtgcacgtaccgtccatggagaccttcactattaattcgtttgctggattcgttaattatttcattattgtttgacagtttcatatggatggaatggaatggactccaagattattggtttgattcc

SEQ ID NO: 39821 - protein, 169 aa, Zea mays subsp. mays
  peptide (1)..(169): Ceres Seq. ID no. 12359279
  misc_feature (15)..(131): Pfam Name: Pfam Description:  AWPM-19-like family
  misc_feature (1)..(131): NCBI GI NO: 34904644 NR Description: putative ABA-induced plasma membrane protein
  misc_feature (132)..(164): NCBI GI NO: 34904644 NR Description: putative ABA-induced plasma membrane protein
  misc_feature (1)..(156): NCBI GI NO: 34911480 NR Description: putative plasma membrane associated protein
  misc_feature (1)..(156): NCBI GI NO: 15218953 NR Description: plasma membrane associated protein, putative
  misc_feature (1)..(155): NCBI GI NO: 15239619 NR Description: plasma membrane associated protein -like
  misc_feature (41)..(156): NCBI GI NO: 15237455 NR Description: putative protein; protein id: At5g46530.1
  misc_feature (1)..(159): NCBI GI NO: 18390408 NR Description: expressed protein; protein id: At1g04560
  misc_feature (9)..(159): NCBI GI NO: 7488688 NR Description: maturation protein PM3 - soybean
  misc_feature (13)..(158): NCBI GI NO: 4097340 NR Description: hydrophobic LEA-like protein [Oryza sativa]
  misc_feature (13)..(168): NCBI GI NO: 6851373 NR Description: plasma membrane associated protein
MADNLIKPVALLLLLLNLCMYVILAIIGGWALNVAIDRGFIIGPELRLPAHFHPIFFPIGNFATGFFVLFSLIAGVVGIASAMVGFNHLRFWNYESQQPAAALGIVAWALTVLAMGLACQEISFDRRNAKLGTMETFTIILTVTQFFYVLAIRGGRHGPVHVERRGNFA

SEQ ID NO: 39822 - protein, 150 aa, Zea mays subsp. mays
  peptide (1)..(150): Ceres Seq. ID no. 12359280
  misc_feature (1)..(112): Pfam Name: Pfam Description:  AWPM-19-like family
  misc_feature (1)..(112): NCBI GI NO: 34904644 NR Description: putative ABA-induced plasma membrane protein
  misc_feature (113)..(145): NCBI GI NO: 34904644 NR Description: putative ABA-induced plasma membrane protein
  misc_feature (1)..(137): NCBI GI NO: 34911480 NR Description: putative plasma membrane associated protein
  misc_feature (1)..(137): NCBI GI NO: 15218953 NR Description: plasma membrane associated protein, putative
  misc_feature (1)..(136): NCBI GI NO: 15239619 NR Description: plasma membrane associated protein -like
  misc_feature (22)..(137): NCBI GI NO: 15237455 NR Description: putative protein; protein id: At5g46530.1
  misc_feature (1)..(140): NCBI GI NO: 18390408 NR Description: expressed protein; protein id: At1g04560
  misc_feature (1)..(140): NCBI GI NO: 7488688 NR Description: maturation protein PM3 - soybean
  misc_feature (1)..(139): NCBI GI NO: 4097340 NR Description: hydrophobic LEA-like protein [Oryza sativa]
  misc_feature (1)..(149): NCBI GI NO: 6851373 NR Description: plasma membrane associated protein
MYVILAIIGGWALNVAIDRGFIIGPELRLPAHFHPIFFPIGNFATGFFVLFSLIAGVVGIASAMVGFNHLRFWNYESQQPAAALGIVAWALTVLAMGLACQEISFDRRNAKLGTMETFTIILTVTQFFYVLAIRGGRHGPVHVERRGNFA

SEQ ID NO: 39823 - protein, 87 aa, Zea mays subsp. mays
  peptide (1)..(87): Ceres Seq. ID no. 12359281
  misc_feature (1)..(49): NCBI GI NO: 34904644 NR Description: putative ABA-induced plasma membrane protein
  misc_feature (50)..(82): NCBI GI NO: 34904644 NR Description: putative ABA-induced plasma membrane protein
  misc_feature (1)..(74): NCBI GI NO: 34911480 NR Description: putative plasma membrane associated protein
  misc_feature (1)..(74): NCBI GI NO: 15218953 NR Description: plasma membrane associated protein, putative
  misc_feature (1)..(73): NCBI GI NO: 15239619 NR Description: plasma membrane associated protein -like
  misc_feature (1)..(74): NCBI GI NO: 15237455 NR Description: putative protein; protein id: At5g46530.1
  misc_feature (1)..(77): NCBI GI NO: 18390408 NR Description: expressed protein; protein id: At1g04560
  misc_feature (1)..(77): NCBI GI NO: 7488688 NR Description: maturation protein PM3 - soybean
  misc_feature (1)..(76): NCBI GI NO: 4097340 NR Description: hydrophobic LEA-like protein [Oryza sativa]
  misc_feature (1)..(86): NCBI GI NO: 6851373 NR Description: plasma membrane associated protein
MVGFNHLRFWNYESQQPAAALGIVAWALTVLAMGLACQEISFDRRNAKLGTMETFTIILTVTQFFYVLAIRGGRHGPVHVERRGNFA

SEQ ID NO: 39824 - DNA, 1071 bp, Zea mays subsp. mays
  misc_feature (1)..(1071): Ceres Seq. ID no. 13503114
atcagcggcctgataagctatagccatcttcttctcttctctgaattccagtccaagggccggaataccgtcagagcagagggagtgggaggaagaaaaaaaaaagatggtgaagctcgcatttggaagctttcgcgactctttgagcgccgcgtcgctcaaggcctatgtggccgagttcatcgccacgctgctcttcgtgttcgccggcgtcgggtccgccattgcctactcgcaattgacgaagggcggcgctctggaccccgccggcctggtggccatcgccatcgcccatgcgttcgcgctcttcgtcggcgtctccatggccgccaacatctccggcggccacctgaaccccgccgtcaccttcggcctcgccgtcggcggccacatcaccatcctcaccggcatcctctactgggttgcccagcttctcggcgcttccgtggcgtgctttctcctgcagtacgtcacacacggacaggctatcccgacgcacggcgtctccgggatcagcgagatcgagggcgtggtgatggagatcgtgatcaccttcgcgctggtgtacaccgtgtacgccaccgcggccgacccgaagaaggggtccctgggcaccatcgcgcccatggccatcggcttcatcgtcggcgccaacatcctggccgccggccccttcagcggcggctccatgaacccggcccgctccttcggccccgccgtggcggccggtaacttcgccggcaactgggtgtactgggtcggccccctcgtcggcggtggcctggcggggcccgtctacggcgacgtgttcatcgcctcctaccagccggtcggccagcaggagtacccatgaaagtccggagctagcccgatcgatccgtctgtgttgatttcaccatcgtcgtcgtcgtgtcacctggcgcttcgtgctgtaatcatgtttggtcctgtttgcatttcccaacgtctggttttcatttccattcaccaacggtgccaagatgccgtactgtaagcgagagaagtgttcggtctgtatctgtataaatgcaatgcacagttcggcgtttc

SEQ ID NO: 39825 - protein, 248 aa, Zea mays subsp. mays
  peptide (1)..(248): Ceres Seq. ID no. 13503115
  misc_feature (11)..(231): Pfam Name: Pfam Description:  Major intrinsic protein
  misc_feature (1)..(248): NCBI GI NO: 29650739 NR Description: tonoplast water channel [Zea mays]
  misc_feature (1)..(248): NCBI GI NO: 7441255 NR Description: probable tonoplast aquaporin - maize
  misc_feature (1)..(248): NCBI GI NO: 9623335 NR Description: tonoplast intrinsic protein 1 [Hordeum vulgare]
  misc_feature (1)..(247): NCBI GI NO: 14140156 NR Description: putative aquaporin [Oryza sativa]
  misc_feature (1)..(247): NCBI GI NO: 13447821 NR Description: tonoplast membrane integral protein ZmTIP2-1
  misc_feature (1)..(242): NCBI GI NO: 38605857 NR Description: OSJNBb0034G17.15
  misc_feature (1)..(247): NCBI GI NO: 13447823 NR Description: tonoplast membrane integral protein ZmTIP2-2
  misc_feature (1)..(246): NCBI GI NO: 2058706 NR Description: Rb7 [Lycopersicon esculentum]
  misc_feature (1)..(246): NCBI GI NO: 11276918 NR Description: membrane channel protein
  misc_feature (1)..(244): NCBI GI NO: 7441268 NR Description: probable membrane protein - carrot
MVKLAFGSFRDSLSAASLKAYVAEFIATLLFVFAGVGSAIAYSQLTKGGALDPAGLVAIAIAHAFALFVGVSMAANISGGHLNPAVTFGLAVGGHITILTGILYWVAQLLGASVACFLLQYVTHGQAIPTHGVSGISEIEGVVMEIVITFALVYTVYATAADPKKGSLGTIAPMAIGFIVGANILAAGPFSGGSMNPARSFGPAVAAGNFAGNWVYWVGPLVGGGLAGPVYGDVFIASYQPVGQQEYP

SEQ ID NO: 39826 - protein, 243 aa, Zea mays subsp. mays
  peptide (1)..(243): Ceres Seq. ID no. 13503116
ISGLISYSHLLLFSEFQSKGRNTVRAEGVGGRKKKDGEARIWKLSRLFERRVAQGLCGRVHRHAALRVRRRRVRHCLLAIDEGRRSGPRRPGGHRHRPCVRALRRRLHGRQHLRRPPEPRRHLRPRRRRPHHHPHRHPLLGCPASRRFRGVLSPAVRHTRTGYPDARRLRDQRDRGRGDGDRDHLRAGVHRVRHRGRPEEGVPGHHRAHGHRLHRRRQHPGRRPLQRRLHEPGPLLRPRRGGR

SEQ ID NO: 39827 - protein, 176 aa, Zea mays subsp. mays
  peptide (1)..(176): Ceres Seq. ID no. 13503117
  misc_feature (1)..(159): Pfam Name: Pfam Description:  Major intrinsic protein
  misc_feature (1)..(176): NCBI GI NO: 29650739 NR Description: tonoplast water channel [Zea mays]
  misc_feature (1)..(176): NCBI GI NO: 7441255 NR Description: probable tonoplast aquaporin - maize
  misc_feature (1)..(176): NCBI GI NO: 9623335 NR Description: tonoplast intrinsic protein 1 [Hordeum vulgare]
  misc_feature (1)..(175): NCBI GI NO: 14140156 NR Description: putative aquaporin [Oryza sativa]
  misc_feature (1)..(175): NCBI GI NO: 13447821 NR Description: tonoplast membrane integral protein ZmTIP2-1
  misc_feature (1)..(170): NCBI GI NO: 38605857 NR Description: OSJNBb0034G17.15
  misc_feature (1)..(175): NCBI GI NO: 13447823 NR Description: tonoplast membrane integral protein ZmTIP2-2
  misc_feature (1)..(174): NCBI GI NO: 2058706 NR Description: Rb7 [Lycopersicon esculentum]
  misc_feature (1)..(174): NCBI GI NO: 11276918 NR Description: membrane channel protein
  misc_feature (1)..(172): NCBI GI NO: 7441268 NR Description: probable membrane protein - carrot
MAANISGGHLNPAVTFGLAVGGHITILTGILYWVAQLLGASVACFLLQYVTHGQAIPTHGVSGISEIEGVVMEIVITFALVYTVYATAADPKKGSLGTIAPMAIGFIVGANILAAGPFSGGSMNPARSFGPAVAAGNFAGNWVYWVGPLVGGGLAGPVYGDVFIASYQPVGQQEYP

SEQ ID NO: 39828 - DNA, 938 bp, Zea mays subsp. mays
  misc_feature (1)..(938): Ceres Seq. ID no. 12359282
acacttcactcacccatccaccgcaaacgccaaacggccggcacacaactacacaagccgctggcaaagatggcctcctccttggtcctcatcgcagcggccctgcttgcgctggcctcgtcgtggcagcaggccatcgcctacgatcctagccccctccaggacttctgtgtcgcagacaagaactcgcctgttcgcgtcaacgggttcccttgcaaggacccgatggcggtcaccccggacgacttcttcaacgcggcgatgatcatcgacaagcggagggacacgaacaacaaggtggggtccaacgtcaccaacgtgaacgtggagagcttcccggggctgaacacgctgggcatctcgctggcgcgcatcgactacgcgccgctcggggtgaacccgccgcacatccacccacgcgctaccgagctgctcaccgtgctcgagggcaccctctacctcggcttcgtcacgtccaaccccaaccgcctcttctccaaggtggtcaagaagggcgacgtcttcgtcttccccaaggccatgatccacttccagatgaacctggaccacgacaagcccgccgcggcgctctcgtcgctcagcagccagaaccctggcgtcatcaccatcgccagcgccgtcttcggctccaagccgcccatctcggacgacgtcttggccaaggcgttccaggtggagaagaaactcatcgactggctccagtctcagttctgggataccaactactagctgcctagctagctagtaatatacttgcttgcttatttgttgcatatacatgcaccaccaacacaagccttatattaattacgtacgtacatctatgtataatatcgaataaatggccggtatgcatttggaggagtgaaacttattactgtgcgtgattaataatatttaatgtaaacttttcattg

SEQ ID NO: 39829 - protein, 249 aa, Zea mays subsp. mays
  peptide (1)..(249): Ceres Seq. ID no. 12359283
  misc_feature (89)..(238): Pfam Name: Pfam Description:  Cupin
  misc_feature (27)..(249): NCBI GI NO: 6996619 NR Description: oxalate oxidase [Triticum aestivum]
  misc_feature (24)..(249): NCBI GI NO: 38175449 NR Description: putative germin protein type 1
  misc_feature (25)..(249): NCBI GI NO: 7447333 NR Description: germin protein type 1 - rice
  misc_feature (24)..(249): NCBI GI NO: 7447338 NR Description: probable germin protein type 2 - rice
  misc_feature (24)..(248): NCBI GI NO: 9837115 NR Description: germin F [Hordeum vulgare]
  misc_feature (24)..(248): NCBI GI NO: 9837113 NR Description: germin B [Hordeum vulgare]
  misc_feature (25)..(248): NCBI GI NO: 9837117 NR Description: germin D [Hordeum vulgare]
  misc_feature (66)..(249): NCBI GI NO: 9837119 NR Description: germin E [Hordeum vulgare]
  misc_feature (24)..(244): NCBI GI NO: 40253832 NR Description: putative germin A
  misc_feature (24)..(249): NCBI GI NO: 40253800 NR Description: putative germin A
TLHSPIHRKRQTAGTQLHKPLAKMASSLVLIAAALLALASSWQQAIAYDPSPLQDFCVADKNSPVRVNGFPCKDPMAVTPDDFFNAAMIIDKRRDTNNKVGSNVTNVNVESFPGLNTLGISLARIDYAPLGVNPPHIHPRATELLTVLEGTLYLGFVTSNPNRLFSKVVKKGDVFVFPKAMIHFQMNLDHDKPAAALSSLSSQNPGVITIASAVFGSKPPISDDVLAKAFQVEKKLIDWLQSQFWDTNY

SEQ ID NO: 39830 - protein, 226 aa, Zea mays subsp. mays
  peptide (1)..(226): Ceres Seq. ID no. 12359284
  misc_feature (66)..(215): Pfam Name: Pfam Description:  Cupin
  misc_feature (4)..(226): NCBI GI NO: 6996619 NR Description: oxalate oxidase [Triticum aestivum]
  misc_feature (1)..(226): NCBI GI NO: 38175449 NR Description: putative germin protein type 1
  misc_feature (2)..(226): NCBI GI NO: 7447333 NR Description: germin protein type 1 - rice
  misc_feature (1)..(226): NCBI GI NO: 7447338 NR Description: probable germin protein type 2 - rice
  misc_feature (1)..(225): NCBI GI NO: 9837115 NR Description: germin F [Hordeum vulgare]
  misc_feature (1)..(225): NCBI GI NO: 9837113 NR Description: germin B [Hordeum vulgare]
  misc_feature (2)..(225): NCBI GI NO: 9837117 NR Description: germin D [Hordeum vulgare]
  misc_feature (43)..(226): NCBI GI NO: 9837119 NR Description: germin E [Hordeum vulgare]
  misc_feature (1)..(221): NCBI GI NO: 40253832 NR Description: putative germin A
  misc_feature (1)..(226): NCBI GI NO: 40253800 NR Description: putative germin A
MASSLVLIAAALLALASSWQQAIAYDPSPLQDFCVADKNSPVRVNGFPCKDPMAVTPDDFFNAAMIIDKRRDTNNKVGSNVTNVNVESFPGLNTLGISLARIDYAPLGVNPPHIHPRATELLTVLEGTLYLGFVTSNPNRLFSKVVKKGDVFVFPKAMIHFQMNLDHDKPAAALSSLSSQNPGVITIASAVFGSKPPISDDVLAKAFQVEKKLIDWLQSQFWDTNY

SEQ ID NO: 39831 - protein, 174 aa, Zea mays subsp. mays
  peptide (1)..(174): Ceres Seq. ID no. 12359285
  misc_feature (14)..(163): Pfam Name: Pfam Description:  Cupin
  misc_feature (1)..(174): NCBI GI NO: 6996619 NR Description: oxalate oxidase [Triticum aestivum]
  misc_feature (1)..(174): NCBI GI NO: 38175449 NR Description: putative germin protein type 1
  misc_feature (1)..(174): NCBI GI NO: 7447333 NR Description: germin protein type 1 - rice
  misc_feature (1)..(174): NCBI GI NO: 7447338 NR Description: probable germin protein type 2 - rice
  misc_feature (1)..(173): NCBI GI NO: 9837115 NR Description: germin F [Hordeum vulgare]
  misc_feature (1)..(173): NCBI GI NO: 9837113 NR Description: germin B [Hordeum vulgare]
  misc_feature (1)..(173): NCBI GI NO: 9837117 NR Description: germin D [Hordeum vulgare]
  misc_feature (1)..(174): NCBI GI NO: 9837119 NR Description: germin E [Hordeum vulgare]
  misc_feature (1)..(169): NCBI GI NO: 40253832 NR Description: putative germin A
  misc_feature (1)..(174): NCBI GI NO: 40253800 NR Description: putative germin A
MAVTPDDFFNAAMIIDKRRDTNNKVGSNVTNVNVESFPGLNTLGISLARIDYAPLGVNPPHIHPRATELLTVLEGTLYLGFVTSNPNRLFSKVVKKGDVFVFPKAMIHFQMNLDHDKPAAALSSLSSQNPGVITIASAVFGSKPPISDDVLAKAFQVEKKLIDWLQSQFWDTNY

SEQ ID NO: 39832 - DNA, 679 bp, Zea mays subsp. mays
  misc_feature (1)..(679): Ceres Seq. ID no. 12377122
aagggcgagcaaaactggaagcctacgaaaatggtggagctcacctccttatccccagggccaccacgtccttctcggctgactcctcgccgccggccgccgccgccgacacctcatgttcatacctcctcgcgtcgtcgcgggaggatcctcggcgccgcgaccgccacgcctggcgccgacgactaccactccaccatccgctccctcaactcccgcggccgccacgtcccccgaaaatccctcgggcaggtcatcccgctgaccccagaatccgcgccacccacaggcgggctcaccattcaccacgtaccgacgcgtctctcgtctccccgcagaactacacgctcaactccaaggtgaacgaggagctggtggcggcggcgggggtggaggagggtgacgtcgtgctcgagatcggcccaggcaccggctcgctcacttccgcgctgctccaggccggcgctaccgtctttgccgtcgagaaggtctgtaacgttgctttgctcggtgttccgtagctggactgctgaaagtgagagcgagccgctagggggaaaaattcgaaagatcttcctgagacgaaattgaaattgtgtgtaaaatggttactatcatctgtgtcactgtgtgtgattgtctcaaatctcaattgttgatgcctcaaaatgtagctctc

SEQ ID NO: 39833 - protein, 172 aa, Zea mays subsp. mays
  peptide (1)..(172): Ceres Seq. ID no. 12377123
  misc_feature (112)..(162): NCBI GI NO: 25518538 NR Description: hypothetical protein F22M8
  misc_feature (112)..(162): NCBI GI NO: 15220982 NR Description: dimethyladenosine transferase, putative
GRAKLEAYENGGAHLLIPRATTSFSADSSPPAAAADTSCSYLLASSREDPRRRDRHAWRRRLPLHHPLPQLPRPPRPPKIPRAGHPADPRIRATHRRAHHSPRTDASLVSPQNYTLNSKVNEELVAAAGVEEGDVVLEIGPGTGSLTSALLQAGATVFAVEKVCNVALLGVP

SEQ ID NO: 39834 - protein, 120 aa, Zea mays subsp. mays
  peptide (1)..(120): Ceres Seq. ID no. 12377124
  misc_feature (44)..(84): NCBI GI NO: 25518538 NR Description: hypothetical protein F22M8
  misc_feature (44)..(84): NCBI GI NO: 15220982 NR Description: dimethyladenosine transferase, putative
KGEQNWKPTKMVELTSLSPGPPRPSRLTPRRRPPPPTPHVHTSSRRRGRILGAATATPGADDYHSTIRSLNSRGRHVPRKSLGQVIPLTPESAPPTGGLTIHHVPTRLSSPRRTTRSTPR

SEQ ID NO: 39835 - protein, 110 aa, Zea mays subsp. mays
  peptide (1)..(110): Ceres Seq. ID no. 12377125
  misc_feature (34)..(74): NCBI GI NO: 25518538 NR Description: hypothetical protein F22M8
  misc_feature (34)..(74): NCBI GI NO: 15220982 NR Description: dimethyladenosine transferase, putative
MVELTSLSPGPPRPSRLTPRRRPPPPTPHVHTSSRRRGRILGAATATPGADDYHSTIRSLNSRGRHVPRKSLGQVIPLTPESAPPTGGLTIHHVPTRLSSPRRTTRSTPR

SEQ ID NO: 39836 - DNA, 879 bp, Zea mays subsp. mays
  misc_feature (1)..(879): Ceres Seq. ID no. 12364309
gcacgagaccattacctagaacatcctaatcaaaaacacacctccgaagtcggaacctccctgccccaacacaatggcctcctccctcgccgcgcgccgcctcctctcccgcgcagccgccgtgcatggggtggagcgagtcggccatggtcgcgggggcgagggacgttggcgtgtcccctgccatcgtgggcgcatttccaaggaaggaggccgcccttgtggagtttttcatggatgactgcctccaacaactgatggatcgaattgatgctggagaaggagagcagttgaagaacttgatactgagtgagagactctcaaaacttgttcggatgaggctggaaatgcaggcaccttatatatctaagtggcctcaagcactgagtattcagtctcaaccagcaaacgtctcaacaagcttgaagcagcgagctatcctggtggatgagatatggcatgctgctggagattctgggtcagatattgattggtatgtgaaacgtacagtgcttggtggtatctactcaacctcagaggtgtatatgttgacagacaattctccagagttccgtgatacttggacgtttgtgaaccgcagaataaaggatgctcttgatcttcagaaaaccttccaagaggccgcatacctcgctgaagccgtgggagcaggcatgagcggtaccgtgcagggtgttctcaacagggtcttccagaaccgtagtggatgaactttctttttctcaaacacgtagtgtggatggactaattccgtcttttgcacgctgcacaggataaagcacattttcccgttgaccaactggcgtatgtttataataaagcaaatggtgatgtggttgagatgcatcacgttagggt

SEQ ID NO: 39837 - protein, 201 aa, Zea mays subsp. mays
  peptide (1)..(201): Ceres Seq. ID no. 12364310
  misc_feature (1)..(200): NCBI GI NO: 18394701 NR Description: expressed protein; protein id: At1g19140
  misc_feature (1)..(200): NCBI GI NO: 21593282 NR Description: unknown [Arabidopsis thaliana]
  misc_feature (1)..(146): NCBI GI NO: 8778288 NR Description: F14D16.30 [Arabidopsis thaliana]
  misc_feature (1)..(193): NCBI GI NO: 33859690 NR Description: RIKEN cDNA 2310005O14 [Mus musculus]
  misc_feature (1)..(193): NCBI GI NO: 40789233 NR Description: hypothetical protein DKFZp434K046 [Homo sapiens]
  misc_feature (3)..(193): NCBI GI NO: 33987999 NR Description: Unknown (protein for IMAGE:2967312) [Homo sapiens]
  misc_feature (1)..(172): NCBI GI NO: 34851240 NR Description: similar to Polymerase
  misc_feature (1)..(193): NCBI GI NO: 6841302 NR Description: HSPC326 [Homo sapiens]
  misc_feature (1)..(196): NCBI GI NO: 24586344 NR Description: CG30493-PB [Drosophila melanogaster]
  misc_feature (1)..(196): NCBI GI NO: 18447632 NR Description: SD02734p [Drosophila melanogaster]
MGWSESAMVAGARDVGVSPAIVGAFPRKEAALVEFFMDDCLQQLMDRIDAGEGEQLKNLILSERLSKLVRMRLEMQAPYISKWPQALSIQSQPANVSTSLKQRAILVDEIWHAAGDSGSDIDWYVKRTVLGGIYSTSEVYMLTDNSPEFRDTWTFVNRRIKDALDLQKTFQEAAYLAEAVGAGMSGTVQGVLNRVFQNRSG

SEQ ID NO: 39838 - protein, 194 aa, Zea mays subsp. mays
  peptide (1)..(194): Ceres Seq. ID no. 12364311
  misc_feature (1)..(193): NCBI GI NO: 18394701 NR Description: expressed protein; protein id: At1g19140
  misc_feature (1)..(193): NCBI GI NO: 21593282 NR Description: unknown [Arabidopsis thaliana]
  misc_feature (1)..(139): NCBI GI NO: 8778288 NR Description: F14D16.30 [Arabidopsis thaliana]
  misc_feature (1)..(186): NCBI GI NO: 33859690 NR Description: RIKEN cDNA 2310005O14 [Mus musculus]
  misc_feature (1)..(186): NCBI GI NO: 40789233 NR Description: hypothetical protein DKFZp434K046 [Homo sapiens]
  misc_feature (1)..(186): NCBI GI NO: 33987999 NR Description: Unknown (protein for IMAGE:2967312) [Homo sapiens]
  misc_feature (1)..(165): NCBI GI NO: 34851240 NR Description: similar to Polymerase
  misc_feature (1)..(186): NCBI GI NO: 6841302 NR Description: HSPC326 [Homo sapiens]
  misc_feature (1)..(189): NCBI GI NO: 24586344 NR Description: CG30493-PB [Drosophila melanogaster]
  misc_feature (1)..(189): NCBI GI NO: 18447632 NR Description: SD02734p [Drosophila melanogaster]
MVAGARDVGVSPAIVGAFPRKEAALVEFFMDDCLQQLMDRIDAGEGEQLKNLILSERLSKLVRMRLEMQAPYISKWPQALSIQSQPANVSTSLKQRAILVDEIWHAAGDSGSDIDWYVKRTVLGGIYSTSEVYMLTDNSPEFRDTWTFVNRRIKDALDLQKTFQEAAYLAEAVGAGMSGTVQGVLNRVFQNRSG

SEQ ID NO: 39839 - protein, 165 aa, Zea mays subsp. mays
  peptide (1)..(165): Ceres Seq. ID no. 12364312
  misc_feature (1)..(164): NCBI GI NO: 18394701 NR Description: expressed protein; protein id: At1g19140
  misc_feature (1)..(164): NCBI GI NO: 21593282 NR Description: unknown [Arabidopsis thaliana]
  misc_feature (1)..(110): NCBI GI NO: 8778288 NR Description: F14D16.30 [Arabidopsis thaliana]
  misc_feature (1)..(157): NCBI GI NO: 33859690 NR Description: RIKEN cDNA 2310005O14 [Mus musculus]
  misc_feature (1)..(157): NCBI GI NO: 40789233 NR Description: hypothetical protein DKFZp434K046 [Homo sapiens]
  misc_feature (1)..(157): NCBI GI NO: 33987999 NR Description: Unknown (protein for IMAGE:2967312) [Homo sapiens]
  misc_feature (1)..(136): NCBI GI NO: 34851240 NR Description: similar to Polymerase
  misc_feature (1)..(157): NCBI GI NO: 6841302 NR Description: HSPC326 [Homo sapiens]
  misc_feature (1)..(160): NCBI GI NO: 24586344 NR Description: CG30493-PB [Drosophila melanogaster]
  misc_feature (1)..(160): NCBI GI NO: 18447632 NR Description: SD02734p [Drosophila melanogaster]
MDDCLQQLMDRIDAGEGEQLKNLILSERLSKLVRMRLEMQAPYISKWPQALSIQSQPANVSTSLKQRAILVDEIWHAAGDSGSDIDWYVKRTVLGGIYSTSEVYMLTDNSPEFRDTWTFVNRRIKDALDLQKTFQEAAYLAEAVGAGMSGTVQGVLNRVFQNRSG

SEQ ID NO: 39840 - DNA, 1394 bp, Zea mays subsp. mays; identical to SEQ ID NO: 23037
  misc_feature (1)..(1394): Ceres Seq. ID no. 13494608

SEQ ID NO: 39841 - protein, 345 aa, Zea mays subsp. mays; identical to SEQ ID NO: 23038
  peptide (1)..(345): Ceres Seq. ID no. 13494609
  misc_feature (32)..(345): NCBI GI NO: 30697571 NR Description: Peter Pan - like protein [Arabidopsis thaliana]
  misc_feature (32)..(345): NCBI GI NO: 30697573 NR Description: Peter Pan - like protein [Arabidopsis thaliana]
  misc_feature (24)..(308): NCBI GI NO: 28422433 NR Description: Similar to peter pan homolog (Drosophila)
  misc_feature (24)..(314): NCBI GI NO: 39794499 NR Description: Unknown (protein for MGC:76273)
  misc_feature (24)..(308): NCBI GI NO: 28277332 NR Description: Similar to peter pan homolog (Drosophila)
  misc_feature (24)..(308): NCBI GI NO: 21704228 NR Description: peter pan
  misc_feature (24)..(308): NCBI GI NO: 26332985 NR Description: unnamed protein product [Mus musculus]
  misc_feature (24)..(314): NCBI GI NO: 28278954 NR Description: Unknown (protein for MGC:55956) [Danio rerio]
  misc_feature (24)..(308): NCBI GI NO: 9910566 NR Description: peter pan homolog; second-step splicing factor 1
  misc_feature (24)..(308): NCBI GI NO: 11877243 NR Description: SSF1/P2Y11 chimeric protein [Homo sapiens]

SEQ ID NO: 39842 - protein, 279 aa, Zea mays subsp. mays; identical to SEQ ID NO: 23039
  peptide (1)..(279): Ceres Seq. ID no. 13494610
  misc_feature (1)..(279): NCBI GI NO: 30697571 NR Description: Peter Pan - like protein [Arabidopsis thaliana]
  misc_feature (1)..(279): NCBI GI NO: 30697573 NR Description: Peter Pan - like protein [Arabidopsis thaliana]
  misc_feature (1)..(242): NCBI GI NO: 28422433 NR Description: Similar to peter pan homolog (Drosophila)
  misc_feature (1)..(248): NCBI GI NO: 39794499 NR Description: Unknown (protein for MGC:76273)
  misc_feature (1)..(242): NCBI GI NO: 28277332 NR Description: Similar to peter pan homolog (Drosophila)
  misc_feature (1)..(242): NCBI GI NO: 21704228 NR Description: peter pan
  misc_feature (1)..(242): NCBI GI NO: 26332985 NR Description: unnamed protein product [Mus musculus]
  misc_feature (1)..(248): NCBI GI NO: 28278954 NR Description: Unknown (protein for MGC:55956) [Danio rerio]
  misc_feature (1)..(242): NCBI GI NO: 9910566 NR Description: peter pan homolog; second-step splicing factor 1
  misc_feature (1)..(242): NCBI GI NO: 11877243 NR Description: SSF1/P2Y11 chimeric protein [Homo sapiens]

SEQ ID NO: 39843 - protein, 253 aa, Zea mays subsp. mays; identical to SEQ ID NO: 23040
  peptide (1)..(253): Ceres Seq. ID no. 13494611
  misc_feature (1)..(253): NCBI GI NO: 30697571 NR Description: Peter Pan - like protein [Arabidopsis thaliana]
  misc_feature (1)..(253): NCBI GI NO: 30697573 NR Description: Peter Pan - like protein [Arabidopsis thaliana]
  misc_feature (1)..(216): NCBI GI NO: 28422433 NR Description: Similar to peter pan homolog (Drosophila)
  misc_feature (1)..(222): NCBI GI NO: 39794499 NR Description: Unknown (protein for MGC:76273)
  misc_feature (1)..(216): NCBI GI NO: 28277332 NR Description: Similar to peter pan homolog (Drosophila)
  misc_feature (1)..(216): NCBI GI NO: 21704228 NR Description: peter pan
  misc_feature (1)..(216): NCBI GI NO: 26332985 NR Description: unnamed protein product [Mus musculus]
  misc_feature (1)..(222): NCBI GI NO: 28278954 NR Description: Unknown (protein for MGC:55956) [Danio rerio]
  misc_feature (1)..(216): NCBI GI NO: 9910566 NR Description: peter pan homolog; second-step splicing factor 1
  misc_feature (1)..(216): NCBI GI NO: 11877243 NR Description: SSF1/P2Y11 chimeric protein [Homo sapiens]

SEQ ID NO: 39844 - DNA, 1172 bp, Zea mays subsp. mays
  misc_feature (1)..(1172): Ceres Seq. ID no. 12350812
tgaatatgatgtttatacatggggttggaaagaatgtgttccaactggaagggttattggagaccagtcttcagttggaaccatggaaaaggatgaaaggcaaatggcaatggccactgaccaagtgagccctaggtcacaggtgtctaggacaagcagcggagcggcagctggttcctctgaaagcagaggcactgatgacagcacaaagcgacgaaagttgtctttagcaaaacatggacctgagagttcgacatccagtgatgaaagtctttcagcacccccttgtgttgtgacatttagtacaggagtgaaaatagtggctgtagccgctggtggtcgtcatacattagcactatcagatttaggtcaggtgtggggttggggatatggaggagaagggcaactaggtttgggttctagaatccgaactgtttcttctccccatcctgtaccgtgcattgaatcagcactatacaccaaggataggccatcagctatgaaaggtaacaaggctgctgaaggacatgtcagtaaagtcttgggaaattgcgtgagggcaattgcttgtggaggtcgtcacagtgctgtagtaacagattcaggagcacttcttacatttggatgggggctgtatggacagtgtggacaagggaatacagatgatgttttaagtccaacgtgtgtatcgtctatcctgggaatcaagatgcaagatgttgccgcaggtttgtggcacactgtatgtacatctgtagatggtgatgtgtattcgtttggaggaaaccagtttggacagcttggcactggttctgatcaggctgagactcttccaaaattggtagatgctacaagcctggagaataagaacgccagatccgtttcttgtggagctcgccatagtgctattataacagatgaaggtgaggtattctgctggggatggaacaagtatggccagcttggccttggcgactcaatggacaggaacgtgccttgcagtgtacgtgtggacgcttaccacccgctaaacgtatcatgtggctggtggcacaccttggtgctcgcggagtcgcctgcttgaaacctgacaaagaaattaccttagattgacaattttgttaggaacttgtaggctcgtgcaggtacggtgatgctgcatttcatcgtgt

SEQ ID NO: 39845 - protein, 360 aa, Zea mays subsp. mays
  peptide (1)..(360): Ceres Seq. ID no. 12350813
  misc_feature (307)..(355): Pfam Name: RCC1 Pfam Description: Regulator of chromosome condensation
  misc_feature (1)..(359): NCBI GI NO: 34908266 NR Description: P0446B05.22
  misc_feature (4)..(357): NCBI GI NO: 15233306 NR Description: regulator of chromosome condensation-like protein
  misc_feature (3)..(359): NCBI GI NO: 15232347 NR Description: putative protein; protein id: At3g53830.1
  misc_feature (182)..(357): NCBI GI NO: 32487442 NR Description: OSJNBa0006B20.1
  misc_feature (103)..(140): NCBI GI NO: 32487442 NR Description: OSJNBa0006B20.1
  misc_feature (185)..(357): NCBI GI NO: 11358913 NR Description: UVB-resistance protein UVR8
  misc_feature (185)..(357): NCBI GI NO: 15237540 NR Description: UVB-resistance protein UVR8 (gb|AAD43920
  misc_feature (103)..(139): NCBI GI NO: 11358913 NR Description: UVB-resistance protein UVR8
  misc_feature (103)..(139): NCBI GI NO: 15237540 NR Description: UVB-resistance protein UVR8 (gb|AAD43920
  misc_feature (105)..(139): NCBI GI NO: 11358913 NR Description: UVB-resistance protein UVR8
EYDVYTWGWKECVPTGRVIGDQSSVGTMEKDERQMAMATDQVSPRSQVSRTSSGAAAGSSESRGTDDSTKRRKLSLAKHGPESSTSSDESLSAPPCVVTFSTGVKIVAVAAGGRHTLALSDLGQVWGWGYGGEGQLGLGSRIRTVSSPHPVPCIESALYTKDRPSAMKGNKAAEGHVSKVLGNCVRAIACGGRHSAVVTDSGALLTFGWGLYGQCGQGNTDDVLSPTCVSSILGIKMQDVAAGLWHTVCTSVDGDVYSFGGNQFGQLGTGSDQAETLPKLVDATSLENKNARSVSCGARHSAIITDEGEVFCWGWNKYGQLGLGDSMDRNVPCSVRVDAYHPLNVSCGWWHTLVLAESPA

SEQ ID NO: 39846 - protein, 333 aa, Zea mays subsp. mays
  peptide (1)..(333): Ceres Seq. ID no. 12350814
  misc_feature (280)..(328): Pfam Name: RCC1 Pfam Description: Regulator of chromosome condensation
  misc_feature (1)..(332): NCBI GI NO: 34908266 NR Description: P0446B05.22
  misc_feature (1)..(330): NCBI GI NO: 15233306 NR Description: regulator of chromosome condensation-like protein
  misc_feature (1)..(332): NCBI GI NO: 15232347 NR Description: putative protein; protein id: At3g53830.1
  misc_feature (155)..(330): NCBI GI NO: 32487442 NR Description: OSJNBa0006B20.1
  misc_feature (76)..(113): NCBI GI NO: 32487442 NR Description: OSJNBa0006B20.1
  misc_feature (158)..(330): NCBI GI NO: 11358913 NR Description: UVB-resistance protein UVR8
  misc_feature (158)..(330): NCBI GI NO: 15237540 NR Description: UVB-resistance protein UVR8 (gb|AAD43920
  misc_feature (76)..(112): NCBI GI NO: 11358913 NR Description: UVB-resistance protein UVR8
  misc_feature (76)..(112): NCBI GI NO: 15237540 NR Description: UVB-resistance protein UVR8 (gb|AAD43920
  misc_feature (78)..(112): NCBI GI NO: 11358913 NR Description: UVB-resistance protein UVR8
MEKDERQMAMATDQVSPRSQVSRTSSGAAAGSSESRGTDDSTKRRKLSLAKHGPESSTSSDESLSAPPCVVTFSTGVKIVAVAAGGRHTLALSDLGQVWGWGYGGEGQLGLGSRIRTVSSPHPVPCIESALYTKDRPSAMKGNKAAEGHVSKVLGNCVRAIACGGRHSAVVTDSGALLTFGWGLYGQCGQGNTDDVLSPTCVSSILGIKMQDVAAGLWHTVCTSVDGDVYSFGGNQFGQLGTGSDQAETLPKLVDATSLENKNARSVSCGARHSAIITDEGEVFCWGWNKYGQLGLGDSMDRNVPCSVRVDAYHPLNVSCGWWHTLVLAESPA

SEQ ID NO: 39847 - protein, 326 aa, Zea mays subsp. mays
  peptide (1)..(326): Ceres Seq. ID no. 12350815
  misc_feature (273)..(321): Pfam Name: RCC1 Pfam Description: Regulator of chromosome condensation
  misc_feature (1)..(325): NCBI GI NO: 34908266 NR Description: P0446B05.22
  misc_feature (1)..(323): NCBI GI NO: 15233306 NR Description: regulator of chromosome condensation-like protein
  misc_feature (1)..(325): NCBI GI NO: 15232347 NR Description: putative protein; protein id: At3g53830.1
  misc_feature (148)..(323): NCBI GI NO: 32487442 NR Description: OSJNBa0006B20.1
  misc_feature (69)..(106): NCBI GI NO: 32487442 NR Description: OSJNBa0006B20.1
  misc_feature (151)..(323): NCBI GI NO: 11358913 NR Description: UVB-resistance protein UVR8
  misc_feature (151)..(323): NCBI GI NO: 15237540 NR Description: UVB-resistance protein UVR8 (gb|AAD43920
  misc_feature (69)..(105): NCBI GI NO: 11358913 NR Description: UVB-resistance protein UVR8
  misc_feature (69)..(105): NCBI GI NO: 15237540 NR Description: UVB-resistance protein UVR8 (gb|AAD43920
  misc_feature (71)..(105): NCBI GI NO: 11358913 NR Description: UVB-resistance protein UVR8
MAMATDQVSPRSQVSRTSSGAAAGSSESRGTDDSTKRRKLSLAKHGPESSTSSDESLSAPPCVVTFSTGVKIVAVAAGGRHTLALSDLGQVWGWGYGGEGQLGLGSRIRTVSSPHPVPCIESALYTKDRPSAMKGNKAAEGHVSKVLGNCVRAIACGGRHSAVVTDSGALLTFGWGLYGQCGQGNTDDVLSPTCVSSILGIKMQDVAAGLWHTVCTSVDGDVYSFGGNQFGQLGTGSDQAETLPKLVDATSLENKNARSVSCGARHSAIITDEGEVFCWGWNKYGQLGLGDSMDRNVPCSVRVDAYHPLNVSCGWWHTLVLAESPA

SEQ ID NO: 39848 - DNA, 740 bp, Zea mays subsp. mays
  misc_feature (1)..(740): Ceres Seq. ID no. 12337596
  misc_feature (653)..(653): n is a, c, t, g, unknown, or other
taccagcttcatgtacctcaaagccaaagcaatcacctgagctgtgtatgttcccacagtatgttgtcccgacaatgcgcacaccattgttcatacttaatgcagcctacgattcgtggcaggtcaagaacgtcctagcacctagtccagctgatccgaagaagacttgggcccaatgcaagcttgacatcaagagctgctccgccagccaactcacaaccttgcaaaatttcaggacagattttctggcagcactccctaaaacgcagtctgtaggcatgttcatcgactcatgcaatgctcactgccaatcaggatctcaagacacgtggctagccgatggttctcccacggttaacaagacgcaaattggtaaggcggtgggggactggtactacgatagggaggtccctcggcagattgattgcccgtatccctgcaacccaacttgcaagaaccgtgatgatgattggagcatttgtataagtagttcatgttatcgaaatgaaaacaataaaggatcacaacgcgcgcccgtagttgtagatgatgaattataaacacatatgactgagctcaaagttgtttaatcatcatctgttgcgaaatgaggaagacaattggtgtcttgaagctgtgttttcgactgtgtntaaagcgtaaatgtaacgtatattgtgtcttcgcctatgcttaagacattggactagttgattggtcaatttaatttattaaatgcc

SEQ ID NO: 39849 - protein, 185 aa, Zea mays subsp. mays
  peptide (1)..(185): Ceres Seq. ID no. 12337597
  misc_feature (1)..(140): Pfam Name: Pfam Description:  Pectinacetylesterase
  misc_feature (1)..(156): NCBI GI NO: 38344147 NR Description: OSJNBa0041A02.14
  misc_feature (1)..(153): NCBI GI NO: 7488883 NR Description: pectin acetylesterase (EC 3
  misc_feature (1)..(150): NCBI GI NO: 7488140 NR Description: probable pectin acetylesterase (EC 3
  misc_feature (1)..(150): NCBI GI NO: 18415308 NR Description: pectinacetylesterase, putative
  misc_feature (1)..(153): NCBI GI NO: 22328797 NR Description: pectinacetylesterase family; protein id:At4g19420
  misc_feature (1)..(150): NCBI GI NO: 21593445 NR Description: pectin acetylesterase [Arabidopsis thaliana]
  misc_feature (1)..(150): NCBI GI NO: 15242357 NR Description: pectinacetylesterase, putative
  misc_feature (9)..(152): NCBI GI NO: 6478931 NR Description: putative pectinacetylesterase
  misc_feature (1)..(152): NCBI GI NO: 18397406 NR Description: pectinacetylesterase, putative
  misc_feature (15)..(152): NCBI GI NO: 7487997 NR Description: pectin acetylesterase homolog F21E10
PASCTSKPKQSPELCMFPQYVVPTMRTPLFILNAAYDSWQVKNVLAPSPADPKKTWAQCKLDIKSCSASQLTTLQNFRTDFLAALPKTQSVGMFIDSCNAHCQSGSQDTWLADGSPTVNKTQIGKAVGDWYYDREVPRQIDCPYPCNPTCKNRDDDWSICISSSCYRNENNKGSQRAPVVVDDEL

SEQ ID NO: 39850 - protein, 170 aa, Zea mays subsp. mays
  peptide (1)..(170): Ceres Seq. ID no. 12337598
  misc_feature (1)..(125): Pfam Name: Pfam Description:  Pectinacetylesterase
  misc_feature (1)..(141): NCBI GI NO: 38344147 NR Description: OSJNBa0041A02.14
  misc_feature (1)..(138): NCBI GI NO: 7488883 NR Description: pectin acetylesterase (EC 3
  misc_feature (1)..(135): NCBI GI NO: 7488140 NR Description: probable pectin acetylesterase (EC 3
  misc_feature (1)..(135): NCBI GI NO: 18415308 NR Description: pectinacetylesterase, putative
  misc_feature (1)..(138): NCBI GI NO: 22328797 NR Description: pectinacetylesterase family; protein id:At4g19420
  misc_feature (1)..(135): NCBI GI NO: 21593445 NR Description: pectin acetylesterase [Arabidopsis thaliana]
  misc_feature (1)..(135): NCBI GI NO: 15242357 NR Description: pectinacetylesterase, putative
  misc_feature (1)..(137): NCBI GI NO: 6478931 NR Description: putative pectinacetylesterase
  misc_feature (1)..(137): NCBI GI NO: 18397406 NR Description: pectinacetylesterase, putative
  misc_feature (1)..(137): NCBI GI NO: 7487997 NR Description: pectin acetylesterase homolog F21E10
MFPQYVVPTMRTPLFILNAAYDSWQVKNVLAPSPADPKKTWAQCKLDIKSCSASQLTTLQNFRTDFLAALPKTQSVGMFIDSCNAHCQSGSQDTWLADGSPTVNKTQIGKAVGDWYYDREVPRQIDCPYPCNPTCKNRDDDWSICISSSCYRNENNKGSQRAPVVVDDEL

SEQ ID NO: 39851 - protein, 161 aa, Zea mays subsp. mays
  peptide (1)..(161): Ceres Seq. ID no. 12337599
  misc_feature (1)..(116): Pfam Name: Pfam Description:  Pectinacetylesterase
  misc_feature (1)..(132): NCBI GI NO: 38344147 NR Description: OSJNBa0041A02.14
  misc_feature (1)..(129): NCBI GI NO: 7488883 NR Description: pectin acetylesterase (EC 3
  misc_feature (1)..(126): NCBI GI NO: 7488140 NR Description: probable pectin acetylesterase (EC 3
  misc_feature (1)..(126): NCBI GI NO: 18415308 NR Description: pectinacetylesterase, putative
  misc_feature (1)..(129): NCBI GI NO: 22328797 NR Description: pectinacetylesterase family; protein id:At4g19420
  misc_feature (1)..(126): NCBI GI NO: 21593445 NR Description: pectin acetylesterase [Arabidopsis thaliana]
  misc_feature (1)..(126): NCBI GI NO: 15242357 NR Description: pectinacetylesterase, putative
  misc_feature (1)..(128): NCBI GI NO: 6478931 NR Description: putative pectinacetylesterase
  misc_feature (1)..(128): NCBI GI NO: 18397406 NR Description: pectinacetylesterase, putative
  misc_feature (1)..(128): NCBI GI NO: 7487997 NR Description: pectin acetylesterase homolog F21E10
MRTPLFILNAAYDSWQVKNVLAPSPADPKKTWAQCKLDIKSCSASQLTTLQNFRTDFLAALPKTQSVGMFIDSCNAHCQSGSQDTWLADGSPTVNKTQIGKAVGDWYYDREVPRQIDCPYPCNPTCKNRDDDWSICISSSCYRNENNKGSQRAPVVVDDEL

SEQ ID NO: 39852 - DNA, 658 bp, Zea mays subsp. mays
  misc_feature (1)..(658): Ceres Seq. ID no. 12435220
gagctgaacggttctgcttcctcccaatggccttgcaggatggcgacattatcaacatcgacgttactgtctacttaaacggataccatggggacacctcgaggacgtacctgtgcggagaagtcgacgacgcaactaagcagctcgtgaaggtcactgaagagtgcatgatgcgcggcatatcagcctgcaggcacggcgccagtttcaaggaaatcggccagagaataagtgagcacgcggagaagtacggatacggcatcgaccccttcgtggggcacggcgttgggaggatgttccactgcgagcccatcatatggcatacctacgattacgagcccgggttcatggtcgcaggccagacattcaccgtagagccgacgctgtcgatggggagcacgcagtgcgtggtgtgggacgacgggtggacggccgtggcggcggacggcagcctcagcgcgcagttcgagcacaccgtgctggtcaccggcgacggcgcggaggtcctgaccgggttcccgtagctgcctgcacgcatcacgtgagcggtgagcctgggtgggccactgcgtcggcgagggacggaactgcaggagcaggcatgcagctatgcgcacgctgacaattttattaaaaatctatgttggacggttgccgt

SEQ ID NO: 39853 - protein, 173 aa, Zea mays subsp. mays
  peptide (1)..(173): Ceres Seq. ID no. 12435221
  misc_feature (11)..(170): NCBI GI NO: 38345794 NR Description: OSJNBa0085I10.11
  misc_feature (11)..(170): NCBI GI NO: 11320956 NR Description: methionine aminopeptidase-like protein
  misc_feature (11)..(170): NCBI GI NO: 15222218 NR Description: methionine aminopeptidase I
  misc_feature (11)..(170): NCBI GI NO: 15230872 NR Description: methionine aminopeptidase, putative
  misc_feature (11)..(170): NCBI GI NO: 11320958 NR Description: methionine aminopeptidase-like protein
  misc_feature (11)..(170): NCBI GI NO: 7939560 NR Description: methionine aminopeptidase-like protein
  misc_feature (11)..(170): NCBI GI NO: 18419957 NR Description: methionyl aminopeptidase-like protein
  misc_feature (11)..(170): NCBI GI NO: 25289731 NR Description: methionyl aminopeptidase-like protein
  misc_feature (11)..(170): NCBI GI NO: 34394646 NR Description: putative methionine aminopeptidase I (MAP1)
  misc_feature (11)..(170): NCBI GI NO: 23018702 NR Description: hypothetical protein [Thermobifida fusca]
AERFCFLPMALQDGDIINIDVTVYLNGYHGDTSRTYLCGEVDDATKQLVKVTEECMMRGISACRHGASFKEIGQRISEHAEKYGYGIDPFVGHGVGRMFHCEPIIWHTYDYEPGFMVAGQTFTVEPTLSMGSTQCVVWDDGWTAVAADGSLSAQFEHTVLVTGDGAEVLTGFP

SEQ ID NO: 39854 - protein, 165 aa, Zea mays subsp. mays
  peptide (1)..(165): Ceres Seq. ID no. 12435222
  misc_feature (3)..(162): NCBI GI NO: 38345794 NR Description: OSJNBa0085I10.11
  misc_feature (3)..(162): NCBI GI NO: 11320956 NR Description: methionine aminopeptidase-like protein
  misc_feature (3)..(162): NCBI GI NO: 15222218 NR Description: methionine aminopeptidase I
  misc_feature (3)..(162): NCBI GI NO: 15230872 NR Description: methionine aminopeptidase, putative
  misc_feature (3)..(162): NCBI GI NO: 11320958 NR Description: methionine aminopeptidase-like protein
  misc_feature (3)..(162): NCBI GI NO: 7939560 NR Description: methionine aminopeptidase-like protein
  misc_feature (3)..(162): NCBI GI NO: 18419957 NR Description: methionyl aminopeptidase-like protein
  misc_feature (3)..(162): NCBI GI NO: 25289731 NR Description: methionyl aminopeptidase-like protein
  misc_feature (3)..(162): NCBI GI NO: 34394646 NR Description: putative methionine aminopeptidase I (MAP1)
  misc_feature (3)..(162): NCBI GI NO: 23018702 NR Description: hypothetical protein [Thermobifida fusca]
MALQDGDIINIDVTVYLNGYHGDTSRTYLCGEVDDATKQLVKVTEECMMRGISACRHGASFKEIGQRISEHAEKYGYGIDPFVGHGVGRMFHCEPIIWHTYDYEPGFMVAGQTFTVEPTLSMGSTQCVVWDDGWTAVAADGSLSAQFEHTVLVTGDGAEVLTGFP

SEQ ID NO: 39855 - protein, 118 aa, Zea mays subsp. mays
  peptide (1)..(118): Ceres Seq. ID no. 12435223
  misc_feature (1)..(115): NCBI GI NO: 38345794 NR Description: OSJNBa0085I10.11
  misc_feature (1)..(115): NCBI GI NO: 11320956 NR Description: methionine aminopeptidase-like protein
  misc_feature (1)..(115): NCBI GI NO: 15222218 NR Description: methionine aminopeptidase I
  misc_feature (1)..(115): NCBI GI NO: 15230872 NR Description: methionine aminopeptidase, putative
  misc_feature (1)..(115): NCBI GI NO: 11320958 NR Description: methionine aminopeptidase-like protein
  misc_feature (1)..(115): NCBI GI NO: 7939560 NR Description: methionine aminopeptidase-like protein
  misc_feature (1)..(115): NCBI GI NO: 18419957 NR Description: methionyl aminopeptidase-like protein
  misc_feature (1)..(115): NCBI GI NO: 25289731 NR Description: methionyl aminopeptidase-like protein
  misc_feature (1)..(115): NCBI GI NO: 34394646 NR Description: putative methionine aminopeptidase I (MAP1)
  misc_feature (1)..(115): NCBI GI NO: 23018702 NR Description: hypothetical protein [Thermobifida fusca]
MMRGISACRHGASFKEIGQRISEHAEKYGYGIDPFVGHGVGRMFHCEPIIWHTYDYEPGFMVAGQTFTVEPTLSMGSTQCVVWDDGWTAVAADGSLSAQFEHTVLVTGDGAEVLTGFP

SEQ ID NO: 39856 - DNA, 760 bp, Zea mays subsp. mays
  misc_feature (1)..(760): Ceres Seq. ID no. 12416334
  misc_feature (733)..(733): n is a, c, t, g, unknown, or other
  misc_feature (735)..(735): n is a, c, t, g, unknown, or other
acatcgcactctcctccagcctccaggcttggcaagcgtgcttcacatgaccacatccatgtcgaacagcgccgctagcgagaagcaatcgcagcaggcaggccacaggcagcggcccccggcggcgtcggccgcggacgcggagatgcagagggtgttctgccgcatcgacgcggacggcgacggccggatctccgcctcggagctggccgcggtgacgcgcgccatctccccgccagcgagctcctcgcacgggcgccgcgaggtggccgccatgatggacgagctggacacggaccgcgacggcttcgtggacctcggcgagttcagggcgttccacgcgcgcggcggcggcggcgtggacgacgacgccgagctccgcgccgccttcgacgtctacgacgtcgacggcgacggccgcgtcacggcggccgagctgggcaaggtgctcgcgcgcatcggcgagggcggatgcagcgccgaggagtgcgagcgggatggtcgccggcgtcgacgccgacggctgcgtcgggttcgaggacttcaagaagatgatgtgcccccagccgcaagccgaagccggcgccgccgggcgggacaaggcagaggccgaggccgaggacaaggaggagtgacgggtgtagtcaggggggaacgggaacggctggagttgtttgcgtctcgcgttcttttcacctgtacgcaggaaatactcctcctgcataagactacngnacttttggataaaaaattttatttc

SEQ ID NO: 39857 - protein, 253 aa, Zea mays subsp. mays
  peptide (1)..(253): Ceres Seq. ID no. 12416335
  misc_feature (125)..(153): Pfam Name: Pfam Description:  EF hand
  misc_feature (14)..(165): NCBI GI NO: 34895640 NR Description: OSJNBa0083M16.33
  misc_feature (21)..(163): NCBI GI NO: 14589311 NR Description: calcium binding protein [Sesbania rostrata]
  misc_feature (48)..(165): NCBI GI NO: 15240340 NR Description: CALMODULIN-RELATED PROTEIN 2, TOUCH-INDUCED
  misc_feature (42)..(165): NCBI GI NO: 19386815 NR Description: B1147A04.10
  misc_feature (48)..(155): NCBI GI NO: 6901654 NR Description: calcium-binding protein [Olea europaea]
  misc_feature (48)..(165): NCBI GI NO: 18408502 NR Description: calmodulin-related protein; protein id:At1g66400
  misc_feature (48)..(165): NCBI GI NO: 21618074 NR Description: calmodulin-related protein [Arabidopsis thaliana]
  misc_feature (48)..(165): NCBI GI NO: 15221030 NR Description: calcium-binding protein, putative
  misc_feature (48)..(155): NCBI GI NO: 14423648 NR Description: Calcium-binding allergen Ole e 8 (PCA18/PCA23)
  misc_feature (44)..(165): NCBI GI NO: 15219514 NR Description: putative calmodulin; protein id: At1g73630
  misc_feature (244)..(244): Xaa is any aa, unknown or other
  misc_feature (245)..(245): Xaa is any aa, unknown or other
HRTLLQPPGLASVLHMTTSMSNSAASEKQSQQAGHRQRPPAASAADAEMQRVFCRIDADGDGRISASELAAVTRAISPPASSSHGRREVAAMMDELDTDRDGFVDLGEFRAFHARGGGGVDDDAELRAAFDVYDVDGDGRVTAAELGKVLARIGEGGCSAEECERDGRRRRRRRLRRVRGLQEDDVPPAASRSRRRRAGQGRGRGRGQGGVTGVVRGERERLELFASRVLFTCTQEILLLHKTXXLLDKKFYF

SEQ ID NO: 39858 - protein, 238 aa, Zea mays subsp. mays
  peptide (1)..(238): Ceres Seq. ID no. 12416336
  misc_feature (110)..(138): Pfam Name: Pfam Description:  EF hand
  misc_feature (1)..(150): NCBI GI NO: 34895640 NR Description: OSJNBa0083M16.33
  misc_feature (6)..(148): NCBI GI NO: 14589311 NR Description: calcium binding protein [Sesbania rostrata]
  misc_feature (33)..(150): NCBI GI NO: 15240340 NR Description: CALMODULIN-RELATED PROTEIN 2, TOUCH-INDUCED
  misc_feature (27)..(150): NCBI GI NO: 19386815 NR Description: B1147A04.10
  misc_feature (33)..(140): NCBI GI NO: 6901654 NR Description: calcium-binding protein [Olea europaea]
  misc_feature (33)..(150): NCBI GI NO: 18408502 NR Description: calmodulin-related protein; protein id:At1g66400
  misc_feature (33)..(150): NCBI GI NO: 21618074 NR Description: calmodulin-related protein [Arabidopsis thaliana]
  misc_feature (33)..(150): NCBI GI NO: 15221030 NR Description: calcium-binding protein, putative
  misc_feature (33)..(140): NCBI GI NO: 14423648 NR Description: Calcium-binding allergen Ole e 8 (PCA18/PCA23)
  misc_feature (29)..(150): NCBI GI NO: 15219514 NR Description: putative calmodulin; protein id: At1g73630
  misc_feature (229)..(229): Xaa is any aa, unknown or other
  misc_feature (230)..(230): Xaa is any aa, unknown or other
MTTSMSNSAASEKQSQQAGHRQRPPAASAADAEMQRVFCRIDADGDGRISASELAAVTRAISPPASSSHGRREVAAMMDELDTDRDGFVDLGEFRAFHARGGGGVDDDAELRAAFDVYDVDGDGRVTAAELGKVLARIGEGGCSAEECERDGRRRRRRRLRRVRGLQEDDVPPAASRSRRRRAGQGRGRGRGQGGVTGVVRGERERLELFASRVLFTCTQEILLLHKTXXLLDKKFYF

SEQ ID NO: 39859 - protein, 234 aa, Zea mays subsp. mays
  peptide (1)..(234): Ceres Seq. ID no. 12416337
  misc_feature (106)..(134): Pfam Name: Pfam Description:  EF hand
  misc_feature (1)..(146): NCBI GI NO: 34895640 NR Description: OSJNBa0083M16.33
  misc_feature (2)..(144): NCBI GI NO: 14589311 NR Description: calcium binding protein [Sesbania rostrata]
  misc_feature (29)..(146): NCBI GI NO: 15240340 NR Description: CALMODULIN-RELATED PROTEIN 2, TOUCH-INDUCED
  misc_feature (23)..(146): NCBI GI NO: 19386815 NR Description: B1147A04.10
  misc_feature (29)..(136): NCBI GI NO: 6901654 NR Description: calcium-binding protein [Olea europaea]
  misc_feature (29)..(146): NCBI GI NO: 18408502 NR Description: calmodulin-related protein; protein id:At1g66400
  misc_feature (29)..(146): NCBI GI NO: 21618074 NR Description: calmodulin-related protein [Arabidopsis thaliana]
  misc_feature (29)..(146): NCBI GI NO: 15221030 NR Description: calcium-binding protein, putative
  misc_feature (29)..(136): NCBI GI NO: 14423648 NR Description: Calcium-binding allergen Ole e 8 (PCA18/PCA23)
  misc_feature (25)..(146): NCBI GI NO: 15219514 NR Description: putative calmodulin; protein id: At1g73630
  misc_feature (225)..(225): Xaa is any aa, unknown or other
  misc_feature (226)..(226): Xaa is any aa, unknown or other
MSNSAASEKQSQQAGHRQRPPAASAADAEMQRVFCRIDADGDGRISASELAAVTRAISPPASSSHGRREVAAMMDELDTDRDGFVDLGEFRAFHARGGGGVDDDAELRAAFDVYDVDGDGRVTAAELGKVLARIGEGGCSAEECERDGRRRRRRRLRRVRGLQEDDVPPAASRSRRRRAGQGRGRGRGQGGVTGVVRGERERLELFASRVLFTCTQEILLLHKTXXLLDKKFYF

SEQ ID NO: 39860 - DNA, 765 bp, Zea mays subsp. mays
  misc_feature (1)..(765): Ceres Seq. ID no. 12367201
gcacgagaccattacctagaacatcctaatcaaaaaggaacccactccaactgtgcggcgcgtccaaaaatacaaaaggcaagcgagcgagctccaagttcggctgctccaatttcactcggcatggctcctcaggcgtgggtcgtggcggagaacggcgaggacctccaacaacccagggaattcctgccgctctctaagcttgaagatgttggcgtgttgtattggcatttggaccctaagaagtctgaaagcgaggaggaactagcaaaaatccgcagagacagaggctacagttacatggatcttattgagatatgtcccgacaaactggaaaactatgaggagaaggtgaagaacttcttctgtgagcacatgcacgctgacgaagagatccgctattgcttggagggcagcgggtactttgacgtccgcgacaaagatgacaagtggattcgaattcggataagagaaggagacatgatcatcctaccagctggaatttatcatcggttcaccctcgacagcgctaaatacacgaagctcatgaggcttttcattggggaaccagtctggaccgcgttaaaccgccctcaggaggaccacccggcgaggcaagagtatgtcaagaatgtgagtgcgggcactggatttgctcttgcagcacactgaatatgttttttccctttcccgtgtataagaatatatggtcacttggattcatgtaccacgtcatagtatcatcatatggtatgacgcaaccgc

SEQ ID NO: 39861 - protein, 223 aa, Zea mays subsp. mays
  peptide (1)..(223): Ceres Seq. ID no. 12367202
  misc_feature (45)..(193): Pfam Name: Pfam Description:  ARD/ARD' family
  misc_feature (42)..(223): NCBI GI NO: 37534410 NR Description: putative heat shock protein
  misc_feature (42)..(223): NCBI GI NO: 21554849 NR Description: submergence induced protein 2A
  misc_feature (42)..(223): NCBI GI NO: 18422379 NR Description: putative protein; protein id: At5g43850
  misc_feature (45)..(223): NCBI GI NO: 10177955 NR Description: gene_id:MQD19
  misc_feature (45)..(212): NCBI GI NO: 7489559 NR Description: probable submergence induced
  misc_feature (45)..(212): NCBI GI NO: 14522834 NR Description: iron-deficiency induced gene [Hordeum vulgare]
  misc_feature (45)..(222): NCBI GI NO: 18414289 NR Description: Expressed protein; protein id: At4g14710
  misc_feature (45)..(211): NCBI GI NO: 18414293 NR Description: Expressed protein; protein id: At4g14716
  misc_feature (45)..(212): NCBI GI NO: 34902616 NR Description: Putative probable submergence induced
  misc_feature (45)..(217): NCBI GI NO: 7489558 NR Description: probable submergence induced protein 2 - rice
ARDHYLEHPNQKGTHSNCAARPKIQKASERAPSSAAPISLGMAPQAWVVAENGEDLQQPREFLPLSKLEDVGVLYWHLDPKKSESEEELAKIRRDRGYSYMDLIEICPDKLENYEEKVKNFFCEHMHADEEIRYCLEGSGYFDVRDKDDKWIRIRIREGDMIILPAGIYHRFTLDSAKYTKLMRLFIGEPVWTALNRPQEDHPARQEYVKNVSAGTGFALAAH

SEQ ID NO: 39862 - protein, 182 aa, Zea mays subsp. mays
  peptide (1)..(182): Ceres Seq. ID no. 12367203
  misc_feature (4)..(152): Pfam Name: Pfam Description:  ARD/ARD' family
  misc_feature (1)..(182): NCBI GI NO: 37534410 NR Description: putative heat shock protein
  misc_feature (1)..(182): NCBI GI NO: 21554849 NR Description: submergence induced protein 2A
  misc_feature (1)..(182): NCBI GI NO: 18422379 NR Description: putative protein; protein id: At5g43850
  misc_feature (4)..(182): NCBI GI NO: 10177955 NR Description: gene_id:MQD19
  misc_feature (4)..(171): NCBI GI NO: 7489559 NR Description: probable submergence induced
  misc_feature (4)..(171): NCBI GI NO: 14522834 NR Description: iron-deficiency induced gene [Hordeum vulgare]
  misc_feature (4)..(181): NCBI GI NO: 18414289 NR Description: Expressed protein; protein id: At4g14710
  misc_feature (4)..(170): NCBI GI NO: 18414293 NR Description: Expressed protein; protein id: At4g14716
  misc_feature (4)..(171): NCBI GI NO: 34902616 NR Description: Putative probable submergence induced
  misc_feature (4)..(176): NCBI GI NO: 7489558 NR Description: probable submergence induced protein 2 - rice
MAPQAWVVAENGEDLQQPREFLPLSKLEDVGVLYWHLDPKKSESEEELAKIRRDRGYSYMDLIEICPDKLENYEEKVKNFFCEHMHADEEIRYCLEGSGYFDVRDKDDKWIRIRIREGDMIILPAGIYHRFTLDSAKYTKLMRLFIGEPVWTALNRPQEDHPARQEYVKNVSAGTGFALAAH

SEQ ID NO: 39863 - protein, 123 aa, Zea mays subsp. mays
  peptide (1)..(123): Ceres Seq. ID no. 12367204
  misc_feature (1)..(93): Pfam Name: Pfam Description:  ARD/ARD' family
  misc_feature (1)..(123): NCBI GI NO: 37534410 NR Description: putative heat shock protein
  misc_feature (1)..(123): NCBI GI NO: 21554849 NR Description: submergence induced protein 2A
  misc_feature (1)..(123): NCBI GI NO: 18422379 NR Description: putative protein; protein id: At5g43850
  misc_feature (1)..(123): NCBI GI NO: 10177955 NR Description: gene_id:MQD19
  misc_feature (1)..(112): NCBI GI NO: 7489559 NR Description: probable submergence induced
  misc_feature (1)..(112): NCBI GI NO: 14522834 NR Description: iron-deficiency induced gene [Hordeum vulgare]
  misc_feature (1)..(122): NCBI GI NO: 18414289 NR Description: Expressed protein; protein id: At4g14710
  misc_feature (1)..(111): NCBI GI NO: 18414293 NR Description: Expressed protein; protein id: At4g14716
  misc_feature (1)..(112): NCBI GI NO: 34902616 NR Description: Putative probable submergence induced
  misc_feature (1)..(117): NCBI GI NO: 7489558 NR Description: probable submergence induced protein 2 - rice
MDLIEICPDKLENYEEKVKNFFCEHMHADEEIRYCLEGSGYFDVRDKDDKWIRIRIREGDMIILPAGIYHRFTLDSAKYTKLMRLFIGEPVWTALNRPQEDHPARQEYVKNVSAGTGFALAAH

SEQ ID NO: 39864 - DNA, 1042 bp, Zea mays subsp. mays
  misc_feature (1)..(1042): Ceres Seq. ID no. 12416568
aattccacggaatctctcccagctgtcctgtttttccttccatggatccccctcgctagctgagcccgctggtgctcgcggtcgcgggtggtgagcgcggcctcgccggcggcgcagcggcgatggacctcccgtggctggatctgcccttcaccttcctgacgctgctccttgccacccgcctcgcctacgactactatggcgacgtcgccgccgccttcgccggcggcttctcgatccaggtcttcctcttctactgcttcgcgcgctggtaccgctacgccatcgccggccgcgccgccgccgccgctggggcccgcgacgacccgtcgccgtcggcgcggccgccgccgcagcaggaggaggacgcggacgccccgcccgtcctgacaccgctgctggggtcgccggacggcgcgcggccgtcgacgctggccaaccgttgcttcgccgtcgtgttcatggtcttcgtgccgctggtcatcgtcgtcttcgagcggagccaggccgacgtcgtggcctacgcgctctgcctcgccaacatcatcgtcatggtcgtctggctctcgccggacaccgggtcaacggtctcggccgccaagtcgctcctgcgtctcagcgacgacgaggatgaaggcagcgggggcagctccggcgcagaggacaagtgctgcgtctgcctcgccggcatgcgggaggaccaggcgcttcgggcgctgccgcggtgcggccacagcttccacgacaagtgcatcggcaagtggctcaaggcgcacccaacgtgccctgtgtgccgggccaccgccgtgccgccgccgctccacagcgggggcggcgatccgctagatgacgatattagccccgtctagctagcttcccctcagtgattcatccatcttatcttatctaacgaattttgtggacatttgttgggaaatttggtgaaaacctgtatagtaatccaaaacgttgtcaaggctcaattcaacatgtcaggtaggtgatttgtacatacggtcccgtttgtgcactctgagaaaag

SEQ ID NO: 39865 - protein, 248 aa, Zea mays subsp. mays
  peptide (1)..(248): Ceres Seq. ID no. 12416569
  misc_feature (183)..(224): Pfam Name: RING finger Pfam Description: Zinc finger, C3HC4 type
  misc_feature (82)..(237): NCBI GI NO: 34894518 NR Description: P0551A11.23
  misc_feature (175)..(248): NCBI GI NO: 34899858 NR Description: OJ1714_H10.11
  misc_feature (174)..(232): NCBI GI NO: 34909640 NR Description: P0503C12.20
  misc_feature (153)..(232): NCBI GI NO: 15240066 NR Description: C3HC4-type RING zinc finger protein-like
  misc_feature (88)..(232): NCBI GI NO: 34903926 NR Description: OSJNBa0038J17.8
  misc_feature (172)..(230): NCBI GI NO: 34907968 NR Description: P0446G04.15
  misc_feature (149)..(230): NCBI GI NO: 15227839 NR Description: putative RING zinc finger protein
  misc_feature (174)..(232): NCBI GI NO: 34899852 NR Description: OJ1714_H10.8
  misc_feature (150)..(233): NCBI GI NO: 8698833 NR Description: EL5 [Oryza sativa (japonica cultivar-group)]
  misc_feature (83)..(235): NCBI GI NO: 18414851 NR Description: Expressed protein; protein id: At4g17245
MDLPWLDLPFTFLTLLLATRLAYDYYGDVAAAFAGGFSIQVFLFYCFARWYRYAIAGRAAAAAGARDDPSPSARPPPQQEEDADAPPVLTPLLGSPDGARPSTLANRCFAVVFMVFVPLVIVVFERSQADVVAYALCLANIIVMVVWLSPDTGSTVSAAKSLLRLSDDEDEGSGGSSGAEDKCCVCLAGMREDQALRALPRCGHSFHDKCIGKWLKAHPTCPVCRATAVPPPLHSGGGDPLDDDISPV

SEQ ID NO: 39866 - protein, 135 aa, Zea mays subsp. mays
  peptide (1)..(135): Ceres Seq. ID no. 12416570
  misc_feature (70)..(111): Pfam Name: RING finger Pfam Description: Zinc finger, C3HC4 type
  misc_feature (1)..(124): NCBI GI NO: 34894518 NR Description: P0551A11.23
  misc_feature (62)..(135): NCBI GI NO: 34899858 NR Description: OJ1714_H10.11
  misc_feature (61)..(119): NCBI GI NO: 34909640 NR Description: P0503C12.20
  misc_feature (40)..(119): NCBI GI NO: 15240066 NR Description: C3HC4-type RING zinc finger protein-like
  misc_feature (1)..(119): NCBI GI NO: 34903926 NR Description: OSJNBa0038J17.8
  misc_feature (59)..(117): NCBI GI NO: 34907968 NR Description: P0446G04.15
  misc_feature (36)..(117): NCBI GI NO: 15227839 NR Description: putative RING zinc finger protein
  misc_feature (61)..(119): NCBI GI NO: 34899852 NR Description: OJ1714_H10.8
  misc_feature (37)..(120): NCBI GI NO: 8698833 NR Description: EL5 [Oryza sativa (japonica cultivar-group)]
  misc_feature (1)..(122): NCBI GI NO: 18414851 NR Description: Expressed protein; protein id: At4g17245
MVFVPLVIVVFERSQADVVAYALCLANIIVMVVWLSPDTGSTVSAAKSLLRLSDDEDEGSGGSSGAEDKCCVCLAGMREDQALRALPRCGHSFHDKCIGKWLKAHPTCPVCRATAVPPPLHSGGGDPLDDDISPV

SEQ ID NO: 39867 - DNA, 1052 bp, Zea mays subsp. mays
  misc_feature (1)..(1052): Ceres Seq. ID no. 12416671
  misc_feature (697)..(697): n is a, c, t, g, unknown, or other
  misc_feature (665)..(665): n is a, c, t, g, unknown, or other
agcccctctcccgcagccgcagtcccagtcccacgcgcattccgccccgcggctcccgagagagagagatggccaggcacgccaagacggactccgacgtgacgagcctggcggcgtccacgccgccgcggtccccgcgcggccgcccggcctactacgtgctcagccccgccgcctcccacccggacgtccacctgggcgcctccggcggcgtggcggggaccaccccggcggagtcgccgctccactaccacttccaccaccaccgccaccactcgagcggcggcgccggtgtcggcgtgggcggcacgcaccactcccgggagtcctcgacggggcggctgctcttctccgaccagctccgctccggcggcgacgtcgccgcggtggtgagcgtcccctggcgccggctcgggaacggcagcggcgcgggcagcgtcggggacgaggacgacgacggcgcgtccctgcgcggcgggtcgttcgcggagtcgccgtggcggtgctacgcgctcggcgcggtcgcgttcgtcgccgtgatcgccttcttcctgatcgtgctgtggggcgccagcaggtcgtacaagccccacgtcgtcgtcaagagggtggtgttcgagtcgtaccacatccagggcggcacggaccggacgggcgtccctacngaagatgatgtcggtcaacgcgacggtgcggntgcgcttccgcaaccgcggcaccttcttcagcctgcacgtcacggccacgccgttcctcctcttctacggcgacctcaccgtcgcctccggagagatggcggagttctaccagccgcggaagagcgggcggacggtgacggtgtccgtggtggggaagcaggtgccgctctacggcgcgggcgccagcctgcacagcaagcccaacaacgggcgcctcggccctgcggtggtgcccgtcaggctcggcttcgtgctgcgttgtggttgcggacgaactgtgtaatcgattcctacgaaccgttctaatgtaacggcggcgtcgacaagatcacagatcgtgggcgcagcttggct

SEQ ID NO: 39868 - protein, 333 aa, Zea mays subsp. mays
  peptide (1)..(333): Ceres Seq. ID no. 12416672
  misc_feature (26)..(222): NCBI GI NO: 18401556 NR Description: expressed protein; protein id: At1g45688
  misc_feature (139)..(222): NCBI GI NO: 15239097 NR Description: putative protein; protein id: At5g42860.1
  misc_feature (26)..(96): NCBI GI NO: 15239097 NR Description: putative protein; protein id: At5g42860.1
  misc_feature (100)..(222): NCBI GI NO: 38345517 NR Description: OSJNBa0039K24.20
  misc_feature (139)..(222): NCBI GI NO: 28416677 NR Description: At5g42860 [Arabidopsis thaliana]
  misc_feature (26)..(96): NCBI GI NO: 28416677 NR Description: At5g42860 [Arabidopsis thaliana]
  misc_feature (26)..(151): NCBI GI NO: 38345517 NR Description: OSJNBa0039K24.20
  misc_feature (100)..(222): NCBI GI NO: 5777621 NR Description: CAA30379.1 protein [Oryza sativa]
  misc_feature (19)..(151): NCBI GI NO: 5777621 NR Description: CAA30379.1 protein [Oryza sativa]
  misc_feature (33)..(222): NCBI GI NO: 34904260 NR Description: P0452F10.18
  misc_feature (221)..(221): Xaa is any aa, unknown or other
  misc_feature (232)..(232): Xaa is any aa, unknown or other
PLSRSRSPSPTRIPPRGSREREMARHAKTDSDVTSLAASTPPRSPRGRPAYYVLSPAASHPDVHLGASGGVAGTTPAESPLHYHFHHHRHHSSGGAGVGVGGTHHSRESSTGRLLFSDQLRSGGDVAAVVSVPWRRLGNGSGAGSVGDEDDDGASLRGGSFAESPWRCYALGAVAFVAVIAFFLIVLWGASRSYKPHVVVKRVVFESYHIQGGTDRTGVPXEDDVGQRDGAXALPQPRHLLQPARHGHAVPPLLRRPHRRLRRDGGVLPAAEERADGDGVRGGEAGAALRRGRQPAQQAQQRAPRPCGGARQARLRAALWLRTNCVIDSYEPF

SEQ ID NO: 39869 - protein, 311 aa, Zea mays subsp. mays
  peptide (1)..(311): Ceres Seq. ID no. 12416673
  misc_feature (4)..(200): NCBI GI NO: 18401556 NR Description: expressed protein; protein id: At1g45688
  misc_feature (117)..(200): NCBI GI NO: 15239097 NR Description: putative protein; protein id: At5g42860.1
  misc_feature (4)..(74): NCBI GI NO: 15239097 NR Description: putative protein; protein id: At5g42860.1
  misc_feature (78)..(200): NCBI GI NO: 38345517 NR Description: OSJNBa0039K24.20
  misc_feature (117)..(200): NCBI GI NO: 28416677 NR Description: At5g42860 [Arabidopsis thaliana]
  misc_feature (4)..(74): NCBI GI NO: 28416677 NR Description: At5g42860 [Arabidopsis thaliana]
  misc_feature (4)..(129): NCBI GI NO: 38345517 NR Description: OSJNBa0039K24.20
  misc_feature (78)..(200): NCBI GI NO: 5777621 NR Description: CAA30379.1 protein [Oryza sativa]
  misc_feature (1)..(129): NCBI GI NO: 5777621 NR Description: CAA30379.1 protein [Oryza sativa]
  misc_feature (11)..(200): NCBI GI NO: 34904260 NR Description: P0452F10.18
  misc_feature (199)..(199): Xaa is any aa, unknown or other
  misc_feature (210)..(210): Xaa is any aa, unknown or other
MARHAKTDSDVTSLAASTPPRSPRGRPAYYVLSPAASHPDVHLGASGGVAGTTPAESPLHYHFHHHRHHSSGGAGVGVGGTHHSRESSTGRLLFSDQLRSGGDVAAVVSVPWRRLGNGSGAGSVGDEDDDGASLRGGSFAESPWRCYALGAVAFVAVIAFFLIVLWGASRSYKPHVVVKRVVFESYHIQGGTDRTGVPXEDDVGQRDGAXALPQPRHLLQPARHGHAVPPLLRRPHRRLRRDGGVLPAAEERADGDGVRGGEAGAALRRGRQPAQQAQQRAPRPCGGARQARLRAALWLRTNCVIDSYEPF

SEQ ID NO: 39870 - protein, 223 aa, Zea mays subsp. mays
  peptide (1)..(223): Ceres Seq. ID no. 12416674
  misc_feature (222)..(222): Xaa is any aa, unknown or other
APLPQPQSQSHAHSAPRLPRERDGQARQDGLRRDEPGGVHAAAVPARPPGLLRAQPRRLPPGRPPGRLRRRGGDHPGGVAAPLPLPPPPPPLERRRRCRRGRHAPLPGVLDGAAALLRPAPLRRRRRRGGERPLAPARERQRRGQRRGRGRRRRVPARRVVRGVAVAVLRARRGRVRRRDRLLPDRAVGRQQVVQAPRRRQEGGVRVVPHPGRHGPDGRPYXR

SEQ ID NO: 39871 - DNA, 1000 bp, Zea mays subsp. mays
  misc_feature (1)..(1000): Ceres Seq. ID no. 12362563
atagcaaaactcgtgctgacacaacacacaagcacaaattgtgaagtgcgtgacgccgcgaggggttaagtcagcaagcaagcaggcagatagccatggcagtcgcaagcgccgagaacacgtcgtcgctgctcccgctcgacggccgcgtagcgctggtcactggcggctcccgcggcattggccgcgaggtgtcctcccaactcgccaccctgggcgcgcgcgtcgtggtcaactacgcgtccaattccgccagggcagacgagctcgtcgcggagctcgcctcccgcggccaccaggccgtggccgtccgcgccgacgtgtcggacccggacgccgtgcacgcgctcttcgaccgcgccgaggaggcgttcgggtccccgccgcacatcgtcgtctgctgcgcgggcctcctcaatgccaagtacccggcgctcgcggacaccgccgtcgacgacttcgacgccatgttcgcggtgaacgtgcgcgggacgttcctcgtgtgccgcgaggcggcgaaccgcgtcccagccaacagcggcggccgcatcgtgacgttctcgtcgtccatcgttggcacgctcctgccgggatacgcggcgtacacggcgaccaacgccgccgtggaggcgatgacgaagatcctggccaaggaggtggcggcgaagggggtgaccgcgaacgtggtcgcgccggggcccgtgcgcaccgagctgttcttggccgggaaggacgaagcgttcctgcggagggtggagcagcagtccatgggccgcatcgccgagacgacggacgtggcgccggtggtggcgttcctggccagcgacgccgcggcttgggtcaacggccaggtcatcagggtcaacggcggttttgtctaataagggtccaaatgcgccagatgttcagatatagtggtatctgccatacgcaagtttaaaaaaaaacgcaaaaatgtgagtggcgtgtgtgtgttttaataaaaaaaatcaagttatgc

SEQ ID NO: 39872 - protein, 261 aa, Zea mays subsp. mays
  peptide (1)..(261): Ceres Seq. ID no. 12362564
  misc_feature (6)..(260): NCBI GI NO: 37534988 NR Description: putative short-chain alcohol dehydrogenase
  misc_feature (4)..(259): NCBI GI NO: 34395018 NR Description: putative short-chain dehydrogenase/reductase
  misc_feature (9)..(261): NCBI GI NO: 15235621 NR Description: short-chain alcohol dehydrogenase like protein
  misc_feature (1)..(261): NCBI GI NO: 34395019 NR Description: putative short-chain dehydrogenase/reductase
  misc_feature (2)..(261): NCBI GI NO: 34393370 NR Description: putative short-chain dehydrogenase/reductase
  misc_feature (10)..(261): NCBI GI NO: 9758903 NR Description: Brn1-like protein [Arabidopsis thaliana]
  misc_feature (13)..(261): NCBI GI NO: 15229203 NR Description: putative short-chain type dehydrogenase/reductase
  misc_feature (13)..(261): NCBI GI NO: 18087667 NR Description: putative dehydrogenase [Oryza sativa]
  misc_feature (13)..(261): NCBI GI NO: 1711355 NR Description: SHORT-CHAIN TYPE DEHYDROGENASE/REDUCTASE
  misc_feature (10)..(244): NCBI GI NO: 30686710 NR Description: short-chain dehydrogenase/reductase family protein
MAVASAENTSSLLPLDGRVALVTGGSRGIGREVSSQLATLGARVVVNYASNSARADELVAELASRGHQAVAVRADVSDPDAVHALFDRAEEAFGSPPHIVVCCAGLLNAKYPALADTAVDDFDAMFAVNVRGTFLVCREAANRVPANSGGRIVTFSSSIVGTLLPGYAAYTATNAAVEAMTKILAKEVAAKGVTANVVAPGPVRTELFLAGKDEAFLRRVEQQSMGRIAETTDVAPVVAFLASDAAAWVNGQVIRVNGGFV

SEQ ID NO: 39873 - protein, 137 aa, Zea mays subsp. mays
  peptide (1)..(137): Ceres Seq. ID no. 12362565
  misc_feature (1)..(136): NCBI GI NO: 37534988 NR Description: putative short-chain alcohol dehydrogenase
  misc_feature (1)..(135): NCBI GI NO: 34395018 NR Description: putative short-chain dehydrogenase/reductase
  misc_feature (1)..(137): NCBI GI NO: 15235621 NR Description: short-chain alcohol dehydrogenase like protein
  misc_feature (1)..(137): NCBI GI NO: 34395019 NR Description: putative short-chain dehydrogenase/reductase
  misc_feature (1)..(137): NCBI GI NO: 34393370 NR Description: putative short-chain dehydrogenase/reductase
  misc_feature (1)..(137): NCBI GI NO: 9758903 NR Description: Brn1-like protein [Arabidopsis thaliana]
  misc_feature (1)..(137): NCBI GI NO: 15229203 NR Description: putative short-chain type dehydrogenase/reductase
  misc_feature (1)..(137): NCBI GI NO: 18087667 NR Description: putative dehydrogenase [Oryza sativa]
  misc_feature (1)..(137): NCBI GI NO: 1711355 NR Description: SHORT-CHAIN TYPE DEHYDROGENASE/REDUCTASE
  misc_feature (1)..(120): NCBI GI NO: 30686710 NR Description: short-chain dehydrogenase/reductase family protein
MFAVNVRGTFLVCREAANRVPANSGGRIVTFSSSIVGTLLPGYAAYTATNAAVEAMTKILAKEVAAKGVTANVVAPGPVRTELFLAGKDEAFLRRVEQQSMGRIAETTDVAPVVAFLASDAAAWVNGQVIRVNGGFV

SEQ ID NO: 39874 - DNA, 965 bp, Zea mays subsp. mays
  misc_feature (1)..(965): Ceres Seq. ID no. 12391896
atccacaatatgatccctggcctctcatcctccgaaaactccactccttcgtcatccatgcgtcccctccccgccgcggccatggccaccgcgacgctgcccctccgcctcctcccctccaaaacgctgactctctccactctcccctccctgcgccgctccctctccgtcgccgctttggagccccggcgctggcgcctccgagccgccgccgaggaggcgcctgaggccgtggaggttgagttcgtggagcccgagacggaggctgaggagaaacccgcggtaccggagcccatcgaggctcagctggccgccgcgggggccgggaaggacgcggacatcttcgctgttgtcatgattggttcaagacagtacatagtgatgccgggcaggtatatatacacacagagactgaaaggtgccaatgtcaatgatcagatcatattaaacaaggtgctactggtgtcaactagagaaaaagcttacattgggatgccagtggtgaccaatgctgctgttcacgcagtggttgaagaacagggacgggatgataaagttatagtgttcaagtacaagaagaagaagaagtaccagaggaaacttggtcacagacagccaaacacaaggttaagaatcacaggcataagtggatacgaagagtaccctgctgacccaatacttgaccctgctgcagctttaaattaaactgtaagttatgtagttacaaaacggctggtagtagagtagcatgctagttttcttgtttctttctttttttacttctctgtcttgaaaaaggaacacttttcatcacaattttccttgtttttgtgtgttccaaatgctgccagtcaaccaactgtaccatgagctatcttgttcttgttcttttttcacatcgtgtatgctactagccagttgtattgcacgaccggtcctaaagaagaggtttctttctttttgtt

SEQ ID NO: 39875 - protein, 234 aa, Zea mays subsp. mays
  peptide (1)..(234): Ceres Seq. ID no. 12391897
  misc_feature (114)..(210): Pfam Name: Pfam Description:  Ribosomal prokaryotic L21 protein
  misc_feature (17)..(225): NCBI GI NO: 15219695 NR Description: 50S ribosomal protein L21 chloroplast precursor
  misc_feature (49)..(226): NCBI GI NO: 132776 NR Description: 50S RIBOSOMAL PROTEIN L21, CHLOROPLAST PRECURSOR
  misc_feature (72)..(220): NCBI GI NO: 18417696 NR Description: WRKY family transcription factor
  misc_feature (72)..(220): NCBI GI NO: 25407696 NR Description: hypothetical protein AT4g30930
  misc_feature (114)..(215): NCBI GI NO: 15894539 NR Description: Ribosomal protein L21 [Clostridium acetobutylicum]
  misc_feature (114)..(216): NCBI GI NO: 16800645 NR Description: ribosomal protein L21 [Listeria innocua]
  misc_feature (114)..(216): NCBI GI NO: 16803582 NR Description: ribosomal protein L21
  misc_feature (114)..(215): NCBI GI NO: 28868025 NR Description: ribosomal protein L21
  misc_feature (115)..(215): NCBI GI NO: 5712722 NR Description: unknown [Pseudomonas sp. BG33R]
  misc_feature (114)..(215): NCBI GI NO: 23121321 NR Description: hypothetical protein
IHNMIPGLSSSENSTPSSSMRPLPAAAMATATLPLRLLPSKTLTLSTLPSLRRSLSVAALEPRRWRLRAAAEEAPEAVEVEFVEPETEAEEKPAVPEPIEAQLAAAGAGKDADIFAVVMIGSRQYIVMPGRYIYTQRLKGANVNDQIILNKVLLVSTREKAYIGMPVVTNAAVHAVVEEQGRDDKVIVFKYKKKKKYQRKLGHRQPNTRLRITGISGYEEYPADPILDPAAALN

SEQ ID NO: 39876 - protein, 231 aa, Zea mays subsp. mays
  peptide (1)..(231): Ceres Seq. ID no. 12391898
  misc_feature (111)..(207): Pfam Name: Pfam Description:  Ribosomal prokaryotic L21 protein
  misc_feature (14)..(222): NCBI GI NO: 15219695 NR Description: 50S ribosomal protein L21 chloroplast precursor
  misc_feature (46)..(223): NCBI GI NO: 132776 NR Description: 50S RIBOSOMAL PROTEIN L21, CHLOROPLAST PRECURSOR
  misc_feature (69)..(217): NCBI GI NO: 18417696 NR Description: WRKY family transcription factor
  misc_feature (69)..(217): NCBI GI NO: 25407696 NR Description: hypothetical protein AT4g30930
  misc_feature (111)..(212): NCBI GI NO: 15894539 NR Description: Ribosomal protein L21 [Clostridium acetobutylicum]
  misc_feature (111)..(213): NCBI GI NO: 16800645 NR Description: ribosomal protein L21 [Listeria innocua]
  misc_feature (111)..(213): NCBI GI NO: 16803582 NR Description: ribosomal protein L21
  misc_feature (111)..(212): NCBI GI NO: 28868025 NR Description: ribosomal protein L21
  misc_feature (112)..(212): NCBI GI NO: 5712722 NR Description: unknown [Pseudomonas sp. BG33R]
  misc_feature (111)..(212): NCBI GI NO: 23121321 NR Description: hypothetical protein
MIPGLSSSENSTPSSSMRPLPAAAMATATLPLRLLPSKTLTLSTLPSLRRSLSVAALEPRRWRLRAAAEEAPEAVEVEFVEPETEAEEKPAVPEPIEAQLAAAGAGKDADIFAVVMIGSRQYIVMPGRYIYTQRLKGANVNDQIILNKVLLVSTREKAYIGMPVVTNAAVHAVVEEQGRDDKVIVFKYKKKKKYQRKLGHRQPNTRLRITGISGYEEYPADPILDPAAALN

SEQ ID NO: 39877 - protein, 215 aa, Zea mays subsp. mays
  peptide (1)..(215): Ceres Seq. ID no. 12391899
  misc_feature (95)..(191): Pfam Name: Pfam Description:  Ribosomal prokaryotic L21 protein
  misc_feature (1)..(206): NCBI GI NO: 15219695 NR Description: 50S ribosomal protein L21 chloroplast precursor
  misc_feature (30)..(207): NCBI GI NO: 132776 NR Description: 50S RIBOSOMAL PROTEIN L21, CHLOROPLAST PRECURSOR
  misc_feature (53)..(201): NCBI GI NO: 18417696 NR Description: WRKY family transcription factor
  misc_feature (53)..(201): NCBI GI NO: 25407696 NR Description: hypothetical protein AT4g30930
  misc_feature (95)..(196): NCBI GI NO: 15894539 NR Description: Ribosomal protein L21 [Clostridium acetobutylicum]
  misc_feature (95)..(197): NCBI GI NO: 16800645 NR Description: ribosomal protein L21 [Listeria innocua]
  misc_feature (95)..(197): NCBI GI NO: 16803582 NR Description: ribosomal protein L21
  misc_feature (95)..(196): NCBI GI NO: 28868025 NR Description: ribosomal protein L21
  misc_feature (96)..(196): NCBI GI NO: 5712722 NR Description: unknown [Pseudomonas sp. BG33R]
  misc_feature (95)..(196): NCBI GI NO: 23121321 NR Description: hypothetical protein
MRPLPAAAMATATLPLRLLPSKTLTLSTLPSLRRSLSVAALEPRRWRLRAAAEEAPEAVEVEFVEPETEAEEKPAVPEPIEAQLAAAGAGKDADIFAVVMIGSRQYIVMPGRYIYTQRLKGANVNDQIILNKVLLVSTREKAYIGMPVVTNAAVHAVVEEQGRDDKVIVFKYKKKKKYQRKLGHRQPNTRLRITGISGYEEYPADPILDPAAALN

SEQ ID NO: 39878 - DNA, 802 bp, Zea mays subsp. mays
  misc_feature (1)..(802): Ceres Seq. ID no. 12416233
  misc_feature (538)..(538): n is a, c, t, g, unknown, or other
  misc_feature (762)..(762): n is a, c, t, g, unknown, or other
  misc_feature (589)..(589): n is a, c, t, g, unknown, or other
  misc_feature (652)..(652): n is a, c, t, g, unknown, or other
  misc_feature (774)..(774): n is a, c, t, g, unknown, or other
  misc_feature (477)..(477): n is a, c, t, g, unknown, or other
acaaggtgatgagcccattcctgactcagcgcaccaagagcaagatcgtcttctgcagccccggcaagtcggcggagaccctcttcaggtacatcgccccggagcaagtccccgtccagttcggcggcctgtacaaggaggacgacaccgagttctccacctccgacgccgtcaccgagctcaccgtgaaaccgtcctccaaggagaccgtcgagatcccagccaccgagaactccaccgtggtgtgggagctccgcgtgctggggtgggaggtgagctacggcgccgagttcacccccgacgcggagggcggctacaccgtcatcgtgcagaagacgcggaaggtctccgcccacgaggagcccatcatgaagggcagcttcaaggccacggagcccggcaagctggtgctgggcgtgaacaacccggcgtccaggaagaagaagctgctgtgccggttcaaggtgaggagcgccnccgcctgatgagggtcgttggtctgggtcccagcaggtacagcctgccagctgcttgaccnccagcccgacatgtataattcgatcgatcgccaaccaggtccataccgccnccatttgaatgaacatgctgcattgcattacatgataggagagagagagagagagagagaggncaataaagagtttctgcttcctagctaggcccgttccgtgtcctggtcgttctttgattatttgttggcttgctgttcttttttttccttggggggagggtcgcgtttgnatgtgtttattncttgaatgaaaacaaaagtgagcttgtt

SEQ ID NO: 39879 - protein, 177 aa, Zea mays subsp. mays
  peptide (1)..(177): Ceres Seq. ID no. 12416234
  misc_feature (159)..(159): Xaa is any aa, unknown or other
QGDEPIPDSAHQEQDRLLQPRQVGGDPLQVHRPGASPRPVRRPVQGGRHRVLHLRRRHRAHRETVLQGDRRDPSHRELHRGVGAPRAGVGGELRRRVHPRRGGRLHRHRAEDAEGLRPRGAHHEGQLQGHGARQAGAGREQPGVQEEEAAVPVQGEERXRLMRVVGLGPSRYSLPAA

SEQ ID NO: 39880 - protein, 160 aa, Zea mays subsp. mays
  peptide (1)..(160): Ceres Seq. ID no. 12416235
  misc_feature (1)..(56): Pfam Name: Pfam Description:  CRAL/TRIO domain
  misc_feature (1)..(157): NCBI GI NO: 34907288 NR Description: contains ESTsAU093915
  misc_feature (1)..(154): NCBI GI NO: 8894548 NR Description: hypothetical protein [Cicer arietinum]
  misc_feature (1)..(156): NCBI GI NO: 30680992 NR Description: expressed protein [Arabidopsis thaliana]
  misc_feature (2)..(156): NCBI GI NO: 15081614 NR Description: At1g72160/T9N14_8 [Arabidopsis thaliana]
  misc_feature (2)..(156): NCBI GI NO: 15218383 NR Description: cytosolic factor, putative; protein id:At1g72160
  misc_feature (2)..(157): NCBI GI NO: 14334978 NR Description: unknown protein [Arabidopsis thaliana]
  misc_feature (2)..(157): NCBI GI NO: 18397616 NR Description: expressed protein; protein id: At1g30690
  misc_feature (76)..(156): NCBI GI NO: 25407487 NR Description: hypothetical protein AT4g09160
  misc_feature (1)..(72): NCBI GI NO: 25407487 NR Description: hypothetical protein AT4g09160
  misc_feature (1)..(156): NCBI GI NO: 15218382 NR Description: cytosolic factor, putative; protein id:At1g72150
  misc_feature (159)..(159): Xaa is any aa, unknown or other
KVMSPFLTQRTKSKIVFCSPGKSAETLFRYIAPEQVPVQFGGLYKEDDTEFSTSDAVTELTVKPSSKETVEIPATENSTVVWELRVLGWEVSYGAEFTPDAEGGYTVIVQKTRKVSAHEEPIMKGSFKATEPGKLVLGVNNPASRKKKLLCRFKVRSAXA

SEQ ID NO: 39881 - protein, 158 aa, Zea mays subsp. mays
  peptide (1)..(158): Ceres Seq. ID no. 12416236
  misc_feature (1)..(54): Pfam Name: Pfam Description:  CRAL/TRIO domain
  misc_feature (1)..(155): NCBI GI NO: 34907288 NR Description: contains ESTsAU093915
  misc_feature (1)..(152): NCBI GI NO: 8894548 NR Description: hypothetical protein [Cicer arietinum]
  misc_feature (1)..(154): NCBI GI NO: 30680992 NR Description: expressed protein [Arabidopsis thaliana]
  misc_feature (1)..(154): NCBI GI NO: 15081614 NR Description: At1g72160/T9N14_8 [Arabidopsis thaliana]
  misc_feature (1)..(154): NCBI GI NO: 15218383 NR Description: cytosolic factor, putative; protein id:At1g72160
  misc_feature (1)..(155): NCBI GI NO: 14334978 NR Description: unknown protein [Arabidopsis thaliana]
  misc_feature (1)..(155): NCBI GI NO: 18397616 NR Description: expressed protein; protein id: At1g30690
  misc_feature (74)..(154): NCBI GI NO: 25407487 NR Description: hypothetical protein AT4g09160
  misc_feature (1)..(70): NCBI GI NO: 25407487 NR Description: hypothetical protein AT4g09160
  misc_feature (1)..(154): NCBI GI NO: 15218382 NR Description: cytosolic factor, putative; protein id:At1g72150
  misc_feature (157)..(157): Xaa is any aa, unknown or other
MSPFLTQRTKSKIVFCSPGKSAETLFRYIAPEQVPVQFGGLYKEDDTEFSTSDAVTELTVKPSSKETVEIPATENSTVVWELRVLGWEVSYGAEFTPDAEGGYTVIVQKTRKVSAHEEPIMKGSFKATEPGKLVLGVNNPASRKKKLLCRFKVRSAXA

SEQ ID NO: 39882 - DNA, 968 bp, Zea mays subsp. mays
  misc_feature (1)..(968): Ceres Seq. ID no. 12377743
  misc_feature (954)..(954): n is a, c, t, g, unknown, or other
  misc_feature (955)..(955): n is a, c, t, g, unknown, or other
  misc_feature (677)..(677): n is a, c, t, g, unknown, or other
  misc_feature (514)..(514): n is a, c, t, g, unknown, or other
  misc_feature (761)..(761): n is a, c, t, g, unknown, or other
  misc_feature (615)..(615): n is a, c, t, g, unknown, or other
  misc_feature (619)..(619): n is a, c, t, g, unknown, or other
gagactcgatcgagagctaatgcaagaaaagaaagaggtgcgagcaagagggatgaacggcgccggcaatggtgagccctcccttgtagttgtagcggaggaagggccgccgaacgatggcaacggcgccggggttcacgcacccaacttcggcgcgaatgaagcggacacgctgctggtggtggcgacactgatcacagcgctgacgtaccagctgggcaccaacatcccgggcgggtactggcaggacgatctcaaggggcacgacggcctcgcggggcacgtcgccggagacccgatcatgcgtgacaagcaccggcggcggtactggctgttcatggcggcgagctgggtggggttcggcacctcgatgctgctcacggtggggttcatcacgggggtgcccgcgaggtcgcgcttcgtccggttcgcgttcctgctggcctactccagcctcgtgctcacgttcgtgacgtcgcagccgcgcacgtcgctcttctgggacctcatcatntgggctgtcgtcatggcgctgctcgccatcgccaccaagtacctgcgcctcgacaggctccccagatgggcgcgtaccctgtgccctgctcctccatccgngttntgctgctcacgttcgtgactcgtgagcgagctcaccatggacgatcgacctcgtcatntgggtcgccgtcatggcatcgacgcatcgtcgccatcgtcaccaagtaccagcacgtcgacagacctccccggctgggtgcacnccgtctatcttcagtaccagcttgctagtagcaacaatgtgtgtgttttcaaaaaaaaggaagaatgtgtttttatctttgtttaattttggccgtaatgtcttgtttagtggctgatgttcttgttctctgctactgtgtgcgtcctcattagttgatctgaatctgatgttaaatgtatcgctgttcagtnngtgctgttcttgt

SEQ ID NO: 39883 - protein, 211 aa, Zea mays subsp. mays
  peptide (1)..(211): Ceres Seq. ID no. 12377744
  misc_feature (14)..(194): NCBI GI NO: 34902868 NR Description: unnamed protein product
  misc_feature (72)..(181): NCBI GI NO: 34902874 NR Description: unnamed protein product
  misc_feature (171)..(171): Xaa is any aa, unknown or other
  misc_feature (205)..(205): Xaa is any aa, unknown or other
  misc_feature (206)..(206): Xaa is any aa, unknown or other
RLDRELMQEKKEVRARGMNGAGNGEPSLVVVAEEGPPNDGNGAGVHAPNFGANEADTLLVVATLITALTYQLGTNIPGGYWQDDLKGHDGLAGHVAGDPIMRDKHRRRYWLFMAASWVGFGTSMLLTVGFITGVPARSRFVRFAFLLAYSSLVLTFVTSQPRTSLFWDLIXWAVVMALLAIATKYLRLDRLPRWARTLCPAPPSXXCCSRS

SEQ ID NO: 39884 - protein, 205 aa, Zea mays subsp. mays
  peptide (1)..(205): Ceres Seq. ID no. 12377745
  misc_feature (8)..(188): NCBI GI NO: 34902868 NR Description: unnamed protein product
  misc_feature (66)..(175): NCBI GI NO: 34902874 NR Description: unnamed protein product
  misc_feature (165)..(165): Xaa is any aa, unknown or other
  misc_feature (199)..(199): Xaa is any aa, unknown or other
  misc_feature (200)..(200): Xaa is any aa, unknown or other
MQEKKEVRARGMNGAGNGEPSLVVVAEEGPPNDGNGAGVHAPNFGANEADTLLVVATLITALTYQLGTNIPGGYWQDDLKGHDGLAGHVAGDPIMRDKHRRRYWLFMAASWVGFGTSMLLTVGFITGVPARSRFVRFAFLLAYSSLVLTFVTSQPRTSLFWDLIXWAVVMALLAIATKYLRLDRLPRWARTLCPAPPSXXCCSRS

SEQ ID NO: 39885 - protein, 194 aa, Zea mays subsp. mays
  peptide (1)..(194): Ceres Seq. ID no. 12377746
  misc_feature (1)..(177): NCBI GI NO: 34902868 NR Description: unnamed protein product
  misc_feature (55)..(164): NCBI GI NO: 34902874 NR Description: unnamed protein product
  misc_feature (154)..(154): Xaa is any aa, unknown or other
  misc_feature (188)..(188): Xaa is any aa, unknown or other
  misc_feature (189)..(189): Xaa is any aa, unknown or other
MNGAGNGEPSLVVVAEEGPPNDGNGAGVHAPNFGANEADTLLVVATLITALTYQLGTNIPGGYWQDDLKGHDGLAGHVAGDPIMRDKHRRRYWLFMAASWVGFGTSMLLTVGFITGVPARSRFVRFAFLLAYSSLVLTFVTSQPRTSLFWDLIXWAVVMALLAIATKYLRLDRLPRWARTLCPAPPSXXCCSRS

SEQ ID NO: 39886 - DNA, 764 bp, Zea mays subsp. mays
  misc_feature (1)..(764): Ceres Seq. ID no. 12383783
cttctagagctacttgcggtcgattggttcaaagttaatgaacgctttgattcagttgccttacatcccaaaagccttgtgcaatcagaagctgcaaagaaacttcctttcatattggttataaatttgcaggtgccagcgaaaccaaattataacttggttatgtactacgctgcagagagaccagtgaacaaagattctttgttgggtagattcattgatggaactgatgcataccgagatgccagatttaaacttataccaagcattgttgagggttattggatggttaagcgtgctgtaggaacaaaagcttgccttctgggtaaagcagtaacgtgcaattatcttcgccaggataactttctggagatagatgttgacatcggttcatcatctgttgcccggagcattattggtctagtattgggatatgtcacaagcatagttgttgatcttgctattcttattgaggccaaggaagagaaagagctccccgagtacattctgggcactgttcgtctgaaccgtgtgaatcccgacagtgctgtatcaatctaattacgtttctagccgatctgtgcaaatttactcttatcctcttttattctgagagaaacagcgtggcattttgaaaatgtgaaatagcattactatttgctgatccccattcgagggtaacatatgtaaattggcatgaggcatgactacgtgacgcctttcgtaaatagaataaatcaatggttatgtaatattaatatccc

SEQ ID NO: 39887 - protein, 186 aa, Zea mays subsp. mays
  peptide (1)..(186): Ceres Seq. ID no. 12383784
  misc_feature (1)..(185): NCBI GI NO: 8978350 NR Description: emb|CAB77600
  misc_feature (1)..(185): NCBI GI NO: 18421431 NR Description: putative protein; protein id: At5g35180
  misc_feature (1)..(186): NCBI GI NO: 37535414 NR Description: unknown protein
  misc_feature (1)..(184): NCBI GI NO: 37534986 NR Description: unknown protein
  misc_feature (1)..(184): NCBI GI NO: 22327599 NR Description: putative protein; protein id: At5g45560
  misc_feature (1)..(183): NCBI GI NO: 21592409 NR Description: unknown [Arabidopsis thaliana]
  misc_feature (1)..(184): NCBI GI NO: 11358377 NR Description: hypothetical protein T5N23
  misc_feature (1)..(184): NCBI GI NO: 26451069 NR Description: unknown protein [Arabidopsis thaliana]
  misc_feature (1)..(184): NCBI GI NO: 30694123 NR Description: expressed protein [Arabidopsis thaliana]
  misc_feature (1)..(186): NCBI GI NO: 15226386 NR Description: unknown protein; protein id: At2g28320.1
LLELLAVDWFKVNERFDSVALHPKSLVQSEAAKKLPFILVINLQVPAKPNYNLVMYYAAERPVNKDSLLGRFIDGTDAYRDARFKLIPSIVEGYWMVKRAVGTKACLLGKAVTCNYLRQDNFLEIDVDIGSSSVARSIIGLVLGYVTSIVVDLAILIEAKEEKELPEYILGTVRLNRVNPDSAVSI

SEQ ID NO: 39888 - protein, 132 aa, Zea mays subsp. mays
  peptide (1)..(132): Ceres Seq. ID no. 12383785
  misc_feature (1)..(131): NCBI GI NO: 8978350 NR Description: emb|CAB77600
  misc_feature (1)..(131): NCBI GI NO: 18421431 NR Description: putative protein; protein id: At5g35180
  misc_feature (1)..(132): NCBI GI NO: 37535414 NR Description: unknown protein
  misc_feature (1)..(130): NCBI GI NO: 37534986 NR Description: unknown protein
  misc_feature (1)..(130): NCBI GI NO: 22327599 NR Description: putative protein; protein id: At5g45560
  misc_feature (1)..(129): NCBI GI NO: 21592409 NR Description: unknown [Arabidopsis thaliana]
  misc_feature (1)..(130): NCBI GI NO: 11358377 NR Description: hypothetical protein T5N23
  misc_feature (1)..(130): NCBI GI NO: 26451069 NR Description: unknown protein [Arabidopsis thaliana]
  misc_feature (1)..(130): NCBI GI NO: 30694123 NR Description: expressed protein [Arabidopsis thaliana]
  misc_feature (1)..(132): NCBI GI NO: 15226386 NR Description: unknown protein; protein id: At2g28320.1
MYYAAERPVNKDSLLGRFIDGTDAYRDARFKLIPSIVEGYWMVKRAVGTKACLLGKAVTCNYLRQDNFLEIDVDIGSSSVARSIIGLVLGYVTSIVVDLAILIEAKEEKELPEYILGTVRLNRVNPDSAVSI

SEQ ID NO: 39889 - DNA, 502 bp, Zea mays subsp. mays
  misc_feature (1)..(502): Ceres Seq. ID no. 1683503
aggcccagagaaggctcgcgcagaacagagaggctgcccggaagagtcgcctgcggaagaaggcctacatccagcagctagagacaagccgcatgaagctgtcgcagctagagctggagcttcaacgggcgcggcagcagcagggtgcatatgcgaatagtggaagcatgggagactcggctctcggctacagatgcccgatagatccaggcgttgctgggttcgagatcgactacagccactgggtggacgagcagaagaggcacacaacggagctgacgtcggcgctccagggccagcagacgtcggagctggagctccgcctgctggtggagacggggctcagcaactacgagcgcctgttcaggatcaaggcggcggcggccaacgcggacgtgttctacgtcatgtcgggcttgtggaagacccccgccgagaggttcttcctctggatcggcgggttccggccgtcggaagtcctcaagatcctgagcccgcagct

SEQ ID NO: 39890 - protein, 166 aa, Zea mays subsp. mays
  peptide (1)..(166): Ceres Seq. ID no. 1683504
  misc_feature (2)..(54): Pfam Name: Pfam Description:  bZIP transcription factor
  misc_feature (3)..(165): NCBI GI NO: 39545747 NR Description: OSJNBb0034I13.13
  misc_feature (2)..(165): NCBI GI NO: 320563 NR Description: transcription factor tga1 - Arabidopsis thaliana
  misc_feature (2)..(165): NCBI GI NO: 15238367 NR Description: bZIP transcription factor, TGA1
  misc_feature (2)..(165): NCBI GI NO: 21592661 NR Description: DNA binding protein TGA1a homolog
  misc_feature (2)..(165): NCBI GI NO: 13195752 NR Description: mas-binding factor MBF1 [Solanum tuberosum]
  misc_feature (2)..(165): NCBI GI NO: 1076422 NR Description: transcription factor OBF4 - Arabidopsis thaliana
  misc_feature (2)..(165): NCBI GI NO: 15238046 NR Description: bZIP transcription factor, OBF4
  misc_feature (2)..(165): NCBI GI NO: 15148922 NR Description: TGA-type basic leucine zipper protein TGA1.1
  misc_feature (2)..(165): NCBI GI NO: 1076664 NR Description: transcription factor D11 - potato
  misc_feature (2)..(165): NCBI GI NO: 7488719 NR Description: transcription factor STGA1 - soybean
AQRRLAQNREAARKSRLRKKAYIQQLETSRMKLSQLELELQRARQQQGAYANSGSMGDSALGYRCPIDPGVAGFEIDYSHWVDEQKRHTTELTSALQGQQTSELELRLLVETGLSNYERLFRIKAAAANADVFYVMSGLWKTPAERFFLWIGGFRPSEVLKILSPQ

SEQ ID NO: 39891 - protein, 136 aa, Zea mays subsp. mays
  peptide (1)..(136): Ceres Seq. ID no. 1683505
  misc_feature (1)..(135): NCBI GI NO: 39545747 NR Description: OSJNBb0034I13.13
  misc_feature (1)..(135): NCBI GI NO: 320563 NR Description: transcription factor tga1 - Arabidopsis thaliana
  misc_feature (1)..(135): NCBI GI NO: 21592661 NR Description: DNA binding protein TGA1a homolog
  misc_feature (1)..(135): NCBI GI NO: 15238367 NR Description: bZIP transcription factor, TGA1
  misc_feature (1)..(135): NCBI GI NO: 13195752 NR Description: mas-binding factor MBF1 [Solanum tuberosum]
  misc_feature (1)..(135): NCBI GI NO: 1076422 NR Description: transcription factor OBF4 - Arabidopsis thaliana
  misc_feature (1)..(135): NCBI GI NO: 15238046 NR Description: bZIP transcription factor, OBF4
  misc_feature (1)..(135): NCBI GI NO: 15148922 NR Description: TGA-type basic leucine zipper protein TGA1.1
  misc_feature (1)..(135): NCBI GI NO: 1076664 NR Description: transcription factor D11 - potato
  misc_feature (1)..(135): NCBI GI NO: 7488719 NR Description: transcription factor STGA1 - soybean
MKLSQLELELQRARQQQGAYANSGSMGDSALGYRCPIDPGVAGFEIDYSHWVDEQKRHTTELTSALQGQQTSELELRLLVETGLSNYERLFRIKAAAANADVFYVMSGLWKTPAERFFLWIGGFRPSEVLKILSPQ

SEQ ID NO: 39892 - protein, 111 aa, Zea mays subsp. mays
  peptide (1)..(111): Ceres Seq. ID no. 1683506
  misc_feature (1)..(110): NCBI GI NO: 39545747 NR Description: OSJNBb0034I13.13
  misc_feature (1)..(110): NCBI GI NO: 320563 NR Description: transcription factor tga1 - Arabidopsis thaliana
  misc_feature (1)..(110): NCBI GI NO: 15238367 NR Description: bZIP transcription factor, TGA1
  misc_feature (1)..(110): NCBI GI NO: 21592661 NR Description: DNA binding protein TGA1a homolog
  misc_feature (1)..(110): NCBI GI NO: 13195752 NR Description: mas-binding factor MBF1 [Solanum tuberosum]
  misc_feature (1)..(110): NCBI GI NO: 1076422 NR Description: transcription factor OBF4 - Arabidopsis thaliana
  misc_feature (1)..(110): NCBI GI NO: 15238046 NR Description: bZIP transcription factor, OBF4
  misc_feature (1)..(110): NCBI GI NO: 15148922 NR Description: TGA-type basic leucine zipper protein TGA1.1
  misc_feature (1)..(110): NCBI GI NO: 1076664 NR Description: transcription factor D11 - potato
  misc_feature (1)..(110): NCBI GI NO: 7488719 NR Description: transcription factor STGA1 - soybean
MGDSALGYRCPIDPGVAGFEIDYSHWVDEQKRHTTELTSALQGQQTSELELRLLVETGLSNYERLFRIKAAAANADVFYVMSGLWKTPAERFFLWIGGFRPSEVLKILSPQ

SEQ ID NO: 39893 - DNA, 1087 bp, Zea mays subsp. mays
  misc_feature (1)..(1087): Ceres Seq. ID no. 12416462
gcacgagaccattacctagaacatcctaatcgaaaaagttccttcggttgctaacatctctagccgagacatttgacattttgacttgaacaatctgctcatctaccactccggcactcccacgccgggccgcgcggatcgcatcgagtttgagtggagtaggcggcgggcagcgaatcagcgatgaaggtgcagtgcgacgtgtgcgcggccgaggcggcctccgtcttctgctgcgccgacgaggccgcgctgtgcgacgcgtgcgacgaccgcgtccaccgcgccaacaagctcgcggggaagcaccgccgcttctccctcctccacccctgttcgtcctctgcgcagaagccgccgctctgcgacatctgccaggagcggagaggcttcttgttctgcaaggaggacagggcgatcctgtgccgggagtgcgacgcgccggtgcacagcgcgaacgacatgacgaggcggcacagccggttcctgctcaccggcgtgcgcctctcgtcagcgccggtggactctgctgacccatcagaaggggaggaggaggaggagcaggagaacagcagcaggcccggcaacggcgagtcctgcagcggcggcgccggcgccggcgcgaccacggcgaccgccagcgacgggagcagcatctccgagtacctgaccaagaccctgcccgggtggcacgtcgaggacttcctcgttgacgacgcgtacgccagcgacgtcggcgcctgctcagacggcctttatcagggacaagatggacagatcagcggggtgctgcaagaagcttacatgccgtggacggggcgggagctggtgccctctgacgtcgcagacgagcgggacaactgggagcggtgggtgccgcagatgcacgcggagttcgccggcgacagcaagcggcccagagcgtcgccttcgcctccctgttcgtactggtgaaaagctcgccgttattagtagagttgatttgtactgggtaccgtaggaacgaagagaaagatgagccaaaaaatcatggaacggaccggtgtttctctgttggattattattgggtcgatttcgatcgagctc

SEQ ID NO: 39894 - protein, 256 aa, Zea mays subsp. mays
  peptide (1)..(256): Ceres Seq. ID no. 12416463
  misc_feature (1)..(47): Pfam Name: Pfam Description:  B-box zinc finger
  misc_feature (1)..(256): NCBI GI NO: 38344979 NR Description: OSJNBa0011L07.9
  misc_feature (1)..(182): NCBI GI NO: 3618312 NR Description: zinc finger protein
  misc_feature (1)..(157): NCBI GI NO: 7485796 NR Description: hypothetical protein F19H22
  misc_feature (142)..(175): NCBI GI NO: 7485796 NR Description: hypothetical protein F19H22
  misc_feature (1)..(226): NCBI GI NO: 26452767 NR Description: putative zinc finger protein
  misc_feature (1)..(226): NCBI GI NO: 22329252 NR Description: CONSTANS B-box zinc finger family protein
  misc_feature (1)..(138): NCBI GI NO: 15222289 NR Description: CONSTANS B-box zinc finger family protein
  misc_feature (1)..(183): NCBI GI NO: 3618310 NR Description: zinc finger protein
  misc_feature (1)..(119): NCBI GI NO: 17433085 NR Description: Zinc finger protein constans-like 7
  misc_feature (1)..(119): NCBI GI NO: 18412037 NR Description: CONSTANS B-box zinc finger family protein
MKVQCDVCAAEAASVFCCADEAALCDACDDRVHRANKLAGKHRRFSLLHPCSSSAQKPPLCDICQERRGFLFCKEDRAILCRECDAPVHSANDMTRRHSRFLLTGVRLSSAPVDSADPSEGEEEEEQENSSRPGNGESCSGGAGAGATTATASDGSSISEYLTKTLPGWHVEDFLVDDAYASDVGACSDGLYQGQDGQISGVLQEAYMPWTGRELVPSDVADERDNWERWVPQMHAEFAGDSKRPRASPSPPCSYW

SEQ ID NO: 39895 - protein, 163 aa, Zea mays subsp. mays
  peptide (1)..(163): Ceres Seq. ID no. 12416464
  misc_feature (1)..(163): NCBI GI NO: 38344979 NR Description: OSJNBa0011L07.9
  misc_feature (1)..(89): NCBI GI NO: 3618312 NR Description: zinc finger protein
  misc_feature (1)..(64): NCBI GI NO: 7485796 NR Description: hypothetical protein F19H22
  misc_feature (49)..(82): NCBI GI NO: 7485796 NR Description: hypothetical protein F19H22
  misc_feature (1)..(133): NCBI GI NO: 26452767 NR Description: putative zinc finger protein
  misc_feature (1)..(133): NCBI GI NO: 22329252 NR Description: CONSTANS B-box zinc finger family protein
  misc_feature (1)..(45): NCBI GI NO: 15222289 NR Description: CONSTANS B-box zinc finger family protein
  misc_feature (1)..(90): NCBI GI NO: 3618310 NR Description: zinc finger protein
  misc_feature (1)..(26): NCBI GI NO: 17433085 NR Description: Zinc finger protein constans-like 7
  misc_feature (1)..(26): NCBI GI NO: 18412037 NR Description: CONSTANS B-box zinc finger family protein
MTRRHSRFLLTGVRLSSAPVDSADPSEGEEEEEQENSSRPGNGESCSGGAGAGATTATASDGSSISEYLTKTLPGWHVEDFLVDDAYASDVGACSDGLYQGQDGQISGVLQEAYMPWTGRELVPSDVADERDNWERWVPQMHAEFAGDSKRPRASPSPPCSYW

SEQ ID NO: 39896 - DNA, 711 bp, Zea mays subsp. mays
  misc_feature (1)..(711): Ceres Seq. ID no. 12354862
tcatttctacgacctcttggccatttggagttggacctaccagaggccccagaaaaagccccacgtcctcctgcacaagctgttgacccattctcaaaatttgggccgaaggcagagatattgcatatattccgtgccccagagaagaggccacccaaggaactctcgctcgcattcacgggtctcacgcttctgccttttatcggattcttgattgggctcgtgcgtcttggagtgaacgtgaagaacttcccgtccttgccgggaccggccgcatttgcctcagttttccatgctggaataggagcagtcttgctgctctacgttctcttctggctcaagttggaccttttcacaactctgaagtaccttggcttcctcggcatcttcctcgtgtttgtgggccataggaccctgtcctacctttcctcggcgtcagcaaaacagaagacggcatgagtggacagtgcaagcagagctttcccgatcatcaattcgttttttgaggtggccattccaggccactgggtgtctttgcttggtactctgaccgcaccctagtttttctttagctaacatgcattttgagggaggactcggtttatttcagttggctttgacgaatactgatactaggacaagtaacaggacctcacatcacagtttctgaatagaatggatgtttaatcatagcatttatatgatcattcg

SEQ ID NO: 39897 - protein, 152 aa, Zea mays subsp. mays
  peptide (1)..(152): Ceres Seq. ID no. 12354863
  misc_feature (1)..(152): NCBI GI NO: 34906860 NR Description: P0470A12.7
  misc_feature (1)..(152): NCBI GI NO: 22328844 NR Description: putative protein; protein id: At4g21150
  misc_feature (1)..(124): NCBI GI NO: 7486600 NR Description: hypothetical protein F7J7
  misc_feature (9)..(151): NCBI GI NO: 39598219 NR Description: Hypothetical protein CBG14887
  misc_feature (10)..(152): NCBI GI NO: 29841329 NR Description: similar to GenBank Accession Number AK004968putative ribophorin II in Mus musculus
  misc_feature (8)..(150): NCBI GI NO: 17508279 NR Description: Ribophorin II (31.1 kD) [Caenorhabditis elegans]
  misc_feature (34)..(140): NCBI GI NO: 4730802 NR Description: dJ343K2
  misc_feature (32)..(140): NCBI GI NO: 14714733 NR Description: Similar to ribophorin II [Mus musculus]
  misc_feature (32)..(140): NCBI GI NO: 34996495 NR Description: ribophorin II [Mus musculus]
  misc_feature (28)..(142): NCBI GI NO: 19922486 NR Description: CG6370-PA [Drosophila melanogaster]
SFLRPLGHLELDLPEAPEKAPRPPAQAVDPFSKFGPKAEILHIFRAPEKRPPKELSLAFTGLTLLPFIGFLIGLVRLGVNVKNFPSLPGPAAFASVFHAGIGAVLLLYVLFWLKLDLFTTLKYLGFLGIFLVFVGHRTLSYLSSASAKQKTA

SEQ ID NO: 39898 - DNA, 917 bp, Zea mays subsp. mays
  misc_feature (1)..(917): Ceres Seq. ID no. 12416389
  misc_feature (627)..(627): n is a, c, t, g, unknown, or other
gaaagggacttctcctacgtgttcgatatgcttgttgctctgggcattcacgcagccaacgaggatgacctccttgacaactgctacttactggagtgctctgcaggccttgatttatacgatgacctcgaacagaagtacgacagcctcattttatggcctgtgcatgagaggaagctcttgtttgatatcacgaatgctgttcttggggacatgatcacctccgtgatgaacggctgctcgaagggactgatggcgaggtgctcgcctggatggaatcgggaagagtttgctgagctcgtgtggcaaagggtggtgcagctccggcaagagatagagttcaaccaggaagccctgctgttgagcgtagagtgggctggctctgaagatggcgccagtctagtcgggcgcgatatcgggaatatgttgcaagatgatctcgtacaggaaattatagctgactttctgggggcaactaaatccgccaagctccgtggctagaattgccagtgtttgcatccgaggccattgcaagcatatgcatatggattggtcgctggtgaactctagtggacgatgagccttcgatgaattgcttaaggaggggactgtaattcaaggaattcncctcatggctactgaagacatgagctaagatggcttaggtgatggtggggcatcaaacaagcagtgtcgaagtttgacctagttgtgtcatgctcgtcagctcatcaccattggccccgaactcagcaatagcgtacaactggatgatttcccccctctgaactttgaaaatattttttttcattaggttatcataatgctggaatatagatgcacaattttggtgtaaaataatctctggcggattttagtttgtttatcatgggatgcaataaggacagtgtcagttg

SEQ ID NO: 39899 - protein, 166 aa, Zea mays subsp. mays
  peptide (1)..(166): Ceres Seq. ID no. 12416390
  misc_feature (1)..(154): NCBI GI NO: 29124124 NR Description: hypothetical protein
  misc_feature (1)..(156): NCBI GI NO: 34897354 NR Description: hypothetical protein [Oryza sativa]
ERDFSYVFDMLVALGIHAANEDDLLDNCYLLECSAGLDLYDDLEQKYDSLILWPVHERKLLFDITNAVLGDMITSVMNGCSKGLMARCSPGWNREEFAELVWQRVVQLRQEIEFNQEALLLSVEWAGSEDGASLVGRDIGNMLQDDLVQEIIADFLGATKSAKLRG

SEQ ID NO: 39900 - protein, 157 aa, Zea mays subsp. mays
  peptide (1)..(157): Ceres Seq. ID no. 12416391
  misc_feature (1)..(145): NCBI GI NO: 29124124 NR Description: hypothetical protein
  misc_feature (1)..(147): NCBI GI NO: 34897354 NR Description: hypothetical protein [Oryza sativa]
MLVALGIHAANEDDLLDNCYLLECSAGLDLYDDLEQKYDSLILWPVHERKLLFDITNAVLGDMITSVMNGCSKGLMARCSPGWNREEFAELVWQRVVQLRQEIEFNQEALLLSVEWAGSEDGASLVGRDIGNMLQDDLVQEIIADFLGATKSAKLRG

SEQ ID NO: 39901 - protein, 95 aa, Zea mays subsp. mays
  peptide (1)..(95): Ceres Seq. ID no. 12416392
  misc_feature (1)..(83): NCBI GI NO: 29124124 NR Description: hypothetical protein
  misc_feature (1)..(85): NCBI GI NO: 34897354 NR Description: hypothetical protein [Oryza sativa]
MITSVMNGCSKGLMARCSPGWNREEFAELVWQRVVQLRQEIEFNQEALLLSVEWAGSEDGASLVGRDIGNMLQDDLVQEIIADFLGATKSAKLRG

SEQ ID NO: 39902 - DNA, 1421 bp, Zea mays subsp. mays
  misc_feature (1)..(1421): Ceres Seq. ID no. 12391904
atgactactccaagcgcgcaattaaccctcactaaagggaacaaaagctggagctccaccgcggtggcggccgctctagaactagtggatcccccgggctgcaggaattcgcacgagaccattacctagaacatcctaatcgaaaaccttttgccgatccagttgtgccgatcggtattttcccgcgtccaccaaaacccgttgccgccgtttttttcgtcgccgccacggaccaggatcgaccggtgccgatgaagccagcggaggacgcggatgcgccggcgccggagacggcggcagcgcagacggtctggtacgaccccatgacttcgccgcaggcgccggcgccgcagcagcaaccggcgatagaggctgcgatgcggggggcctcgccgtcggtgagctccaacgcgcgggcctctcagggtgtacgccgacggcatctatgatctcttccacttcggccatgcgcgcgcgctcgaacaggccaagaagtcatttcccaacacctacttgctggtaggttgctgcagcgacgagatcacccacatgtacaaaggaaagaccgtcatgaccgaggacgagcgctacgaatcgcttcggcattgcaagtgggtcgacgaggtcataccggacgctccatgggtgatcaaccaggagttcatcgacaagcacgacatcgactacgtcgctcacgacgcgctcccatacgctgacacgagtggagctgccaatgatgtctatgaatttgtgaaagccatcgggaagttcaaggagacgaagcgcaccgagggcatctcgacgtcggacatcatcatgaggatcttgaaggactacaaccagtacatcatgcggaacctcacccgcgggtacagccgcaaagatctcggcgtcagctatgtcaaggagaagcagctgagagtcaacatggggatcagcaagctacgggagaaggtgaaggagcaccaggagaagttccacagcgcggcgaagatcgctgggaccaaccctgtggagtggatggagaacgcggaccgctggatcgttggcttccttgagaagttcgaggaaggctgccacatgatggaaactgccattaaaggtcggattcaggaggggttgaagcggcaaggcaggtcggagtcaaacctttctggagaggagttcgaatcgtagttctgtgatctcctccaaatgaaactagacaaaaggagaactggagatcatttcccagtctgtgtaacagtatgagattggttaattagcatgttattgtaggatgccatggatcattgtttagttgtacctggagatcatgtagttttgaagaacaatcgtgtttctgtatgcgatcagttgctccttcattgagcatatctgcatatggcacctgctaggaagtaggaactgctgttcatttg

SEQ ID NO: 39903 - protein, 208 aa, Zea mays subsp. mays
  peptide (1)..(208): Ceres Seq. ID no. 12391905
  misc_feature (1)..(194): NCBI GI NO: 37537166 NR Description: putative cholinephosphate cytidylyltransferase
  misc_feature (1)..(194): NCBI GI NO: 7488791 NR Description: choline-phosphate cytidylyltransferase (EC2
  misc_feature (1)..(200): NCBI GI NO: 21668498 NR Description: CTP:phosphorylcholine cytidylyltransferase
  misc_feature (22)..(208): NCBI GI NO: 34905274 NR Description: putative choline-phosphate cytidylyltransferase
  misc_feature (1)..(198): NCBI GI NO: 7488446 NR Description: choline-phosphate cytidylyltransferase (EC2
  misc_feature (1)..(194): NCBI GI NO: 7488484 NR Description: probable choline-phosphate cytidylyltransferase
  misc_feature (1)..(205): NCBI GI NO: 7488483 NR Description: probable choline-phosphate cytidylyltransferase
  misc_feature (1)..(198): NCBI GI NO: 7488485 NR Description: probable choline-phosphate cytidylyltransferase
  misc_feature (1)..(205): NCBI GI NO: 15225218 NR Description: putative phospholipid cytidylyltransferase
  misc_feature (1)..(200): NCBI GI NO: 30683147 NR Description: cholinephosphate cytidylyltransferase
MYKGKTVMTEDERYESLRHCKWVDEVIPDAPWVINQEFIDKHDIDYVAHDALPYADTSGAANDVYEFVKAIGKFKETKRTEGISTSDIIMRILKDYNQYIMRNLTRGYSRKDLGVSYVKEKQLRVNMGISKLREKVKEHQEKFHSAAKIAGTNPVEWMENADRWIVGFLEKFEEGCHMMETAIKGRIQEGLKRQGRSESNLSGEEFES

SEQ ID NO: 39904 - protein, 201 aa, Zea mays subsp. mays
  peptide (1)..(201): Ceres Seq. ID no. 12391906
  misc_feature (1)..(187): NCBI GI NO: 37537166 NR Description: putative cholinephosphate cytidylyltransferase
  misc_feature (1)..(187): NCBI GI NO: 7488791 NR Description: choline-phosphate cytidylyltransferase (EC2
  misc_feature (1)..(193): NCBI GI NO: 21668498 NR Description: CTP:phosphorylcholine cytidylyltransferase
  misc_feature (15)..(201): NCBI GI NO: 34905274 NR Description: putative choline-phosphate cytidylyltransferase
  misc_feature (1)..(191): NCBI GI NO: 7488446 NR Description: choline-phosphate cytidylyltransferase (EC2
  misc_feature (1)..(187): NCBI GI NO: 7488484 NR Description: probable choline-phosphate cytidylyltransferase
  misc_feature (1)..(198): NCBI GI NO: 7488483 NR Description: probable choline-phosphate cytidylyltransferase
  misc_feature (1)..(191): NCBI GI NO: 7488485 NR Description: probable choline-phosphate cytidylyltransferase
  misc_feature (1)..(198): NCBI GI NO: 15225218 NR Description: putative phospholipid cytidylyltransferase
  misc_feature (1)..(193): NCBI GI NO: 30683147 NR Description: cholinephosphate cytidylyltransferase
MTEDERYESLRHCKWVDEVIPDAPWVINQEFIDKHDIDYVAHDALPYADTSGAANDVYEFVKAIGKFKETKRTEGISTSDIIMRILKDYNQYIMRNLTRGYSRKDLGVSYVKEKQLRVNMGISKLREKVKEHQEKFHSAAKIAGTNPVEWMENADRWIVGFLEKFEEGCHMMETAIKGRIQEGLKRQGRSESNLSGEEFES

SEQ ID NO: 39905 - protein, 119 aa, Zea mays subsp. mays
  peptide (1)..(119): Ceres Seq. ID no. 12391907
  misc_feature (1)..(105): NCBI GI NO: 37537166 NR Description: putative cholinephosphate cytidylyltransferase
  misc_feature (1)..(105): NCBI GI NO: 7488791 NR Description: choline-phosphate cytidylyltransferase (EC2
  misc_feature (1)..(111): NCBI GI NO: 21668498 NR Description: CTP:phosphorylcholine cytidylyltransferase
  misc_feature (1)..(119): NCBI GI NO: 34905274 NR Description: putative choline-phosphate cytidylyltransferase
  misc_feature (1)..(109): NCBI GI NO: 7488446 NR Description: choline-phosphate cytidylyltransferase (EC2
  misc_feature (1)..(105): NCBI GI NO: 7488484 NR Description: probable choline-phosphate cytidylyltransferase
  misc_feature (1)..(116): NCBI GI NO: 7488483 NR Description: probable choline-phosphate cytidylyltransferase
  misc_feature (1)..(109): NCBI GI NO: 7488485 NR Description: probable choline-phosphate cytidylyltransferase
  misc_feature (1)..(116): NCBI GI NO: 15225218 NR Description: putative phospholipid cytidylyltransferase
  misc_feature (1)..(111): NCBI GI NO: 30683147 NR Description: cholinephosphate cytidylyltransferase
MRILKDYNQYIMRNLTRGYSRKDLGVSYVKEKQLRVNMGISKLREKVKEHQEKFHSAAKIAGTNPVEWMENADRWIVGFLEKFEEGCHMMETAIKGRIQEGLKRQGRSESNLSGEEFES

SEQ ID NO: 39906 - DNA, 1081 bp, Zea mays subsp. mays
  misc_feature (1)..(1081): Ceres Seq. ID no. 12391425
agacaataatggccgcctccgacaagtaggacctgatgaggatttcagcggcggcgctcctgctggcgctggccgcggcaggcagcgtctgctcggcgcagcagctccgtcgcaactactacgcgagcgtgtgcccaaacgtggagtccatcgtgcgcgacgcggtggcgaagaagtaccgggagacgttcatcacggtgggcgcgacggtgcacctcttcttccacgactgcttcgtggagggctgcgacgcctccgtggtggtggcgtccacgccaaacgccaccgcggagaaggaccaccccatcaacctgtccctggcgggcgatggcttcgacaccgtgatccgggccaaggccgccgtggacgccgtgccgcggtgccggaacagggtgtcctgcgccgacatcctggccatggccacccgggacgccatcgcgctggccggcgggcccgcgtacgcggtggagctgggccgcctggacgggctgtcctccacggcgaccagcgtgaacgggaagctggcgccgccgtcgtttggcctggaccagctcaccgcgctgttcgcgcgcaacgggctctcgcaggccgacatggtggcgctatcggcggggcacacggtggggttcgcgcactgcggaaccttctccgggcgggtccgcgcggcggacccgacgctgaaccggagcctggcggagaagctggcggcgtggtgccccgacggcgtggacccgcgggtggcggtgaccatggacgtggtcacgcccagggtgttcgacaaccagtacttccggaacctgcagagcgggatgggcctcctggcgtcggaccaggtgctgtacacggaccccaggtctaggcccaccgctcgacgcgttggcccggagtaaagtggcctttgaacgggcctttgtggaggggatcacgaagatgggccggatcggggtcaagacgggtgcccaagggaacatccgacgtaactgcgcagtgctcaattgaccgacctgatgatgtttgttgccctgcgcttgtactatctatgaacaaatttgccgtgtgtttatatatgaacaaattttcc

SEQ ID NO: 39907 - protein, 285 aa, Zea mays subsp. mays
  peptide (1)..(285): Ceres Seq. ID no. 12391426
  misc_feature (80)..(211): Pfam Name: Pfam Description:  Neurotransmitter-gated ion-channel transmembrane region
  misc_feature (73)..(285): NCBI GI NO: 22959520 NR Description: hypothetical protein [Rhodobacter sphaeroides]
DNNGRLRQVGPDEDFSGGAPAGAGRGRQRLLGAAAPSQLLRERVPKRGVHRARRGGEEVPGDVHHGGRDGAPLLPRLLRGGLRRLRGGGVHAKRHRGEGPPHQPVPGGRWLRHRDPGQGRRGRRAAVPEQGVLRRHPGHGHPGRHRAGRRARVRGGAGPPGRAVLHGDQREREAGAAVVWPGPAHRAVRAQRALAGRHGGAIGGAHGGVRALRNLLRAGPRGGPDAEPEPGGEAGGVVPRRRGPAGGGDHGRGHAQGVRQPVLPEPAERDGPPGVGPGAVHGPQV

SEQ ID NO: 39908 - protein, 284 aa, Zea mays subsp. mays
  peptide (1)..(284): Ceres Seq. ID no. 12391427
  misc_feature (40)..(276): Pfam Name: Pfam Description:  Peroxidase
  misc_feature (2)..(276): NCBI GI NO: 34915320 NR Description: putative peroxidase
  misc_feature (3)..(277): NCBI GI NO: 17027274 NR Description: putative peroxidase
  misc_feature (23)..(277): NCBI GI NO: 28629828 NR Description: peroxidase 1 [Artemisia annua]
  misc_feature (21)..(277): NCBI GI NO: 14485511 NR Description: putative peroxidase [Solanum tuberosum]
  misc_feature (23)..(277): NCBI GI NO: 2117624 NR Description: peroxidase (EC 1.11.1.7) 2 precursor - alfalfa
  misc_feature (23)..(277): NCBI GI NO: 13992528 NR Description: peroxidase2 [Medicago sativa]
  misc_feature (8)..(277): NCBI GI NO: 15235597 NR Description: peroxidase, putative; protein id: At4g37520
  misc_feature (8)..(277): NCBI GI NO: 15235600 NR Description: peroxidase, putative; protein id: At4g37530
  misc_feature (8)..(277): NCBI GI NO: 21554605 NR Description: peroxidase, prxr2 [Arabidopsis thaliana]
  misc_feature (8)..(277): NCBI GI NO: 17979440 NR Description: putative peroxidase [Arabidopsis thaliana]
MRISAAALLLALAAAGSVCSAQQLRRNYYASVCPNVESIVRDAVAKKYRETFITVGATVHLFFHDCFVEGCDASVVVASTPNATAEKDHPINLSLAGDGFDTVIRAKAAVDAVPRCRNRVSCADILAMATRDAIALAGGPAYAVELGRLDGLSSTATSVNGKLAPPSFGLDQLTALFARNGLSQADMVALSAGHTVGFAHCGTFSGRVRAADPTLNRSLAEKLAAWCPDGVDPRVAVTMDVVTPRVFDNQYFRNLQSGMGLLASDQVLYTDPRSRPTARRVGPE

SEQ ID NO: 39909 - protein, 157 aa, Zea mays subsp. mays
  peptide (1)..(157): Ceres Seq. ID no. 12391428
  misc_feature (1)..(149): Pfam Name: Pfam Description:  Peroxidase
  misc_feature (1)..(149): NCBI GI NO: 34915320 NR Description: putative peroxidase
  misc_feature (1)..(150): NCBI GI NO: 17027274 NR Description: putative peroxidase
  misc_feature (1)..(150): NCBI GI NO: 28629828 NR Description: peroxidase 1 [Artemisia annua]
  misc_feature (1)..(150): NCBI GI NO: 14485511 NR Description: putative peroxidase [Solanum tuberosum]
  misc_feature (1)..(150): NCBI GI NO: 2117624 NR Description: peroxidase (EC 1.11.1.7) 2 precursor - alfalfa
  misc_feature (1)..(150): NCBI GI NO: 13992528 NR Description: peroxidase2 [Medicago sativa]
  misc_feature (1)..(150): NCBI GI NO: 15235597 NR Description: peroxidase, putative; protein id: At4g37520
  misc_feature (1)..(150): NCBI GI NO: 15235600 NR Description: peroxidase, putative; protein id: At4g37530
  misc_feature (1)..(150): NCBI GI NO: 21554605 NR Description: peroxidase, prxr2 [Arabidopsis thaliana]
  misc_feature (1)..(150): NCBI GI NO: 17979440 NR Description: putative peroxidase [Arabidopsis thaliana]
MATRDAIALAGGPAYAVELGRLDGLSSTATSVNGKLAPPSFGLDQLTALFARNGLSQADMVALSAGHTVGFAHCGTFSGRVRAADPTLNRSLAEKLAAWCPDGVDPRVAVTMDVVTPRVFDNQYFRNLQSGMGLLASDQVLYTDPRSRPTARRVGPE

SEQ ID NO: 39910 - DNA, 1071 bp, Zea mays subsp. mays; identical to SEQ ID NO: 38176
  misc_feature (1)..(1071): Ceres Seq. ID no. 12406460

SEQ ID NO: 39911 - protein, 238 aa, Zea mays subsp. mays; identical to SEQ ID NO: 38177
  peptide (1)..(238): Ceres Seq. ID no. 12406461
  misc_feature (18)..(238): NCBI GI NO: 38636775 NR Description: putative DAG protein
  misc_feature (1)..(233): NCBI GI NO: 6014904 NR Description: DAG PROTEIN, CHLOROPLAST PRECURSOR
  misc_feature (77)..(233): NCBI GI NO: 15220382 NR Description: DAG protein, putative; protein id: At1g11430
  misc_feature (77)..(233): NCBI GI NO: 21593052 NR Description: DAG protein, putative [Arabidopsis thaliana]
  misc_feature (4)..(223): NCBI GI NO: 15230785 NR Description: DAG protein, putative; protein id: At3g06790.1
  misc_feature (4)..(223): NCBI GI NO: 27754695 NR Description: putative DAG protein [Arabidopsis thaliana]
  misc_feature (14)..(214): NCBI GI NO: 38344141 NR Description: OSJNBa0041A02.8
  misc_feature (20)..(214): NCBI GI NO: 34897972 NR Description: putative plastid protein
  misc_feature (83)..(214): NCBI GI NO: 15226108 NR Description: plastid protein; protein id: At2g33430
  misc_feature (83)..(214): NCBI GI NO: 25370552 NR Description: DAG protein homolog

SEQ ID NO: 39912 - protein, 223 aa, Zea mays subsp. mays; identical to SEQ ID NO: 38178
  peptide (1)..(223): Ceres Seq. ID no. 12406462
  misc_feature (3)..(223): NCBI GI NO: 38636775 NR Description: putative DAG protein
  misc_feature (1)..(218): NCBI GI NO: 6014904 NR Description: DAG PROTEIN, CHLOROPLAST PRECURSOR
  misc_feature (62)..(218): NCBI GI NO: 15220382 NR Description: DAG protein, putative; protein id: At1g11430
  misc_feature (62)..(218): NCBI GI NO: 21593052 NR Description: DAG protein, putative [Arabidopsis thaliana]
  misc_feature (1)..(208): NCBI GI NO: 15230785 NR Description: DAG protein, putative; protein id: At3g06790.1
  misc_feature (1)..(208): NCBI GI NO: 27754695 NR Description: putative DAG protein [Arabidopsis thaliana]
  misc_feature (1)..(199): NCBI GI NO: 38344141 NR Description: OSJNBa0041A02.8
  misc_feature (5)..(199): NCBI GI NO: 34897972 NR Description: putative plastid protein
  misc_feature (68)..(199): NCBI GI NO: 15226108 NR Description: plastid protein; protein id: At2g33430
  misc_feature (68)..(199): NCBI GI NO: 25370552 NR Description: DAG protein homolog

SEQ ID NO: 39913 - protein, 164 aa, Zea mays subsp. mays; identical to SEQ ID NO: 38179
  peptide (1)..(164): Ceres Seq. ID no. 12406463

SEQ ID NO: 39914 - DNA, 735 bp, Zea mays subsp. mays
  misc_feature (1)..(735): Ceres Seq. ID no. 14305333
gattacacagaattccctcccaatcggcggcgccacgatgcgcctccgcagccgggcaatctttcccctcgtccgcaccaccgccaccaccacatcggccgcgtcttcgtcgccggcggtgctgagcatcggccacgcgctgcgcgagcgccggctgttcacgggggacgacgtggcggcgtacgcggcgatcagcggtgaccgcaacccggtgcacctcgacgacgccgtcgcccgggagctgagcgggttccagcgaggccgcgtggtgcacggcatgctcgtggcgtccctcttcccttccatcatcgctgccacctggcgctgtgtacgcgagccagacgctcaagtttgcggcgccggtgtacgtcggggatgaggtggttgctcgagtccaggcactcaacatcaggacggcggcggcgacgaacagctgcacggcaagacgatatgtcgtcaagttcgcaaccaaatgcttcatggacgaagaggaaggctctgttgcgattgaaggcgaagcaatggctgtcctgcctacactggagctcagctctcagtcgactagaaactaggagtggcctcaaaccgggtgactagtcacaagttgctgttgcttaatcatacccgacctggtaatccctctcttctggaacactgtgtagaatgcgtgtaaactaaacttagtgtagcctttacattataagcgaggagtgaaataaagctgttgtttatgac

SEQ ID NO: 39915 - protein, 125 aa, Zea mays subsp. mays
  peptide (1)..(125): Ceres Seq. ID no. 14305334
  misc_feature (37)..(105): Pfam Name: Pfam Description:  MaoC like domain
  misc_feature (17)..(105): NCBI GI NO: 10177725 NR Description: gene_id:K9B18.4~unknown protein
  misc_feature (17)..(105): NCBI GI NO: 15239296 NR Description: expressed protein [Arabidopsis thaliana]
  misc_feature (35)..(103): NCBI GI NO: 18652297 NR Description: enoyl-CoA hydrotase [Aeromonas hydrophila]
  misc_feature (41)..(106): NCBI GI NO: 16124957 NR Description: MaoC family protein [Caulobacter crescentus CB15]
  misc_feature (41)..(103): NCBI GI NO: 28948376 NR Description: Chain A, (R)-Hydratase From A
  misc_feature (41)..(106): NCBI GI NO: 23016355 NR Description: hypothetical protein
  misc_feature (41)..(102): NCBI GI NO: 23060433 NR Description: hypothetical protein
  misc_feature (41)..(103): NCBI GI NO: 22958771 NR Description: hypothetical protein [Rhodobacter sphaeroides]
ITQNSLPIGGATMRLRSRAIFPLVRTTATTTSAASSSPAVLSIGHALRERRLFTGDDVAAYAAISGDRNPVHLDDAVARELSGFQRGRVVHGMLVASLFPSIIAATWRCVREPDAQVCGAGVRRG

SEQ ID NO: 39916 - protein, 113 aa, Zea mays subsp. mays
  peptide (1)..(113): Ceres Seq. ID no. 14305335
  misc_feature (25)..(93): Pfam Name: Pfam Description:  MaoC like domain
  misc_feature (5)..(93): NCBI GI NO: 10177725 NR Description: gene_id:K9B18.4~unknown protein
  misc_feature (5)..(93): NCBI GI NO: 15239296 NR Description: expressed protein [Arabidopsis thaliana]
  misc_feature (23)..(91): NCBI GI NO: 18652297 NR Description: enoyl-CoA hydrotase [Aeromonas hydrophila]
  misc_feature (29)..(94): NCBI GI NO: 16124957 NR Description: MaoC family protein [Caulobacter crescentus CB15]
  misc_feature (29)..(91): NCBI GI NO: 28948376 NR Description: Chain A, (R)-Hydratase From A
  misc_feature (29)..(94): NCBI GI NO: 23016355 NR Description: hypothetical protein
  misc_feature (29)..(90): NCBI GI NO: 23060433 NR Description: hypothetical protein
  misc_feature (29)..(91): NCBI GI NO: 22958771 NR Description: hypothetical protein [Rhodobacter sphaeroides]
MRLRSRAIFPLVRTTATTTSAASSSPAVLSIGHALRERRLFTGDDVAAYAAISGDRNPVHLDDAVARELSGFQRGRVVHGMLVASLFPSIIAATWRCVREPDAQVCGAGVRRG

SEQ ID NO: 39917 - protein, 73 aa, Zea mays subsp. mays
  peptide (1)..(73): Ceres Seq. ID no. 14305336
MRWLLESRHSTSGRRRRRTAARQDDMSSSSQPNASWTKRKALLRLKAKQWLSCLHWSSALSRLETRSGLKPGD

SEQ ID NO: 39918 - DNA, 802 bp, Zea mays subsp. mays
  misc_feature (1)..(802): Ceres Seq. ID no. 12381404
tctctacggggtaggctctgtccttcttacatggatgaagatatattctggaagatttactttaggttgcttgagtcaaacataaatgagcataattctgaggaagatatccggagcgtgccaaattctgtacatcacaacaatgagatagagtctgattctccacctcacgtctgtgagatagaaagtgtgaaaagcaaccaagaagggtaccaatcttcggatggtcgtgctttccccaagacaagatctgagcgaagcattgaccaatgggtatttgcaaagtcaaaatctgaggaaagcatggatcagtggtctgaaataccttcagatgtggaatccttcagagaaggtaaaaggtacctcagtagcgaggagctgagtgacgttgatagtgccaacgttgttgtcatggacaaatacatggattcagtcctctctgaccggaggaaccttccctacgctagctcctcggtgcgccgggattcagtcagacgaaaacctgcttcgtccgccgattacagccgccgacctccgcagccaactccacctgcatcgctgtcaaagaaggaatcgtgggatgtcattgaagattcggagttcgatatacttgacagttagtaattgagatctttgcgatctcaaggctgtttatccttctattttcttccatgtttccccacacttcacctcgtttgtaaatgtggacgtgcaggtggcgtcagtgatagtgggaaaggactaatgttctttttaccaatatattataacagtgtgtgcatataaatcttctgagctcgcc

SEQ ID NO: 39919 - protein, 206 aa, Zea mays subsp. mays
  peptide (1)..(206): Ceres Seq. ID no. 12381405
  misc_feature (1)..(165): NCBI GI NO: 34898448 NR Description: hypothetical protein
SLRGRLCPSYMDEDIFWKIYFRLLESNINEHNSEEDIRSVPNSVHHNNEIESDSPPHVCEIESVKSNQEGYQSSDGRAFPKTRSERSIDQWVFAKSKSEESMDQWSEIPSDVESFREGKRYLSSEELSDVDSANVVVMDKYMDSVLSDRRNLPYASSSVRRDSVRRKPASSADYSRRPPQPTPPASLSKKESWDVIEDSEFDILDS

SEQ ID NO: 39920 - protein, 196 aa, Zea mays subsp. mays
  peptide (1)..(196): Ceres Seq. ID no. 12381406
  misc_feature (1)..(155): NCBI GI NO: 34898448 NR Description: hypothetical protein
MDEDIFWKIYFRLLESNINEHNSEEDIRSVPNSVHHNNEIESDSPPHVCEIESVKSNQEGYQSSDGRAFPKTRSERSIDQWVFAKSKSEESMDQWSEIPSDVESFREGKRYLSSEELSDVDSANVVVMDKYMDSVLSDRRNLPYASSSVRRDSVRRKPASSADYSRRPPQPTPPASLSKKESWDVIEDSEFDILDS

SEQ ID NO: 39921 - protein, 105 aa, Zea mays subsp. mays
  peptide (1)..(105): Ceres Seq. ID no. 12381407
  misc_feature (1)..(64): NCBI GI NO: 34898448 NR Description: hypothetical protein
MDQWSEIPSDVESFREGKRYLSSEELSDVDSANVVVMDKYMDSVLSDRRNLPYASSSVRRDSVRRKPASSADYSRRPPQPTPPASLSKKESWDVIEDSEFDILDS

SEQ ID NO: 39922 - DNA, 1132 bp, Zea mays subsp. mays
  misc_feature (1)..(1132): Ceres Seq. ID no. 12416375
caactttcagaacagccaaattaagaagcaaacatattcttctagttcttccgtggtaggacatggcagagagcatggggagagacggtggtgatggtgagctcaagctgctggggctgtgggcgagcccgttcgtagcgagagcgaagctcgcgctccagatcaagggcctaagctacgagtacgtcgaggaggatctcggcaacaagagcgagctgctgctcagctccaacccggtgcacaagacggtgccggtgctgatccacaacgggacgccggtctgcgagtcgacggtcatcgtccagtacatcgacgacgctttcgccggcactggcccgtccctcctccccgctgacccctaccagcgcgcccttgctcgcttctgggccgcctacctcgaagacaagattgtgacgccgtggcggcggtttttcatggtcaaggccgacgaggagaaggccgaggcgatgaggcagacggtcgcagccatggacgcgctggagggaggcctgaaggaatgctcttctgggggtgggggccagagccccttcttcggcggcgacagcgtcggctacgtggacgtccttctgggtggcatggtttcatgggtcaaggcatccgagccgctctccggcgccaagatcatcgacgcagccaggacgccgctcctggccgcgtggatggagcgcttctgcgagctggacgcggccaaggcggtcctgcaggacgtccatgaggttgtcgagtacgccaggacggtgcaggcacgggttgccgctgcgaccgcaagcaatcagtagtggaaacaccgtgaaccccgaacccagtaggcaacgtgatcccatcttctcagttggctcccgttcggctcagtgcgtcacctctgtcctgccctttgcacctgccctatccgcgtgttcgtaagccgtcgtcccaggaaacgtcgtgccatagacgatctcccggactgttgagactaccaacgtgtgtttttgaacaggaacatgtacctgcaattaccgatacgtccatcctcgttgagtcaatggcaacgatgcaagggtctgcatcattttggaattacctgaatctatgaactgggaatgataaggtgggccacatttgatcattt

SEQ ID NO: 39923 - protein, 245 aa, Zea mays subsp. mays
  peptide (1)..(245): Ceres Seq. ID no. 12416376
  misc_feature (95)..(214): Pfam Name: Pfam Description:  Glutathione S-transferase, C-terminal domain
  misc_feature (10)..(245): NCBI GI NO: 37536330 NR Description: putative glutathione S-transferase
  misc_feature (6)..(241): NCBI GI NO: 11385521 NR Description: glutathione S-transferase GST 35 [Zea mays]
  misc_feature (5)..(244): NCBI GI NO: 37536332 NR Description: putative glutathione S-transferase
  misc_feature (9)..(244): NCBI GI NO: 22038178 NR Description: glutathione-S-transferase 2 [Aegilops tauschii]
  misc_feature (10)..(244): NCBI GI NO: 37536334 NR Description: putative glutathione S-transferase
  misc_feature (9)..(243): NCBI GI NO: 21730248 NR Description: Chain A
  misc_feature (9)..(241): NCBI GI NO: 21956482 NR Description: glutathione-S-transferase 28e45
  misc_feature (9)..(239): NCBI GI NO: 11385535 NR Description: glutathione S-transferase GST 42 [Zea mays]
  misc_feature (9)..(244): NCBI GI NO: 33304612 NR Description: tau class GST protein 3
  misc_feature (9)..(243): NCBI GI NO: 37536310 NR Description: putative glutathione S-transferase
MAESMGRDGGDGELKLLGLWASPFVARAKLALQIKGLSYEYVEEDLGNKSELLLSSNPVHKTVPVLIHNGTPVCESTVIVQYIDDAFAGTGPSLLPADPYQRALARFWAAYLEDKIVTPWRRFFMVKADEEKAEAMRQTVAAMDALEGGLKECSSGGGGQSPFFGGDSVGYVDVLLGGMVSWVKASEPLSGAKIIDAARTPLLAAWMERFCELDAAKAVLQDVHEVVEYARTVQARVAAATASNQ

SEQ ID NO: 39924 - protein, 241 aa, Zea mays subsp. mays
  peptide (1)..(241): Ceres Seq. ID no. 12416377
  misc_feature (91)..(210): Pfam Name: Pfam Description:  Glutathione S-transferase, C-terminal domain
  misc_feature (6)..(241): NCBI GI NO: 37536330 NR Description: putative glutathione S-transferase
  misc_feature (2)..(237): NCBI GI NO: 11385521 NR Description: glutathione S-transferase GST 35 [Zea mays]
  misc_feature (1)..(240): NCBI GI NO: 37536332 NR Description: putative glutathione S-transferase
  misc_feature (5)..(240): NCBI GI NO: 22038178 NR Description: glutathione-S-transferase 2 [Aegilops tauschii]
  misc_feature (6)..(240): NCBI GI NO: 37536334 NR Description: putative glutathione S-transferase
  misc_feature (5)..(239): NCBI GI NO: 21730248 NR Description: Chain A
  misc_feature (5)..(237): NCBI GI NO: 21956482 NR Description: glutathione-S-transferase 28e45
  misc_feature (5)..(235): NCBI GI NO: 11385535 NR Description: glutathione S-transferase GST 42 [Zea mays]
  misc_feature (5)..(240): NCBI GI NO: 33304612 NR Description: tau class GST protein 3
  misc_feature (5)..(239): NCBI GI NO: 37536310 NR Description: putative glutathione S-transferase
MGRDGGDGELKLLGLWASPFVARAKLALQIKGLSYEYVEEDLGNKSELLLSSNPVHKTVPVLIHNGTPVCESTVIVQYIDDAFAGTGPSLLPADPYQRALARFWAAYLEDKIVTPWRRFFMVKADEEKAEAMRQTVAAMDALEGGLKECSSGGGGQSPFFGGDSVGYVDVLLGGMVSWVKASEPLSGAKIIDAARTPLLAAWMERFCELDAAKAVLQDVHEVVEYARTVQARVAAATASNQ

SEQ ID NO: 39925 - DNA, 699 bp, Zea mays subsp. mays
  misc_feature (1)..(699): Ceres Seq. ID no. 12358014
aaaaaagtccccattagtaaggcaaaagccgcaaaggcttatccttccgagtctccaccaacgacaatggcgagcgctcccgccggctttgcccccaccgtcgctgcttccacaagcttcggcttcactatcgtggcatgccccttcccctcgcgcacgcatcttccagcggcctcctccgttggggttcgcaatcagcagcgcgcgtccactgccaccgcctgcctgccgccgccgagtacctcccatggcgccgccaccaggctgtacgtcagcggtctttcgttccgcacaaccgaacggagcctccgggacgcgttcgagaagtttggtgaccttacggaagtttgtctcgtgatggatagagtagcgaagcgaccgagaggtttcgctttcctttcttacaccggggaggaggaagccaggggcgccatggaagggatgcacgggaagttcctggatggcagagtgatctttgtcgaggttgcgaaacgaagagttgaagcctgaaggatcgtgcccaaatactgctcaaaaacttgattgttggttccagcaaagtccctggtgagacacacactgatgcaggcaaagtttagatgtgaacagaggaaccgaagaaaccttagcagcattcggtcgtgtagctgccatttcattgttttacaaaacaacattcgtaatttacatatataggtc

SEQ ID NO: 39926 - protein, 169 aa, Zea mays subsp. mays
  peptide (1)..(169): Ceres Seq. ID no. 12358015
  misc_feature (89)..(160): Pfam Name: a.k.a. RRM, RBD, or RNP domain Pfam Description: RNA recognition motif.
  misc_feature (78)..(169): NCBI GI NO: 15219486 NR Description: RRM-containing RNA-binding protein, putative
  misc_feature (57)..(166): NCBI GI NO: 34898598 NR Description: P0534A03.25
  misc_feature (88)..(166): NCBI GI NO: 18402803 NR Description: expressed protein; protein id: At3g20930
  misc_feature (114)..(168): NCBI GI NO: 38346812 NR Description: OSJNBa0088A01.19
  misc_feature (67)..(167): NCBI GI NO: 38344030 NR Description: OJ991214_12.1
  misc_feature (88)..(163): NCBI GI NO: 28173040 NR Description: hyperosmotic glycine rich protein [Salmo salar]
  misc_feature (86)..(168): NCBI GI NO: 15231311 NR Description: RRM-containing protein; protein id: At3g46020.1
  misc_feature (57)..(166): NCBI GI NO: 38636774 NR Description: putative RNA recognition motif
  misc_feature (84)..(166): NCBI GI NO: 15239958 NR Description: RRM-containing protein; protein id: At5g06210
  misc_feature (63)..(166): NCBI GI NO: 34906972 NR Description: putative glycine-rich RNA-binding protein 2
KKVPISKAKAAKAYPSESPPTTMASAPAGFAPTVAASTSFGFTIVACPFPSRTHLPAASSVGVRNQQRASTATACLPPPSTSHGAATRLYVSGLSFRTTERSLRDAFEKFGDLTEVCLVMDRVAKRPRGFAFLSYTGEEEARGAMEGMHGKFLDGRVIFVEVAKRRVEA

SEQ ID NO: 39927 - protein, 147 aa, Zea mays subsp. mays
  peptide (1)..(147): Ceres Seq. ID no. 12358016
  misc_feature (67)..(138): Pfam Name: a.k.a. RRM, RBD, or RNP domain Pfam Description: RNA recognition motif.
  misc_feature (56)..(147): NCBI GI NO: 15219486 NR Description: RRM-containing RNA-binding protein, putative
  misc_feature (35)..(144): NCBI GI NO: 34898598 NR Description: P0534A03.25
  misc_feature (66)..(144): NCBI GI NO: 18402803 NR Description: expressed protein; protein id: At3g20930
  misc_feature (92)..(146): NCBI GI NO: 38346812 NR Description: OSJNBa0088A01.19
  misc_feature (45)..(145): NCBI GI NO: 38344030 NR Description: OJ991214_12.1
  misc_feature (66)..(141): NCBI GI NO: 28173040 NR Description: hyperosmotic glycine rich protein [Salmo salar]
  misc_feature (64)..(146): NCBI GI NO: 15231311 NR Description: RRM-containing protein; protein id: At3g46020.1
  misc_feature (35)..(144): NCBI GI NO: 38636774 NR Description: putative RNA recognition motif
  misc_feature (62)..(144): NCBI GI NO: 15239958 NR Description: RRM-containing protein; protein id: At5g06210
  misc_feature (41)..(144): NCBI GI NO: 34906972 NR Description: putative glycine-rich RNA-binding protein 2
MASAPAGFAPTVAASTSFGFTIVACPFPSRTHLPAASSVGVRNQQRASTATACLPPPSTSHGAATRLYVSGLSFRTTERSLRDAFEKFGDLTEVCLVMDRVAKRPRGFAFLSYTGEEEARGAMEGMHGKFLDGRVIFVEVAKRRVEA

SEQ ID NO: 39928 - protein, 118 aa, Zea mays subsp. mays
  peptide (1)..(118): Ceres Seq. ID no. 12358017
KKSPLVRQKPQRLILPSLHQRQWRALPPALPPPSLLPQASASLSWHAPSPRARIFQRPPPLGFAISSARPLPPPACRRRVPPMAPPPGCTSAVFRSAQPNGASGTRSRSLVTLRKFVS

SEQ ID NO: 39929 - DNA, 1444 bp, Zea mays subsp. mays; identical to SEQ ID NO: 35422
  misc_feature (1)..(1444): Ceres Seq. ID no. 12455051

SEQ ID NO: 39930 - protein, 423 aa, Zea mays subsp. mays; identical to SEQ ID NO: 35423
  peptide (1)..(423): Ceres Seq. ID no. 12455052

SEQ ID NO: 39931 - protein, 417 aa, Zea mays subsp. mays; identical to SEQ ID NO: 35424
  peptide (1)..(417): Ceres Seq. ID no. 12455053

SEQ ID NO: 39932 - protein, 401 aa, Zea mays subsp. mays; identical to SEQ ID NO: 35425
  peptide (1)..(401): Ceres Seq. ID no. 12455054
  misc_feature (2)..(380): NCBI GI NO: 15223169 NR Description: putative protein kinase; protein id: At1g70520.1
  misc_feature (5)..(393): NCBI GI NO: 10178148 NR Description: receptor-like serine/threonine kinase
  misc_feature (58)..(393): NCBI GI NO: 15242677 NR Description: receptor-like protein kinase; protein id:At5g40380
  misc_feature (8)..(401): NCBI GI NO: 34913832 NR Description: putative protein kinase
  misc_feature (49)..(365): NCBI GI NO: 15223170 NR Description: putative protein kinase; protein id: At1g70530.1
  misc_feature (53)..(365): NCBI GI NO: 2465925 NR Description: receptor-like serine/threonine kinase
  misc_feature (53)..(365): NCBI GI NO: 8778283 NR Description: F14D16.24 [Arabidopsis thaliana]
  misc_feature (1)..(375): NCBI GI NO: 34393282 NR Description: putative serine/threonine kinase receptor precursor
  misc_feature (5)..(401): NCBI GI NO: 15233389 NR Description: serine/threonine kinase-like protein
  misc_feature (5)..(397): NCBI GI NO: 38345599 NR Description: OSJNBa0093O08.1

SEQ ID NO: 39933 - DNA, 2211 bp, Zea mays subsp. mays; identical to SEQ ID NO: 35474
  misc_feature (1)..(2211): Ceres Seq. ID no. 12550712
  misc_feature (1132)..(1132): n is a, c, t, g, unknown, or other

SEQ ID NO: 39934 - protein, 544 aa, Zea mays subsp. mays; identical to SEQ ID NO: 35475
  peptide (1)..(544): Ceres Seq. ID no. 12550713
  misc_feature (33)..(173): Pfam Name: Pfam Description:  TCP-1/cpn60 chaperonin family
  misc_feature (3)..(542): NCBI GI NO: 15240317 NR Description: chaperonin gamma chain - like protein
  misc_feature (152)..(542): NCBI GI NO: 7441904 NR Description: probable chaperonin-containing TCP-1 complex gammachain F9D12
  misc_feature (31)..(173): NCBI GI NO: 7441904 NR Description: probable chaperonin-containing TCP-1 complex gammachain F9D12
  misc_feature (3)..(538): NCBI GI NO: 28881229 NR Description: probable chaperonin of the TCP1 ring complex
  misc_feature (4)..(539): NCBI GI NO: 631730 NR Description: matricin - mouse
  misc_feature (4)..(531): NCBI GI NO: 40018616 NR Description: chaperonin containing TCP1, subunit 3 (gamma)
  misc_feature (3)..(543): NCBI GI NO: 17066724 NR Description: CCT chaperonin gamma subunit
  misc_feature (4)..(531): NCBI GI NO: 6753320 NR Description: chaperonin subunit 3 (gamma) [Mus musculus]
  misc_feature (6)..(543): NCBI GI NO: 1079280 NR Description: chaperonin containing TCP-1 complex gamma chain -African clawed frog
  misc_feature (6)..(543): NCBI GI NO: 39850250 NR Description: Unknown (protein for MGC:76259)
  misc_feature (295)..(295): Xaa is any aa, unknown or other

SEQ ID NO: 39935 - protein, 499 aa, Zea mays subsp. mays; identical to SEQ ID NO: 35476
  peptide (1)..(499): Ceres Seq. ID no. 12550714
  misc_feature (1)..(128): Pfam Name: Pfam Description:  TCP-1/cpn60 chaperonin family
  misc_feature (1)..(497): NCBI GI NO: 15240317 NR Description: chaperonin gamma chain - like protein
  misc_feature (107)..(497): NCBI GI NO: 7441904 NR Description: probable chaperonin-containing TCP-1 complex gammachain F9D12
  misc_feature (1)..(128): NCBI GI NO: 7441904 NR Description: probable chaperonin-containing TCP-1 complex gammachain F9D12
  misc_feature (1)..(493): NCBI GI NO: 28881229 NR Description: probable chaperonin of the TCP1 ring complex
  misc_feature (1)..(494): NCBI GI NO: 631730 NR Description: matricin - mouse
  misc_feature (1)..(486): NCBI GI NO: 40018616 NR Description: chaperonin containing TCP1, subunit 3 (gamma)
  misc_feature (1)..(498): NCBI GI NO: 17066724 NR Description: CCT chaperonin gamma subunit
  misc_feature (1)..(486): NCBI GI NO: 6753320 NR Description: chaperonin subunit 3 (gamma) [Mus musculus]
  misc_feature (1)..(498): NCBI GI NO: 1079280 NR Description: chaperonin containing TCP-1 complex gamma chain -African clawed frog
  misc_feature (1)..(498): NCBI GI NO: 39850250 NR Description: Unknown (protein for MGC:76259)
  misc_feature (250)..(250): Xaa is any aa, unknown or other

SEQ ID NO: 39936 - protein, 496 aa, Zea mays subsp. mays; identical to SEQ ID NO: 35477
  peptide (1)..(496): Ceres Seq. ID no. 12550715
  misc_feature (1)..(125): Pfam Name: Pfam Description:  TCP-1/cpn60 chaperonin family
  misc_feature (1)..(494): NCBI GI NO: 15240317 NR Description: chaperonin gamma chain - like protein
  misc_feature (104)..(494): NCBI GI NO: 7441904 NR Description: probable chaperonin-containing TCP-1 complex gammachain F9D12
  misc_feature (1)..(125): NCBI GI NO: 7441904 NR Description: probable chaperonin-containing TCP-1 complex gammachain F9D12
  misc_feature (1)..(490): NCBI GI NO: 28881229 NR Description: probable chaperonin of the TCP1 ring complex
  misc_feature (1)..(491): NCBI GI NO: 631730 NR Description: matricin - mouse
  misc_feature (1)..(483): NCBI GI NO: 40018616 NR Description: chaperonin containing TCP1, subunit 3 (gamma)
  misc_feature (1)..(495): NCBI GI NO: 17066724 NR Description: CCT chaperonin gamma subunit
  misc_feature (1)..(483): NCBI GI NO: 6753320 NR Description: chaperonin subunit 3 (gamma) [Mus musculus]
  misc_feature (1)..(495): NCBI GI NO: 1079280 NR Description: chaperonin containing TCP-1 complex gamma chain -African clawed frog
  misc_feature (1)..(495): NCBI GI NO: 39850250 NR Description: Unknown (protein for MGC:76259)
  misc_feature (247)..(247): Xaa is any aa, unknown or other

SEQ ID NO: 39937 - DNA, 2889 bp, Zea mays subsp. mays
  misc_feature (1)..(2889): Ceres Seq. ID no. 12435287
  misc_feature (1185)..(1185): n is a, c, t, g, unknown, or other
gcacgagaccattacctagaacatcctaatcgaaaagcgattaatcaactccgccacgaccaacacgtacgtaaccagcggcggttcggcagcatgcggcgacgacggtgtccgctcctcgccgccgtcctcttcctcctccccctcttccaccgccaccacgccgccagcggcaccgacacggacacggtcacgctggccgcgccgctcatggggaaccggacgctggtgtccgccggcagcgccaagtacgtgctgggcttcttcgcgccggacccggacgccacgggatcaggacgggcgtacctcgggatatggttcaacggcatccccgcgcggaccgtcgtgtgggtggccaaccgcgagagccccgtcctgggcagcgtgggcgccgccgcgctcagggtcctcgccaacgggagcctggccatcgtcgtcgtggacgagaccgactacgaccacgaccagcagcccgtggtctgggcgacgccgccgccggccacgtccagcggcagcaacgccaccgcgcagctcctggacaacggcaacctcgtgctgcgggtcccgggcgccggcgtggtgtggcagagcttcgaccaccccacggacacgctcctgccgggcatgaagctgggcatcgacttccgcacggggctggaccggcgcatggtctcgtggcgcgccgcgggggacccgtcaccgggggagtactcgttccgcctggacccgagcggctcgccggagctcttcctctaccgcgggtccgcgcgcgtctacggcagcgggccctggaacggctaccagttcacgggcgtgcccaacctcaagtccaacagcctcctcaccttccgcttcgtctccgccgcggacgaggcctactacagctacggcgtggtcgacagcgccgccgtgctcacgcgcttcgtcctagactcgtcggggcagatccagcgcctcatgtggattgacatgacccgctcctggagcctcttctggtcctacccgctcgacgagtgcgacggctaccgcgcctgcgggccctacggcgtgtgcagcgtcgagcgcagccccatctgcggctgcgcgccgggcttcgacccgcgcttccccaaggagtgggcgctcagggacggctccggcgggtgcaggcgccgcacggacctcgcctgcgccggcgacggcttngccgcgctcaccaacatgaagctgccggagtcggccaacgccaccgtcgacatgtccctcaccctcgaccagtgccgagaggcctgcctcaggaactgcgcgtgccgggcctacgccggcgccaatgtcagcgcgccgggggccaccggctgcttcctgtggaccggcgacctcctcgacatgaggcagttcggcaaaggcgggcagaatctcttcgtccggctcgcggcgtccgacctacctctcagcagctcttcgccagcagacacggacgggcgaaccaagaggctcgtcgagatcatcgtcccgtcggttgccgcaccggcgctgctgctgctggccggactctgcatctgcgccgtgaggacgagaaggcgtaggacgaaggagaaggaggccatccccctggcgctgctgagagacgcgcagaggcagagcgcaccgttcggccgaaggaaccagattgccgcgtccaccgacgcgcaggacgagtccctgcacgacggccagcagggcggcagccaggactgcgacctgccgtcgttcgacgtcgagacgatccaggccgccacgggcaacttctcggctcacagcaagatcggccagggcgggttcgggcccgtctacatggggaagctggacagcgggcaggacatcgccgtgaaaaggctgtcgcggcggtccacgcaggggctccgggagttcaagaacgaggtgaagctgatagccaagctgcagcacaggaacctcgtcaggctcctcggctgctgcatcgacgggtcggagaggatgctggtctacgagtacatgcacaaccggagcctcaacaccttcctcttcaatgaggagaagcagccgatgctgagctgggagaaacggttcagcatcatcaacggcatcgcgaggggcatactgtacctgcaccaggattcggcgctgaggatcatccacagggacctcaaggccagcaacattctgctcgacaaggacatgaaccccaagatctccgacttcggtgtcgccaggatattcgggaccgaccagacggccgcgtacaccaagaaagtagtcggaacatatgggtatatgtctcctgagtacgccatggacggagtcttctccaccaagtccgacgtgttcagcttcggcgttctggtgctcgagatcgtcagcgggaagaagaacagagggttctaccacaccgagcttgacctcaacctcctaagatatgcgtggaggctgtggaaggacggcgagagcctggagttcatggaccagtccatcgcggacacgtccaacgcggcggaggtgctcaagtgcatccagatcgggctgctgtgcgtgcaggagcagccgaagcgccggcccaccatgtcggcggtgaccacgatgctcacctgcgagaaccccacgctgccggagccatgcgagccggcgttcagcacggggaggaaccacgacgacgacgacgaggacccggaggcgaaggcctgccggtctaacagcgccagcagctggacttgcaccgtcgtcgagggtagatgagatagattactgactgtttctgctgcgatgtgtactgtaaatatcaaagcatttttaacttcaacagcagtgagattaattcaattgaatttacctaaacattgaacagcagtgggcctcgtcaatgatggtccagataattcatattgcttttttcgc

SEQ ID NO: 39938 - protein, 909 aa, Zea mays subsp. mays
  peptide (1)..(909): Ceres Seq. ID no. 12435288
  misc_feature (39)..(561): NCBI GI NO: 16040952 NR Description: receptor kinase 5 [Brassica rapa]
  misc_feature (484)..(909): NCBI GI NO: 16040952 NR Description: receptor kinase 5 [Brassica rapa]
  misc_feature (45)..(523): NCBI GI NO: 15234427 NR Description: receptor-like serine/threonine protein kinase ARK3
  misc_feature (484)..(909): NCBI GI NO: 15234427 NR Description: receptor-like serine/threonine protein kinase ARK3
  misc_feature (39)..(540): NCBI GI NO: 7434413 NR Description: receptor-like kinase (EC 2
  misc_feature (484)..(909): NCBI GI NO: 7434413 NR Description: receptor-like kinase (EC 2
  misc_feature (37)..(540): NCBI GI NO: 2181188 NR Description: serine /threonine kinase [Brassica oleracea]
  misc_feature (45)..(523): NCBI GI NO: 913141 NR Description: ARK3 product/receptor-like serine/threonine proteinkinase ARK3
  misc_feature (484)..(909): NCBI GI NO: 913141 NR Description: ARK3 product/receptor-like serine/threonine proteinkinase ARK3
  misc_feature (484)..(909): NCBI GI NO: 2181188 NR Description: serine /threonine kinase [Brassica oleracea]
  misc_feature (395)..(395): Xaa is any aa, unknown or other
ARDHYLEHPNRKAINQLRHDQHVRNQRRFGSMRRRRCPLLAAVLFLLPLFHRHHAASGTDTDTVTLAAPLMGNRTLVSAGSAKYVLGFFAPDPDATGSGRAYLGIWFNGIPARTVVWVANRESPVLGSVGAAALRVLANGSLAIVVVDETDYDHDQQPVVWATPPPATSSGSNATAQLLDNGNLVLRVPGAGVVWQSFDHPTDTLLPGMKLGIDFRTGLDRRMVSWRAAGDPSPGEYSFRLDPSGSPELFLYRGSARVYGSGPWNGYQFTGVPNLKSNSLLTFRFVSAADEAYYSYGVVDSAAVLTRFVLDSSGQIQRLMWIDMTRSWSLFWSYPLDECDGYRACGPYGVCSVERSPICGCAPGFDPRFPKEWALRDGSGGCRRRTDLACAGDGXAALTNMKLPESANATVDMSLTLDQCREACLRNCACRAYAGANVSAPGATGCFLWTGDLLDMRQFGKGGQNLFVRLAASDLPLSSSSPADTDGRTKRLVEIIVPSVAAPALLLLAGLCICAVRTRRRRTKEKEAIPLALLRDAQRQSAPFGRRNQIAASTDAQDESLHDGQQGGSQDCDLPSFDVETIQAATGNFSAHSKIGQGGFGPVYMGKLDSGQDIAVKRLSRRSTQGLREFKNEVKLIAKLQHRNLVRLLGCCIDGSERMLVYEYMHNRSLNTFLFNEEKQPMLSWEKRFSIINGIARGILYLHQDSALRIIHRDLKASNILLDKDMNPKISDFGVARIFGTDQTAAYTKKVVGTYGYMSPEYAMDGVFSTKSDVFSFGVLVLEIVSGKKNRGFYHTELDLNLLRYAWRLWKDGESLEFMDQSIADTSNAAEVLKCIQIGLLCVQEQPKRRPTMSAVTTMLTCENPTLPEPCEPAFSTGRNHDDDDEDPEAKACRSNSASSWTCTVVEGR

SEQ ID NO: 39939 - protein, 878 aa, Zea mays subsp. mays
  peptide (1)..(878): Ceres Seq. ID no. 12435289
  misc_feature (8)..(530): NCBI GI NO: 16040952 NR Description: receptor kinase 5 [Brassica rapa]
  misc_feature (453)..(878): NCBI GI NO: 16040952 NR Description: receptor kinase 5 [Brassica rapa]
  misc_feature (14)..(492): NCBI GI NO: 15234427 NR Description: receptor-like serine/threonine protein kinase ARK3
  misc_feature (453)..(878): NCBI GI NO: 15234427 NR Description: receptor-like serine/threonine protein kinase ARK3
  misc_feature (8)..(509): NCBI GI NO: 7434413 NR Description: receptor-like kinase (EC 2
  misc_feature (453)..(878): NCBI GI NO: 7434413 NR Description: receptor-like kinase (EC 2
  misc_feature (6)..(509): NCBI GI NO: 2181188 NR Description: serine /threonine kinase [Brassica oleracea]
  misc_feature (14)..(492): NCBI GI NO: 913141 NR Description: ARK3 product/receptor-like serine/threonine proteinkinase ARK3
  misc_feature (453)..(878): NCBI GI NO: 913141 NR Description: ARK3 product/receptor-like serine/threonine proteinkinase ARK3
  misc_feature (453)..(878): NCBI GI NO: 2181188 NR Description: serine /threonine kinase [Brassica oleracea]
  misc_feature (364)..(364): Xaa is any aa, unknown or other
MRRRRCPLLAAVLFLLPLFHRHHAASGTDTDTVTLAAPLMGNRTLVSAGSAKYVLGFFAPDPDATGSGRAYLGIWFNGIPARTVVWVANRESPVLGSVGAAALRVLANGSLAIVVVDETDYDHDQQPVVWATPPPATSSGSNATAQLLDNGNLVLRVPGAGVVWQSFDHPTDTLLPGMKLGIDFRTGLDRRMVSWRAAGDPSPGEYSFRLDPSGSPELFLYRGSARVYGSGPWNGYQFTGVPNLKSNSLLTFRFVSAADEAYYSYGVVDSAAVLTRFVLDSSGQIQRLMWIDMTRSWSLFWSYPLDECDGYRACGPYGVCSVERSPICGCAPGFDPRFPKEWALRDGSGGCRRRTDLACAGDGXAALTNMKLPESANATVDMSLTLDQCREACLRNCACRAYAGANVSAPGATGCFLWTGDLLDMRQFGKGGQNLFVRLAASDLPLSSSSPADTDGRTKRLVEIIVPSVAAPALLLLAGLCICAVRTRRRRTKEKEAIPLALLRDAQRQSAPFGRRNQIAASTDAQDESLHDGQQGGSQDCDLPSFDVETIQAATGNFSAHSKIGQGGFGPVYMGKLDSGQDIAVKRLSRRSTQGLREFKNEVKLIAKLQHRNLVRLLGCCIDGSERMLVYEYMHNRSLNTFLFNEEKQPMLSWEKRFSIINGIARGILYLHQDSALRIIHRDLKASNILLDKDMNPKISDFGVARIFGTDQTAAYTKKVVGTYGYMSPEYAMDGVFSTKSDVFSFGVLVLEIVSGKKNRGFYHTELDLNLLRYAWRLWKDGESLEFMDQSIADTSNAAEVLKCIQIGLLCVQEQPKRRPTMSAVTTMLTCENPTLPEPCEPAFSTGRNHDDDDEDPEAKACRSNSASSWTCTVVEGR

SEQ ID NO: 39940 - protein, 839 aa, Zea mays subsp. mays
  peptide (1)..(839): Ceres Seq. ID no. 12435290
  misc_feature (1)..(491): NCBI GI NO: 16040952 NR Description: receptor kinase 5 [Brassica rapa]
  misc_feature (414)..(839): NCBI GI NO: 16040952 NR Description: receptor kinase 5 [Brassica rapa]
  misc_feature (1)..(453): NCBI GI NO: 15234427 NR Description: receptor-like serine/threonine protein kinase ARK3
  misc_feature (414)..(839): NCBI GI NO: 15234427 NR Description: receptor-like serine/threonine protein kinase ARK3
  misc_feature (1)..(470): NCBI GI NO: 7434413 NR Description: receptor-like kinase (EC 2
  misc_feature (414)..(839): NCBI GI NO: 7434413 NR Description: receptor-like kinase (EC 2
  misc_feature (1)..(470): NCBI GI NO: 2181188 NR Description: serine /threonine kinase [Brassica oleracea]
  misc_feature (1)..(453): NCBI GI NO: 913141 NR Description: ARK3 product/receptor-like serine/threonine proteinkinase ARK3
  misc_feature (414)..(839): NCBI GI NO: 913141 NR Description: ARK3 product/receptor-like serine/threonine proteinkinase ARK3
  misc_feature (414)..(839): NCBI GI NO: 2181188 NR Description: serine /threonine kinase [Brassica oleracea]
  misc_feature (325)..(325): Xaa is any aa, unknown or other
MGNRTLVSAGSAKYVLGFFAPDPDATGSGRAYLGIWFNGIPARTVVWVANRESPVLGSVGAAALRVLANGSLAIVVVDETDYDHDQQPVVWATPPPATSSGSNATAQLLDNGNLVLRVPGAGVVWQSFDHPTDTLLPGMKLGIDFRTGLDRRMVSWRAAGDPSPGEYSFRLDPSGSPELFLYRGSARVYGSGPWNGYQFTGVPNLKSNSLLTFRFVSAADEAYYSYGVVDSAAVLTRFVLDSSGQIQRLMWIDMTRSWSLFWSYPLDECDGYRACGPYGVCSVERSPICGCAPGFDPRFPKEWALRDGSGGCRRRTDLACAGDGXAALTNMKLPESANATVDMSLTLDQCREACLRNCACRAYAGANVSAPGATGCFLWTGDLLDMRQFGKGGQNLFVRLAASDLPLSSSSPADTDGRTKRLVEIIVPSVAAPALLLLAGLCICAVRTRRRRTKEKEAIPLALLRDAQRQSAPFGRRNQIAASTDAQDESLHDGQQGGSQDCDLPSFDVETIQAATGNFSAHSKIGQGGFGPVYMGKLDSGQDIAVKRLSRRSTQGLREFKNEVKLIAKLQHRNLVRLLGCCIDGSERMLVYEYMHNRSLNTFLFNEEKQPMLSWEKRFSIINGIARGILYLHQDSALRIIHRDLKASNILLDKDMNPKISDFGVARIFGTDQTAAYTKKVVGTYGYMSPEYAMDGVFSTKSDVFSFGVLVLEIVSGKKNRGFYHTELDLNLLRYAWRLWKDGESLEFMDQSIADTSNAAEVLKCIQIGLLCVQEQPKRRPTMSAVTTMLTCENPTLPEPCEPAFSTGRNHDDDDEDPEAKACRSNSASSWTCTVVEGR

SEQ ID NO: 39941 - DNA, 2442 bp, Zea mays subsp. mays
  misc_feature (1)..(2442): Ceres Seq. ID no. 13589290
actttcgcaagcccccttccgaccttgcccctgcggtctcccgagtcccgaagcatccccttccaaaaccctcgccgcgccgcagccacccttgcttccgcacgctatcgcccgggaccagccatctatggcggcgtccctgctcctccgcgccgtgcgccgaagggagcttgcgtcccctctcggatccctgggtgccagcatacagtcaacatgtgttgccaacatatgctcaaaatggggaaggtttgcaagacctttcagtgcaaaagctgctggaaatgaggttattgggattgatttggggacaacgaactcatgtgtttctgttatggagggaaagaacccaaaagttattgagaatgctgaaggtgcgagaacaacaccatctgttgtcgcatttactcagaagggtgaaagacttgttggaactccagccaagcgccaggcagtaaccaacccccagaatactttctttggaacaaagaggttaattgggcgacgctttgatgatccacagacacagaaagagatgaagatggtgccatacacaatcgtgaaggctccaaatggtgatgcttgggttcaaacaacagatggcaagcagtactcaccaagtcaggtcggtgcatttgtgctgaccaagatgaaggagacagctgaatcttaccttggcaagtctatctcaaaggcagtgattactgttccagcttatttcaatgacgctcagcgtcaggccacaaaggatgcaggccgcattgctggccttgatgttgaaaggatcatcaatgaacctacagcagccgctctgtcttatggaatgaacaacaaggaaggcttgatagcggtatttgatcttggaggaggaacttttgatatctctattctggagatctcaaatggagtttttgaggtcaaagcaacaaatggtgatactttcttgggtggtgaagattttgataatacactattggagttcttggtgagtgatttcaagaaaactgagggcatagatctgtcgaaagatagattggccctgcaaaggcttcgtgaagctgctgagaaggcaaaggttgaactttcgtcgacttctcagacagaaatcaatctgccattcataacagctgatgcttcaggggcaaaacatttgaacatcacactgacaaggtcaaaatttgaatctcttgtacacgatctgattgagagaactagagatccatgcaagaactgtttgaaggatgccggaatatctactaaagaggtggatgaagtacttcttgttggtggaatgactagggttccaaaggtgcaggaggtagtctctgaaatctttgggaagaacccaagcaaaggagtcaatccagatgaagctgtggccatgggtgctgcacttcagggtggcattctccgtggagatgttaaggagcttcttcttcttgatgttactcccctgtcactaggtattgagacgctcggtggtatcttcaccagattgatcaacagaaacactacaatccccacaaagaaaagtcaggtgttctcaactgctgctgacaaccagacccaagtgggtatccgggtgttgcaaggtgagcgtgaaatggctacagacaacaagctccttggtgaatttgacctcgtgggcattccacctgccccaagaggcttgcctcagattgaggttacattcgacatcgatgccaatggaattgtgaccgtctcagccaaagataaggctaccgggaaggagcagaacatcaccatacgatcctcgggtgggctgtcagaggctgacatccagaagatggtgcaagaagctgagctgcatgcccagaaggaccaggagcggaaagccctcattgacatcaggaacaatgccgacaccactatctacagcatcgagaagagtcttggagagtacagggacaagatcccggcagaggttgcatctgagatcgaggcagccatcgctgacctccgccaggagatggcctcggatgacattgagaagatcaaggccaagcttgaggctgccaacaaggctgtctcgaagattggacagcacatgtctggtggtggctctggcggctcgcagtcaggatctggacctcagggtggcggcgaccaggcgccggaggcagagtatgaggaggttaagaagtgaggctgcgggagttcaagggaattgtagcggcttgtttagaagtagctcgtttttttttttgggaacgcagatagtcagatgtctcagatgaggtgtaacctgtgttgcaataatctatgaacttacccctcttgttttctcctgcagtgaaacaggtcacacgacattgtcatggcttttattgcatatgaagccttgttctgcccgatgtactcgcacagcgaaaaccatcggcgagttctgttaatggattgaagtatatttgttcctgtgttttg

SEQ ID NO: 39942 - protein, 720 aa, Zea mays subsp. mays
  peptide (1)..(720): Ceres Seq. ID no. 13589291
  misc_feature (96)..(691): Pfam Name: Pfam Description:  Hsp70 protein
  misc_feature (43)..(720): NCBI GI NO: 399940 NR Description: HEAT SHOCK 70 KD PROTEIN, MITOCHONDRIAL PRECURSOR
  misc_feature (43)..(720): NCBI GI NO: 15242459 NR Description: heat shock protein mtHsc70-2 (Hsc70-5)
  misc_feature (43)..(720): NCBI GI NO: 7441844 NR Description: dnaK-type molecular chaperone PHSP1 precursor
  misc_feature (43)..(720): NCBI GI NO: 585272 NR Description: HEAT SHOCK 70 KD PROTEIN, MITOCHONDRIAL PRECURSOR
  misc_feature (45)..(720): NCBI GI NO: 7441879 NR Description: dnaK-type molecular chaperone HSC70-11
  misc_feature (45)..(720): NCBI GI NO: 7441881 NR Description: dnaK-type molecular chaperone HSC70-10
  misc_feature (43)..(720): NCBI GI NO: 585273 NR Description: Heat shock 70 kDa protein, mitochondrial precursor
  misc_feature (43)..(717): NCBI GI NO: 30691626 NR Description: heat shock protein mtHsc70-1
  misc_feature (67)..(717): NCBI GI NO: 7441874 NR Description: dnaK-type molecular chaperone F20D10
  misc_feature (95)..(717): NCBI GI NO: 23475140 NR Description: hypothetical protein
LSQAPFRPCPCGLPSPEASPSKTLAAPQPPLLPHAIARDQPSMAASLLLRAVRRRELASPLGSLGASIQSTCVANICSKWGRFARPFSAKAAGNEVIGIDLGTTNSCVSVMEGKNPKVIENAEGARTTPSVVAFTQKGERLVGTPAKRQAVTNPQNTFFGTKRLIGRRFDDPQTQKEMKMVPYTIVKAPNGDAWVQTTDGKQYSPSQVGAFVLTKMKETAESYLGKSISKAVITVPAYFNDAQRQATKDAGRIAGLDVERIINEPTAAALSYGMNNKEGLIAVFDLGGGTFDISILEISNGVFEVKATNGDTFLGGEDFDNTLLEFLVSDFKKTEGIDLSKDRLALQRLREAAEKAKVELSSTSQTEINLPFITADASGAKHLNITLTRSKFESLVHDLIERTRDPCKNCLKDAGISTKEVDEVLLVGGMTRVPKVQEVVSEIFGKNPSKGVNPDEAVAMGAALQGGILRGDVKELLLLDVTPLSLGIETLGGIFTRLINRNTTIPTKKSQVFSTAADNQTQVGIRVLQGEREMATDNKLLGEFDLVGIPPAPRGLPQIEVTFDIDANGIVTVSAKDKATGKEQNITIRSSGGLSEADIQKMVQEAELHAQKDQERKALIDIRNNADTTIYSIEKSLGEYRDKIPAEVASEIEAAIADLRQEMASDDIEKIKAKLEAANKAVSKIGQHMSGGGSGGSQSGSGPQGGGDQAPEAEYEEVKK

SEQ ID NO: 39943 - protein, 678 aa, Zea mays subsp. mays
  peptide (1)..(678): Ceres Seq. ID no. 13589292
  misc_feature (54)..(649): Pfam Name: Pfam Description:  Hsp70 protein
  misc_feature (1)..(678): NCBI GI NO: 399940 NR Description: HEAT SHOCK 70 KD PROTEIN, MITOCHONDRIAL PRECURSOR
  misc_feature (1)..(678): NCBI GI NO: 15242459 NR Description: heat shock protein mtHsc70-2 (Hsc70-5)
  misc_feature (1)..(678): NCBI GI NO: 7441844 NR Description: dnaK-type molecular chaperone PHSP1 precursor
  misc_feature (1)..(678): NCBI GI NO: 585272 NR Description: HEAT SHOCK 70 KD PROTEIN, MITOCHONDRIAL PRECURSOR
  misc_feature (3)..(678): NCBI GI NO: 7441879 NR Description: dnaK-type molecular chaperone HSC70-11
  misc_feature (3)..(678): NCBI GI NO: 7441881 NR Description: dnaK-type molecular chaperone HSC70-10
  misc_feature (1)..(678): NCBI GI NO: 585273 NR Description: Heat shock 70 kDa protein, mitochondrial precursor
  misc_feature (1)..(675): NCBI GI NO: 30691626 NR Description: heat shock protein mtHsc70-1
  misc_feature (25)..(675): NCBI GI NO: 7441874 NR Description: dnaK-type molecular chaperone F20D10
  misc_feature (53)..(675): NCBI GI NO: 23475140 NR Description: hypothetical protein
MAASLLLRAVRRRELASPLGSLGASIQSTCVANICSKWGRFARPFSAKAAGNEVIGIDLGTTNSCVSVMEGKNPKVIENAEGARTTPSVVAFTQKGERLVGTPAKRQAVTNPQNTFFGTKRLIGRRFDDPQTQKEMKMVPYTIVKAPNGDAWVQTTDGKQYSPSQVGAFVLTKMKETAESYLGKSISKAVITVPAYFNDAQRQATKDAGRIAGLDVERIINEPTAAALSYGMNNKEGLIAVFDLGGGTFDISILEISNGVFEVKATNGDTFLGGEDFDNTLLEFLVSDFKKTEGIDLSKDRLALQRLREAAEKAKVELSSTSQTEINLPFITADASGAKHLNITLTRSKFESLVHDLIERTRDPCKNCLKDAGISTKEVDEVLLVGGMTRVPKVQEVVSEIFGKNPSKGVNPDEAVAMGAALQGGILRGDVKELLLLDVTPLSLGIETLGGIFTRLINRNTTIPTKKSQVFSTAADNQTQVGIRVLQGEREMATDNKLLGEFDLVGIPPAPRGLPQIEVTFDIDANGIVTVSAKDKATGKEQNITIRSSGGLSEADIQKMVQEAELHAQKDQERKALIDIRNNADTTIYSIEKSLGEYRDKIPAEVASEIEAAIADLRQEMASDDIEKIKAKLEAANKAVSKIGQHMSGGGSGGSQSGSGPQGGGDQAPEAEYEEVKK

SEQ ID NO: 39944 - protein, 610 aa, Zea mays subsp. mays
  peptide (1)..(610): Ceres Seq. ID no. 13589293
  misc_feature (1)..(581): Pfam Name: Pfam Description:  Hsp70 protein
  misc_feature (1)..(610): NCBI GI NO: 399940 NR Description: HEAT SHOCK 70 KD PROTEIN, MITOCHONDRIAL PRECURSOR
  misc_feature (1)..(610): NCBI GI NO: 15242459 NR Description: heat shock protein mtHsc70-2 (Hsc70-5)
  misc_feature (1)..(610): NCBI GI NO: 7441844 NR Description: dnaK-type molecular chaperone PHSP1 precursor
  misc_feature (1)..(610): NCBI GI NO: 585272 NR Description: HEAT SHOCK 70 KD PROTEIN, MITOCHONDRIAL PRECURSOR
  misc_feature (1)..(610): NCBI GI NO: 7441879 NR Description: dnaK-type molecular chaperone HSC70-11
  misc_feature (1)..(610): NCBI GI NO: 7441881 NR Description: dnaK-type molecular chaperone HSC70-10
  misc_feature (1)..(610): NCBI GI NO: 585273 NR Description: Heat shock 70 kDa protein, mitochondrial precursor
  misc_feature (1)..(607): NCBI GI NO: 30691626 NR Description: heat shock protein mtHsc70-1
  misc_feature (1)..(607): NCBI GI NO: 7441874 NR Description: dnaK-type molecular chaperone F20D10
  misc_feature (1)..(607): NCBI GI NO: 23475140 NR Description: hypothetical protein
MEGKNPKVIENAEGARTTPSVVAFTQKGERLVGTPAKRQAVTNPQNTFFGTKRLIGRRFDDPQTQKEMKMVPYTIVKAPNGDAWVQTTDGKQYSPSQVGAFVLTKMKETAESYLGKSISKAVITVPAYFNDAQRQATKDAGRIAGLDVERIINEPTAAALSYGMNNKEGLIAVFDLGGGTFDISILEISNGVFEVKATNGDTFLGGEDFDNTLLEFLVSDFKKTEGIDLSKDRLALQRLREAAEKAKVELSSTSQTEINLPFITADASGAKHLNITLTRSKFESLVHDLIERTRDPCKNCLKDAGISTKEVDEVLLVGGMTRVPKVQEVVSEIFGKNPSKGVNPDEAVAMGAALQGGILRGDVKELLLLDVTPLSLGIETLGGIFTRLINRNTTIPTKKSQVFSTAADNQTQVGIRVLQGEREMATDNKLLGEFDLVGIPPAPRGLPQIEVTFDIDANGIVTVSAKDKATGKEQNITIRSSGGLSEADIQKMVQEAELHAQKDQERKALIDIRNNADTTIYSIEKSLGEYRDKIPAEVASEIEAAIADLRQEMASDDIEKIKAKLEAANKAVSKIGQHMSGGGSGGSQSGSGPQGGGDQAPEAEYEEVKK

SEQ ID NO: 39945 - DNA, 1114 bp, Zea mays subsp. mays
  misc_feature (1)..(1114): Ceres Seq. ID no. 12350235
aacgctcaggcacactgtgcaggtgacggcgaaccaggtaaccagctgccgagggaggaaccctagcggaacactgtgcaggtgacggcggcgcgctaccggtgacgggggatacggcggcatcgtccccctcggcccctcctccatccccggcgtggcggcgcaggcagccagcctgcagggttttctgactcagattacttgttcactgtggggtgcaagcttaatcggccaccatggatgttgataagcaagaaacaatggaggagaccatccttgttggtgatgatctcatgcgtgggccgccatcccctgtcataccgaaagagatcgcatcacatgtccttgaagatgttgagctttgtgatggtatactcaagaaccttttcttatgcctacagatcaatgatattgagccattctgccaagatgaaattgtgctatatcgacagtgtgctgagaaaagggacaaggaaataagagagcggatgcaaaatagtgaatataaattgggtttttcgatgcccctgaaacaagcgaaggagagagctactcaactccaatcagaagtaacactgctagaaaggcgcatgattcttgctagtggacttgagggtatggaaggatttcgccagagatggagcttgcacggacagcttgaagacacaaggaaaaggctagaagcactgaaccatggcatggaaaaacgagagaaccaaagttctacggcggagaggacaaaatctccagctgggaagaagtggttcttttggtagtacgtgttgtgtgcaatatgcaaactccaacgatggtccagctgtgtggtccaaatgggatgacttgttaggcaagttgcattctaagcggctaagcctgaagcaatgtgatagcagctaacaaagctacaatttgtttgcaacatgtacctctagggtctactccccctaaagtttgtgccatactcatgtgtttccatttgcatctggtcctctttggatgcaaagtagcattggataaagctagggttttgtaaaatatgtttgttttttaaaaagcgacgaactctgtttggatatgacaaatcttggtagtttataaaagccatggttttatt

SEQ ID NO: 39946 - protein, 179 aa, Zea mays subsp. mays
  peptide (1)..(179): Ceres Seq. ID no. 12350236
  misc_feature (9)..(179): NCBI GI NO: 21741739 NR Description: OSJNBa0073L04.19
  misc_feature (9)..(143): NCBI GI NO: 15233419 NR Description: hypothetical protein; protein id: At4g04190.1
  misc_feature (128)..(166): NCBI GI NO: 34906406 NR Description: P0710E05.16
MDVDKQETMEETILVGDDLMRGPPSPVIPKEIASHVLEDVELCDGILKNLFLCLQINDIEPFCQDEIVLYRQCAEKRDKEIRERMQNSEYKLGFSMPLKQAKERATQLQSEVTLLERRMILASGLEGMEGFRQRWSLHGQLEDTRKRLEALNHGMEKRENQSSTAERTKSPAGKKWFFW

SEQ ID NO: 39947 - protein, 171 aa, Zea mays subsp. mays
  peptide (1)..(171): Ceres Seq. ID no. 12350237
  misc_feature (1)..(171): NCBI GI NO: 21741739 NR Description: OSJNBa0073L04.19
  misc_feature (1)..(135): NCBI GI NO: 15233419 NR Description: hypothetical protein; protein id: At4g04190.1
  misc_feature (120)..(158): NCBI GI NO: 34906406 NR Description: P0710E05.16
MEETILVGDDLMRGPPSPVIPKEIASHVLEDVELCDGILKNLFLCLQINDIEPFCQDEIVLYRQCAEKRDKEIRERMQNSEYKLGFSMPLKQAKERATQLQSEVTLLERRMILASGLEGMEGFRQRWSLHGQLEDTRKRLEALNHGMEKRENQSSTAERTKSPAGKKWFFW

SEQ ID NO: 39948 - protein, 160 aa, Zea mays subsp. mays
  peptide (1)..(160): Ceres Seq. ID no. 12350238
  misc_feature (1)..(160): NCBI GI NO: 21741739 NR Description: OSJNBa0073L04.19
  misc_feature (1)..(124): NCBI GI NO: 15233419 NR Description: hypothetical protein; protein id: At4g04190.1
  misc_feature (109)..(147): NCBI GI NO: 34906406 NR Description: P0710E05.16
MRGPPSPVIPKEIASHVLEDVELCDGILKNLFLCLQINDIEPFCQDEIVLYRQCAEKRDKEIRERMQNSEYKLGFSMPLKQAKERATQLQSEVTLLERRMILASGLEGMEGFRQRWSLHGQLEDTRKRLEALNHGMEKRENQSSTAERTKSPAGKKWFFW

SEQ ID NO: 39949 - DNA, 1069 bp, Zea mays subsp. mays
  misc_feature (1)..(1069): Ceres Seq. ID no. 12383353
  misc_feature (1060)..(1060): n is a, c, t, g, unknown, or other
gcacgagaccattacctagaacatcctaatcaaaaaaagacggttcgagtccgttctagaatctagacacggcaatgaagcccaggcctctcggttgcggttgcggttgcgtcccggcggcggtagggtgcgtcggctgggcatggaggccgactccgaggccgcgcgggggagggagggcagcaggggtgtcgcccaagtgctcgcactcggcggcggcggcgggagcggtacagtcggaggaccgccgccgcgaggtgctgtaccgcccggtggagctgcccgggacggggtacgggtcggagctggaggcgcggatcgagaaggtcatctacgcctgccgcttcatgaccttcttcggaatttgtggcttgctcctcggctctgtcccatgcttcctcaagggatgcgttttcgtgatggatgccttcgtcgagtactaccggcacggcggagggaaggtcatcctcctgctggtggaagccattgagatgtttctcattgcaacggtcacgtttgtcttggggacgggcttgtacgagctcttcatcagtaacatggactccttttacgggtccaacctcttcggcctgttcagccttccggaacggcccaagtgggttgaaatcaagtcggtaaatgatctcaagacaaagctgggccatgtcattgtcatggttctgctggttggcatcttcgagaagagcaagagggtgaccatcacatcctgtgctgacctcttgtgctttgctggatcgattttcctgtcttcagtttgcctctacctgctttccaagctccataccaccaagggaggcagccaggcctgaaatgagagtgtttgtatgtaagtgatatgtcttgttctgttgctgtgcaacgcctgcctccggttctgttcgtgtagtaaataattaggcagtggggaggtaccgatttcccatgtactcatgttcatgtatggctagggagtttcagttaggcacaaaccaaactacattgagtatcatcctgtatgtgtagctcgatgtaatgcaatcaataactgatattctctttnagtaagctt

SEQ ID NO: 39950 - protein, 251 aa, Zea mays subsp. mays
  peptide (1)..(251): Ceres Seq. ID no. 12383354
  misc_feature (22)..(243): NCBI GI NO: 18415304 NR Description: putative protein; protein id: At4g19390
  misc_feature (22)..(243): NCBI GI NO: 15810053 NR Description: AT4g19390/T5K18_170 [Arabidopsis thaliana]
  misc_feature (22)..(243): NCBI GI NO: 7487716 NR Description: hypothetical protein T5K18
  misc_feature (70)..(243): NCBI GI NO: 34899026 NR Description: contains ESTsAU173916
  misc_feature (71)..(243): NCBI GI NO: 34395260 NR Description: unknown protein
  misc_feature (71)..(243): NCBI GI NO: 34899024 NR Description: hypothetical protein~similar to Arabidopsisthaliana chromosome 5
  misc_feature (65)..(243): NCBI GI NO: 15240692 NR Description: unknown protein; protein id: At5g13720
  misc_feature (65)..(243): NCBI GI NO: 20465418 NR Description: unknown protein [Arabidopsis thaliana]
  misc_feature (29)..(250): NCBI GI NO: 31126772 NR Description: unknown protein
  misc_feature (78)..(241): NCBI GI NO: 15792349 NR Description: putative integral membrane protein
MKPRPLGCGCGCVPAAVGCVGWAWRPTPRPRGGGRAAGVSPKCSHSAAAAGAVQSEDRRREVLYRPVELPGTGYGSELEARIEKVIYACRFMTFFGICGLLLGSVPCFLKGCVFVMDAFVEYYRHGGGKVILLLVEAIEMFLIATVTFVLGTGLYELFISNMDSFYGSNLFGLFSLPERPKWVEIKSVNDLKTKLGHVIVMVLLVGIFEKSKRVTITSCADLLCFAGSIFLSSVCLYLLSKLHTTKGGSQA

SEQ ID NO: 39951 - protein, 160 aa, Zea mays subsp. mays
  peptide (1)..(160): Ceres Seq. ID no. 12383355
  misc_feature (1)..(152): NCBI GI NO: 18415304 NR Description: putative protein; protein id: At4g19390
  misc_feature (1)..(152): NCBI GI NO: 15810053 NR Description: AT4g19390/T5K18_170 [Arabidopsis thaliana]
  misc_feature (1)..(152): NCBI GI NO: 7487716 NR Description: hypothetical protein T5K18
  misc_feature (1)..(152): NCBI GI NO: 34899026 NR Description: contains ESTsAU173916
  misc_feature (1)..(152): NCBI GI NO: 34395260 NR Description: unknown protein
  misc_feature (1)..(152): NCBI GI NO: 34899024 NR Description: hypothetical protein~similar to Arabidopsisthaliana chromosome 5
  misc_feature (1)..(152): NCBI GI NO: 15240692 NR Description: unknown protein; protein id: At5g13720
  misc_feature (1)..(152): NCBI GI NO: 20465418 NR Description: unknown protein [Arabidopsis thaliana]
  misc_feature (1)..(159): NCBI GI NO: 31126772 NR Description: unknown protein
  misc_feature (1)..(150): NCBI GI NO: 15792349 NR Description: putative integral membrane protein
MTFFGICGLLLGSVPCFLKGCVFVMDAFVEYYRHGGGKVILLLVEAIEMFLIATVTFVLGTGLYELFISNMDSFYGSNLFGLFSLPERPKWVEIKSVNDLKTKLGHVIVMVLLVGIFEKSKRVTITSCADLLCFAGSIFLSSVCLYLLSKLHTTKGGSQA

SEQ ID NO: 39952 - protein, 136 aa, Zea mays subsp. mays
  peptide (1)..(136): Ceres Seq. ID no. 12383356
  misc_feature (1)..(128): NCBI GI NO: 18415304 NR Description: putative protein; protein id: At4g19390
  misc_feature (1)..(128): NCBI GI NO: 15810053 NR Description: AT4g19390/T5K18_170 [Arabidopsis thaliana]
  misc_feature (1)..(128): NCBI GI NO: 7487716 NR Description: hypothetical protein T5K18
  misc_feature (1)..(128): NCBI GI NO: 34899026 NR Description: contains ESTsAU173916
  misc_feature (1)..(128): NCBI GI NO: 34395260 NR Description: unknown protein
  misc_feature (1)..(128): NCBI GI NO: 34899024 NR Description: hypothetical protein~similar to Arabidopsisthaliana chromosome 5
  misc_feature (1)..(128): NCBI GI NO: 15240692 NR Description: unknown protein; protein id: At5g13720
  misc_feature (1)..(128): NCBI GI NO: 20465418 NR Description: unknown protein [Arabidopsis thaliana]
  misc_feature (1)..(135): NCBI GI NO: 31126772 NR Description: unknown protein
  misc_feature (1)..(126): NCBI GI NO: 15792349 NR Description: putative integral membrane protein
MDAFVEYYRHGGGKVILLLVEAIEMFLIATVTFVLGTGLYELFISNMDSFYGSNLFGLFSLPERPKWVEIKSVNDLKTKLGHVIVMVLLVGIFEKSKRVTITSCADLLCFAGSIFLSSVCLYLLSKLHTTKGGSQA

SEQ ID NO: 39953 - DNA, 1005 bp, Zea mays subsp. mays; identical to SEQ ID NO: 23739
  misc_feature (1)..(1005): Ceres Seq. ID no. 13492805
  misc_feature (983)..(983): n is a, c, t, g, unknown, or other
  misc_feature (1000)..(1000): n is a, c, t, g, unknown, or other

SEQ ID NO: 39954 - protein, 284 aa, Zea mays subsp. mays; identical to SEQ ID NO: 23740
  peptide (1)..(284): Ceres Seq. ID no. 13492806
  misc_feature (203)..(273): Pfam Name: Pfam Description:  NifU-like domain
  misc_feature (17)..(284): NCBI GI NO: 34897632 NR Description: hypothetical protein [Oryza sativa]
  misc_feature (76)..(284): NCBI GI NO: 18402817 NR Description: expressed protein [Arabidopsis thaliana]
  misc_feature (46)..(284): NCBI GI NO: 25405462 NR Description: unknown protein, 90320-88994
  misc_feature (70)..(284): NCBI GI NO: 15223842 NR Description: expressed protein [Arabidopsis thaliana]
  misc_feature (87)..(281): NCBI GI NO: 26324295 NR Description: unnamed protein product [Mus musculus]
  misc_feature (85)..(283): NCBI GI NO: 37681825 NR Description: HIRA interacting protein 5 [Danio rerio]
  misc_feature (85)..(281): NCBI GI NO: 12834577 NR Description: unnamed protein product [Mus musculus]
  misc_feature (85)..(281): NCBI GI NO: 34500321 NR Description: NifU-like protein HIRIP5 [Mus musculus]
  misc_feature (87)..(281): NCBI GI NO: 9910264 NR Description: histone cell cycle regulation defective interacting protein 5
  misc_feature (85)..(281): NCBI GI NO: 34856373 NR Description: similar to HIRA-interacting protein 5 (mHIRIP5)

SEQ ID NO: 39955 - protein, 268 aa, Zea mays subsp. mays; identical to SEQ ID NO: 23741
  peptide (1)..(268): Ceres Seq. ID no. 13492807
  misc_feature (187)..(257): Pfam Name: Pfam Description:  NifU-like domain
  misc_feature (1)..(268): NCBI GI NO: 34897632 NR Description: hypothetical protein [Oryza sativa]
  misc_feature (60)..(268): NCBI GI NO: 18402817 NR Description: expressed protein [Arabidopsis thaliana]
  misc_feature (30)..(268): NCBI GI NO: 25405462 NR Description: unknown protein, 90320-88994
  misc_feature (54)..(268): NCBI GI NO: 15223842 NR Description: expressed protein [Arabidopsis thaliana]
  misc_feature (71)..(265): NCBI GI NO: 26324295 NR Description: unnamed protein product [Mus musculus]
  misc_feature (69)..(267): NCBI GI NO: 37681825 NR Description: HIRA interacting protein 5 [Danio rerio]
  misc_feature (69)..(265): NCBI GI NO: 12834577 NR Description: unnamed protein product [Mus musculus]
  misc_feature (69)..(265): NCBI GI NO: 34500321 NR Description: NifU-like protein HIRIP5 [Mus musculus]
  misc_feature (71)..(265): NCBI GI NO: 9910264 NR Description: histone cell cycle regulation defective interacting protein 5
  misc_feature (69)..(265): NCBI GI NO: 34856373 NR Description: similar to HIRA-interacting protein 5 (mHIRIP5)

SEQ ID NO: 39956 - protein, 198 aa, Zea mays subsp. mays; identical to SEQ ID NO: 23742
  peptide (1)..(198): Ceres Seq. ID no. 13492808
  misc_feature (117)..(187): Pfam Name: Pfam Description:  NifU-like domain
  misc_feature (1)..(198): NCBI GI NO: 34897632 NR Description: hypothetical protein [Oryza sativa]
  misc_feature (1)..(198): NCBI GI NO: 18402817 NR Description: expressed protein [Arabidopsis thaliana]
  misc_feature (1)..(198): NCBI GI NO: 25405462 NR Description: unknown protein, 90320-88994
  misc_feature (1)..(198): NCBI GI NO: 15223842 NR Description: expressed protein [Arabidopsis thaliana]
  misc_feature (1)..(195): NCBI GI NO: 26324295 NR Description: unnamed protein product [Mus musculus]
  misc_feature (1)..(197): NCBI GI NO: 37681825 NR Description: HIRA interacting protein 5 [Danio rerio]
  misc_feature (1)..(195): NCBI GI NO: 12834577 NR Description: unnamed protein product [Mus musculus]
  misc_feature (1)..(195): NCBI GI NO: 34500321 NR Description: NifU-like protein HIRIP5 [Mus musculus]
  misc_feature (1)..(195): NCBI GI NO: 9910264 NR Description: histone cell cycle regulation defective interacting protein 5
  misc_feature (1)..(195): NCBI GI NO: 34856373 NR Description: similar to HIRA-interacting protein 5 (mHIRIP5)

SEQ ID NO: 39957 - DNA, 2116 bp, Zea mays subsp. mays
  misc_feature (1)..(2116): Ceres Seq. ID no. 13566658
  misc_feature (1610)..(1610): n is a, c, t, g, unknown, or other
aacacaagaagaaactgacggaggagcggagcggagccgagccacggccagtgccaggagcgaaaataaaaaggggtaggagttcctcctccccaacctcacaagtaaagcagcagcagcagaccttcttgacctagcaagcaatggggccgccgttcctcgccgtcgccgtcatcgtcgccttcctggccgccgccgcgcaggccgccgaccccttcgccttcttcgactgggacgtctcctacatcaccgcctcccctctcggcgtcccgcagcaggtcattgcagtcaacaagcagttcccaggccctatcatgaacgtcactaccaactacaatgtggtcgtcaatgtgctcaacagcttagacgagcccctgctcatcacttgggatgggatccagcagcgcaagaattgctggcaggatggggttctcggcaccacctgccccataccgccaggttggaactggacctacaacttccaggtcaaggaccagattggcagcttcttctacttcccaccccttggtatgcagcgtgccgcgggggggttcggaggtatcactgtcaacaaccgcgcggtcatctcggtcccattcgacacgcccgatggggacatcacgctcttcatcggggactggtacaagatgaaccacacgcacctgaggaagatgctcgacgacggcaaggaactggggatgccagacggtgttttgatgaatggcaaggggccatataggtataatgactcgctagtgccagatggcattgagcacgagactatcaaagttgagccaggaaaaacataccgtttccgtgtccacaatgttggtgtctccacaagcttgaacttacggattcagaatcacaacatggcccttgttgaaacagaaggttcatacacgatgaagcagaattttactaatctcgacatccacgtgggccagtcttactcatttctggtcactatggatcagaacgcaagcagtgattattacatcgtggccagtgctaggtttgtgaacgaatcgctttggaccagagtcaccggtgttgcaattttgcaatattcaaattcaaagggaaaagcatctggtcctcttcctgatccaccaaatgatgagtatgacaaaactttttcaatgaaccaggcacgttccatcaggatgaacgtgagcactggtgctgctcgtccgaatcctcaaggatcatttcactatgggtctatcaatgtgagccaagtttacaagctgaggaatgaaccacctgttatcatcaatgggaagaaacggactacactgagtggtatctcttattccccacccgacactcctctaaggttggcagatctgtacgacaagaaggatgtctacacacttgacttccctacaatgccaattgatggaccgccagtgatcagaacatctgtcattaactccacatacaagaactttttggaaattgtatttcagaacaatgactcaactgtccagacctaccacattgatggatatgcattctgggttgtaggaatggactatggcgagtggactgagaatagccgtgggacttacaacaagtgggatggtgtttctcgttgcacgactcangtgtttccgggagcatggactgctgtgatgctgtcacttgacagcccaggattttggaatgtacggacagaaaacctggacacgtggtatctgggtcaggagacttacatcagggtggtggatccaaatggaggctataatgttactgagatggtggctccagacaacatgctctactgtggcctcctcaaggataaacagaaggctcagaagcctcatggttcgaggtcatcagcctctgcagcaaaactgaactatcatgtgctcgcggctttggtctctttggtggtagccttggtgttgggccattgacaagaactgcctccagcttgtggtcagctgctgtttgcaggttgattaggcgtttgacagaaatactgttagtaggtcagtcgaattcgtaggttccattcatgatttgtctggcaattgagaaaaaaaaatgctgtgccattgcgcatcttcgtccatcggaattgattaacatgctgaagaactgtgcagtt

SEQ ID NO: 39958 - protein, 592 aa, Zea mays subsp. mays
  peptide (1)..(592): Ceres Seq. ID no. 13566659
  misc_feature (7)..(588): NCBI GI NO: 34897712 NR Description: ESTs AU082304
  misc_feature (7)..(589): NCBI GI NO: 27817921 NR Description: putative pectinesterase
  misc_feature (21)..(592): NCBI GI NO: 15234551 NR Description: pectinesterase (pectin methylesterase) family
  misc_feature (1)..(341): NCBI GI NO: 37535902 NR Description: putative ascorbate oxidase
  misc_feature (326)..(590): NCBI GI NO: 37535902 NR Description: putative ascorbate oxidase
  misc_feature (13)..(589): NCBI GI NO: 22328918 NR Description: pectinesterase (pectin methylesterase) family
  misc_feature (5)..(588): NCBI GI NO: 15242108 NR Description: pectinesterase (pectin methylesterase) family
  misc_feature (13)..(557): NCBI GI NO: 7433000 NR Description: pollen-specific protein homolog F24A6
  misc_feature (8)..(490): NCBI GI NO: 34893990 NR Description: putative pollen-specific protein homolog
  misc_feature (490)..(557): NCBI GI NO: 34893990 NR Description: putative pollen-specific protein homolog
  misc_feature (489)..(489): Xaa is any aa, unknown or other
MGPPFLAVAVIVAFLAAAAQAADPFAFFDWDVSYITASPLGVPQQVIAVNKQFPGPIMNVTTNYNVVVNVLNSLDEPLLITWDGIQQRKNCWQDGVLGTTCPIPPGWNWTYNFQVKDQIGSFFYFPPLGMQRAAGGFGGITVNNRAVISVPFDTPDGDITLFIGDWYKMNHTHLRKMLDDGKELGMPDGVLMNGKGPYRYNDSLVPDGIEHETIKVEPGKTYRFRVHNVGVSTSLNLRIQNHNMALVETEGSYTMKQNFTNLDIHVGQSYSFLVTMDQNASSDYYIVASARFVNESLWTRVTGVAILQYSNSKGKASGPLPDPPNDEYDKTFSMNQARSIRMNVSTGAARPNPQGSFHYGSINVSQVYKLRNEPPVIINGKKRTTLSGISYSPPDTPLRLADLYDKKDVYTLDFPTMPIDGPPVIRTSVINSTYKNFLEIVFQNNDSTVQTYHIDGYAFWVVGMDYGEWTENSRGTYNKWDGVSRCTTXVFPGAWTAVMLSLDSPGFWNVRTENLDTWYLGQETYIRVVDPNGGYNVTEMVAPDNMLYCGLLKDKQKAQKPHGSRSSASAAKLNYHVLAALVSLVVALVLGH

SEQ ID NO: 39959 - protein, 535 aa, Zea mays subsp. mays
  peptide (1)..(535): Ceres Seq. ID no. 13566660
  misc_feature (1)..(531): NCBI GI NO: 34897712 NR Description: ESTs AU082304
  misc_feature (1)..(532): NCBI GI NO: 27817921 NR Description: putative pectinesterase
  misc_feature (1)..(535): NCBI GI NO: 15234551 NR Description: pectinesterase (pectin methylesterase) family
  misc_feature (1)..(284): NCBI GI NO: 37535902 NR Description: putative ascorbate oxidase
  misc_feature (269)..(533): NCBI GI NO: 37535902 NR Description: putative ascorbate oxidase
  misc_feature (1)..(532): NCBI GI NO: 22328918 NR Description: pectinesterase (pectin methylesterase) family
  misc_feature (1)..(531): NCBI GI NO: 15242108 NR Description: pectinesterase (pectin methylesterase) family
  misc_feature (1)..(500): NCBI GI NO: 7433000 NR Description: pollen-specific protein homolog F24A6
  misc_feature (1)..(433): NCBI GI NO: 34893990 NR Description: putative pollen-specific protein homolog
  misc_feature (433)..(500): NCBI GI NO: 34893990 NR Description: putative pollen-specific protein homolog
  misc_feature (432)..(432): Xaa is any aa, unknown or other
MNVTTNYNVVVNVLNSLDEPLLITWDGIQQRKNCWQDGVLGTTCPIPPGWNWTYNFQVKDQIGSFFYFPPLGMQRAAGGFGGITVNNRAVISVPFDTPDGDITLFIGDWYKMNHTHLRKMLDDGKELGMPDGVLMNGKGPYRYNDSLVPDGIEHETIKVEPGKTYRFRVHNVGVSTSLNLRIQNHNMALVETEGSYTMKQNFTNLDIHVGQSYSFLVTMDQNASSDYYIVASARFVNESLWTRVTGVAILQYSNSKGKASGPLPDPPNDEYDKTFSMNQARSIRMNVSTGAARPNPQGSFHYGSINVSQVYKLRNEPPVIINGKKRTTLSGISYSPPDTPLRLADLYDKKDVYTLDFPTMPIDGPPVIRTSVINSTYKNFLEIVFQNNDSTVQTYHIDGYAFWVVGMDYGEWTENSRGTYNKWDGVSRCTTXVFPGAWTAVMLSLDSPGFWNVRTENLDTWYLGQETYIRVVDPNGGYNVTEMVAPDNMLYCGLLKDKQKAQKPHGSRSSASAAKLNYHVLAALVSLVVALVLGH

SEQ ID NO: 39960 - protein, 463 aa, Zea mays subsp. mays
  peptide (1)..(463): Ceres Seq. ID no. 13566661
  misc_feature (1)..(459): NCBI GI NO: 34897712 NR Description: ESTs AU082304
  misc_feature (1)..(460): NCBI GI NO: 27817921 NR Description: putative pectinesterase
  misc_feature (1)..(463): NCBI GI NO: 15234551 NR Description: pectinesterase (pectin methylesterase) family
  misc_feature (1)..(212): NCBI GI NO: 37535902 NR Description: putative ascorbate oxidase
  misc_feature (197)..(461): NCBI GI NO: 37535902 NR Description: putative ascorbate oxidase
  misc_feature (1)..(460): NCBI GI NO: 22328918 NR Description: pectinesterase (pectin methylesterase) family
  misc_feature (1)..(459): NCBI GI NO: 15242108 NR Description: pectinesterase (pectin methylesterase) family
  misc_feature (1)..(428): NCBI GI NO: 7433000 NR Description: pollen-specific protein homolog F24A6
  misc_feature (1)..(361): NCBI GI NO: 34893990 NR Description: putative pollen-specific protein homolog
  misc_feature (361)..(428): NCBI GI NO: 34893990 NR Description: putative pollen-specific protein homolog
  misc_feature (360)..(360): Xaa is any aa, unknown or other
MQRAAGGFGGITVNNRAVISVPFDTPDGDITLFIGDWYKMNHTHLRKMLDDGKELGMPDGVLMNGKGPYRYNDSLVPDGIEHETIKVEPGKTYRFRVHNVGVSTSLNLRIQNHNMALVETEGSYTMKQNFTNLDIHVGQSYSFLVTMDQNASSDYYIVASARFVNESLWTRVTGVAILQYSNSKGKASGPLPDPPNDEYDKTFSMNQARSIRMNVSTGAARPNPQGSFHYGSINVSQVYKLRNEPPVIINGKKRTTLSGISYSPPDTPLRLADLYDKKDVYTLDFPTMPIDGPPVIRTSVINSTYKNFLEIVFQNNDSTVQTYHIDGYAFWVVGMDYGEWTENSRGTYNKWDGVSRCTTXVFPGAWTAVMLSLDSPGFWNVRTENLDTWYLGQETYIRVVDPNGGYNVTEMVAPDNMLYCGLLKDKQKAQKPHGSRSSASAAKLNYHVLAALVSLVVALVLGH

SEQ ID NO: 39961 - DNA, 1403 bp, Zea mays subsp. mays
  misc_feature (1)..(1403): Ceres Seq. ID no. 12363423
  misc_feature (1121)..(1121): n is a, c, t, g, unknown, or other
  misc_feature (1117)..(1117): n is a, c, t, g, unknown, or other
  misc_feature (1037)..(1037): n is a, c, t, g, unknown, or other
  misc_feature (1118)..(1118): n is a, c, t, g, unknown, or other
gcacgagaccattacctagaacatcctaatcgaaaaatacatacccaccggccggcgtcacagacacgcgagcagagcacagacacagagcacacagcacagaggcagccaccaccacaggcactcacccgcaccgctcggtcaccgaggagtggaggagctttgcagtcgcagcagcagcagtacagtgtgtgagtgtgaagggactagagcagggcacacagcgcaggccgcatgggcgaggcggaggtggagaagcccaaggaggcggcagaggaggagaagaagaaggaagacaagcccatggacgccacggcggcggcggaggacaagcccaaggacgccgcggcggcggaggacaagcccaaggacggggaggagaagaaggacgacgcgccccctcccccgccgccgccgccgcctgaggaggtcgagatgcgggtctacatgcactgcgagggatgcgcccgcaaggtcaagaagatcctcaagcgcttcgacggagtggaggacgtggtcgccgactccaagtcgcacaaggtggtggtgaaggggaagaaggcggccgccgaccccatgagggtggtggagcgcgtgcagaagaagaccggccgcaaggtggagttgctgtcgccgatcccgccgccaacgccgccggaggagaagaaggcagaggaggagcccgagccgccaaagccggaggagaagaaggagccgccggtgatcgccgtggtgctgaaggtgcacatgcactgcgaggcctgcgcccaggggatcaggaagaggatcctcaagatgaaaggcgtgcaatctgcagagccagacctcaaggcgtcggaggtggcagtgaagggcgtgttcgaggagtccaagctggcggagtacgtgtacaagcgcaccggcaagcacgcggccgtcgtcaagtccgagccggtcccggcgccaccgccggagagcggcgccggcgacaacacgggggccaaggaggaggagaaggggcaggaggaggagaaggagaaggaaggaggaggcgatgncggtggcgaggagaagaagaaggaagggggcaaggaggaagagaagaaggacggcgagaagcaggaggaggagaaggagnncgncggtggcggcgagaaggtggaggaaaaggagggagataaagacgctgccgctgccgccgccgccagcatgtacatgcactacccgaggttcccgttcccgggaggctactacgcgccgcctccggggtacgtctaccagccggtgtacccggcgccggcgtacgcggcgtacgcgccgccgcaccaccagcccatggcgccgcagatcttcagcgacgagaaccccaacgcatgctccgtcatgtaactaaaaaacagaaggagccttggcgagagaggggg

SEQ ID NO: 39962 - protein, 377 aa, Zea mays subsp. mays
  peptide (1)..(377): Ceres Seq. ID no. 12363424
  misc_feature (1)..(67): Pfam Name: Pfam Description:  MARCKS family
  misc_feature (1)..(377): NCBI GI NO: 38344582 NR Description: OSJNBa0053B21.14
  misc_feature (1)..(339): NCBI GI NO: 18424719 NR Description: copper chaperone
  misc_feature (5)..(339): NCBI GI NO: 9758294 NR Description: contains similarity to ATFP3~gene_id:MLE2.16
  misc_feature (54)..(343): NCBI GI NO: 4097547 NR Description: ATFP3 [Arabidopsis thaliana]
  misc_feature (41)..(275): NCBI GI NO: 37532382 NR Description: putative ATFP3
  misc_feature (1)..(172): NCBI GI NO: 24417342 NR Description: unknown [Arabidopsis thaliana]
  misc_feature (10)..(309): NCBI GI NO: 18420811 NR Description: expressed protein; protein id: At5g24580
  misc_feature (10)..(309): NCBI GI NO: 21594005 NR Description: unknown [Arabidopsis thaliana]
  misc_feature (1)..(287): NCBI GI NO: 21594005 NR Description: unknown [Arabidopsis thaliana]
  misc_feature (40)..(307): NCBI GI NO: 34394290 NR Description: putative heavy-metal-associated domain-containingprotein
  misc_feature (268)..(268): Xaa is any aa, unknown or other
  misc_feature (295)..(295): Xaa is any aa, unknown or other
  misc_feature (296)..(296): Xaa is any aa, unknown or other
MGEAEVEKPKEAAEEEKKKEDKPMDATAAAEDKPKDAAAAEDKPKDGEEKKDDAPPPPPPPPPEEVEMRVYMHCEGCARKVKKILKRFDGVEDVVADSKSHKVVVKGKKAAADPMRVVERVQKKTGRKVELLSPIPPPTPPEEKKAEEEPEPPKPEEKKEPPVIAVVLKVHMHCEACAQGIRKRILKMKGVQSAEPDLKASEVAVKGVFEESKLAEYVYKRTGKHAAVVKSEPVPAPPPESGAGDNTGAKEEEKGQEEEKEKEGGGDXGGEEKKKEGGKEEEKKDGEKQEEEKEXXGGGEKVEEKEGDKDAAAAAAASMYMHYPRFPFPGGYYAPPPGYVYQPVYPAPAYAAYAPPHHQPMAPQIFSDENPNACSVM

SEQ ID NO: 39963 - protein, 354 aa, Zea mays subsp. mays
  peptide (1)..(354): Ceres Seq. ID no. 12363425
  misc_feature (1)..(286): Pfam Name: Pfam Description:  Caldesmon
  misc_feature (1)..(354): NCBI GI NO: 38344582 NR Description: OSJNBa0053B21.14
  misc_feature (1)..(316): NCBI GI NO: 18424719 NR Description: copper chaperone
  misc_feature (1)..(316): NCBI GI NO: 9758294 NR Description: contains similarity to ATFP3~gene_id:MLE2.16
  misc_feature (31)..(320): NCBI GI NO: 4097547 NR Description: ATFP3 [Arabidopsis thaliana]
  misc_feature (18)..(252): NCBI GI NO: 37532382 NR Description: putative ATFP3
  misc_feature (1)..(149): NCBI GI NO: 24417342 NR Description: unknown [Arabidopsis thaliana]
  misc_feature (1)..(286): NCBI GI NO: 18420811 NR Description: expressed protein; protein id: At5g24580
  misc_feature (1)..(286): NCBI GI NO: 21594005 NR Description: unknown [Arabidopsis thaliana]
  misc_feature (1)..(264): NCBI GI NO: 21594005 NR Description: unknown [Arabidopsis thaliana]
  misc_feature (17)..(284): NCBI GI NO: 34394290 NR Description: putative heavy-metal-associated domain-containingprotein
  misc_feature (245)..(245): Xaa is any aa, unknown or other
  misc_feature (272)..(272): Xaa is any aa, unknown or other
  misc_feature (273)..(273): Xaa is any aa, unknown or other
MDATAAAEDKPKDAAAAEDKPKDGEEKKDDAPPPPPPPPPEEVEMRVYMHCEGCARKVKKILKRFDGVEDVVADSKSHKVVVKGKKAAADPMRVVERVQKKTGRKVELLSPIPPPTPPEEKKAEEEPEPPKPEEKKEPPVIAVVLKVHMHCEACAQGIRKRILKMKGVQSAEPDLKASEVAVKGVFEESKLAEYVYKRTGKHAAVVKSEPVPAPPPESGAGDNTGAKEEEKGQEEEKEKEGGGDXGGEEKKKEGGKEEEKKDGEKQEEEKEXXGGGEKVEEKEGDKDAAAAAAASMYMHYPRFPFPGGYYAPPPGYVYQPVYPAPAYAAYAPPHHQPMAPQIFSDENPNACSVM

SEQ ID NO: 39964 - protein, 310 aa, Zea mays subsp. mays
  peptide (1)..(310): Ceres Seq. ID no. 12363426
  misc_feature (1)..(242): Pfam Name: Pfam Description:  Caldesmon
  misc_feature (1)..(310): NCBI GI NO: 38344582 NR Description: OSJNBa0053B21.14
  misc_feature (1)..(272): NCBI GI NO: 18424719 NR Description: copper chaperone
  misc_feature (1)..(272): NCBI GI NO: 9758294 NR Description: contains similarity to ATFP3~gene_id:MLE2.16
  misc_feature (1)..(276): NCBI GI NO: 4097547 NR Description: ATFP3 [Arabidopsis thaliana]
  misc_feature (1)..(208): NCBI GI NO: 37532382 NR Description: putative ATFP3
  misc_feature (1)..(105): NCBI GI NO: 24417342 NR Description: unknown [Arabidopsis thaliana]
  misc_feature (1)..(242): NCBI GI NO: 18420811 NR Description: expressed protein; protein id: At5g24580
  misc_feature (1)..(242): NCBI GI NO: 21594005 NR Description: unknown [Arabidopsis thaliana]
  misc_feature (1)..(220): NCBI GI NO: 21594005 NR Description: unknown [Arabidopsis thaliana]
  misc_feature (1)..(240): NCBI GI NO: 34394290 NR Description: putative heavy-metal-associated domain-containingprotein
  misc_feature (201)..(201): Xaa is any aa, unknown or other
  misc_feature (228)..(228): Xaa is any aa, unknown or other
  misc_feature (229)..(229): Xaa is any aa, unknown or other
MRVYMHCEGCARKVKKILKRFDGVEDVVADSKSHKVVVKGKKAAADPMRVVERVQKKTGRKVELLSPIPPPTPPEEKKAEEEPEPPKPEEKKEPPVIAVVLKVHMHCEACAQGIRKRILKMKGVQSAEPDLKASEVAVKGVFEESKLAEYVYKRTGKHAAVVKSEPVPAPPPESGAGDNTGAKEEEKGQEEEKEKEGGGDXGGEEKKKEGGKEEEKKDGEKQEEEKEXXGGGEKVEEKEGDKDAAAAAAASMYMHYPRFPFPGGYYAPPPGYVYQPVYPAPAYAAYAPPHHQPMAPQIFSDENPNACSVM

SEQ ID NO: 39965 - DNA, 1293 bp, Zea mays subsp. mays
  misc_feature (1)..(1293): Ceres Seq. ID no. 12425298
gtgtgttctctgcgcggtcggcccggcaaacttcctctggttcctgatgatggatgtatcgcaagttgccgcagccgtggcgctgatggcgttcgcggtcgcgtttccggcgtcgggcttcccgtcaggcttcccgccagggacaccagcagcgttcccgaacccgtgggcggcgttccagaacctgtctggctgtcacatgggggaggagcggcagggcctggccgggctcaaggactacctcagccacttcggctacctcccgccgccgccgccgtcgtcccccttcagcgacgcgttcgaccagaacctggaggcggccatcgcgacgtaccagcgcaacttcggtctcaacgccaccggcgcgctggacccgtccaccgtctcgcagatggtcgcgcctcgctgcggcgtggccgacgtcatcaacggcacgtccaccatggcgaggagctcctccgccgacgcccacggcaggcacctgtacgcctacttccccggcgggccgacgtggccgccgttccggcgggacctcaagtacgcgatcaccgcgacctcggccgcgtccatcgaccggtccacgctgagcgacgtcttcgcgcgcgccttctcccggtgggccgcggccaccaacctgcggttcgcggagaccgcgtcggagtccgacgccgacatcaccatcggcttctactcgggctcgcacggcgacggcgagccgttcgacgggccgctgggaacgctggcgcacgccttctcgcccacggacggccggttccacctggacgccgcggaggcgtgggtggccggcagcgacgtgtcacgctcgtcggcgaccggggcggtggacctagagtccgtggcggtgcacgagatcggccacctcctggggctcggccactcctcggtgccggacgccatcatgtacccgacgatccggacggggacgaggaaggtggagctggaggccgacgacgtccaggggatacagagcctgtacgggagcaaccccaacttcaagggcgcgaccccgacttcgccggcgacgagcagccgcgagatggacagtagcgccggcgcgggatgccgaccagatagagtcttcgtcggagtagttgcggcagttggcctgctcctcctagtcctctagtgccgtagacctctagtgtttgccattttttttcggccacgtccttccttgtatcgatttgttgctcgattagctgattcttggatagattcttgtgtacataatatggttatcactattacagaataatataatatctgatacct

SEQ ID NO: 39966 - protein, 381 aa, Zea mays subsp. mays
  peptide (1)..(381): Ceres Seq. ID no. 12425299
  misc_feature (165)..(271): Pfam Name: Pfam Description:  Matrixin
  misc_feature (26)..(364): NCBI GI NO: 7488435 NR Description: zinc metalloproteinase homolog F3I6
  misc_feature (26)..(364): NCBI GI NO: 30688744 NR Description: metallo proteinase -related [Arabidopsis thaliana]
  misc_feature (28)..(381): NCBI GI NO: 15223067 NR Description: matrix metalloproteinase, putative
  misc_feature (51)..(381): NCBI GI NO: 15218963 NR Description: metalloproteinase, putative; protein id:At1g59970
  misc_feature (21)..(350): NCBI GI NO: 37536782 NR Description: putative metalloproteinase
  misc_feature (56)..(380): NCBI GI NO: 15235820 NR Description: proteinase like protein; protein id: At4g16640
  misc_feature (56)..(380): NCBI GI NO: 28393482 NR Description: putative proteinase [Arabidopsis thaliana]
  misc_feature (56)..(380): NCBI GI NO: 21553383 NR Description: proteinase like protein [Arabidopsis thaliana]
  misc_feature (46)..(336): NCBI GI NO: 2827777 NR Description: Metalloendoproteinase 1 precursor (SMEP1)
  misc_feature (77)..(356): NCBI GI NO: 15225398 NR Description: putative metalloproteinase; protein id:At2g45040
CVLCAVGPANFLWFLMMDVSQVAAAVALMAFAVAFPASGFPSGFPPGTPAAFPNPWAAFQNLSGCHMGEERQGLAGLKDYLSHFGYLPPPPPSSPFSDAFDQNLEAAIATYQRNFGLNATGALDPSTVSQMVAPRCGVADVINGTSTMARSSSADAHGRHLYAYFPGGPTWPPFRRDLKYAITATSAASIDRSTLSDVFARAFSRWAAATNLRFAETASESDADITIGFYSGSHGDGEPFDGPLGTLAHAFSPTDGRFHLDAAEAWVAGSDVSRSSATGAVDLESVAVHEIGHLLGLGHSSVPDAIMYPTIRTGTRKVELEADDVQGIQSLYGSNPNFKGATPTSPATSSREMDSSAGAGCRPDRVFVGVVAAVGLLLLVL

SEQ ID NO: 39967 - protein, 366 aa, Zea mays subsp. mays
  peptide (1)..(366): Ceres Seq. ID no. 12425300
  misc_feature (150)..(256): Pfam Name: Pfam Description:  Matrixin
  misc_feature (11)..(349): NCBI GI NO: 7488435 NR Description: zinc metalloproteinase homolog F3I6
  misc_feature (11)..(349): NCBI GI NO: 30688744 NR Description: metallo proteinase -related [Arabidopsis thaliana]
  misc_feature (13)..(366): NCBI GI NO: 15223067 NR Description: matrix metalloproteinase, putative
  misc_feature (36)..(366): NCBI GI NO: 15218963 NR Description: metalloproteinase, putative; protein id:At1g59970
  misc_feature (6)..(335): NCBI GI NO: 37536782 NR Description: putative metalloproteinase
  misc_feature (41)..(365): NCBI GI NO: 15235820 NR Description: proteinase like protein; protein id: At4g16640
  misc_feature (41)..(365): NCBI GI NO: 28393482 NR Description: putative proteinase [Arabidopsis thaliana]
  misc_feature (41)..(365): NCBI GI NO: 21553383 NR Description: proteinase like protein [Arabidopsis thaliana]
  misc_feature (31)..(321): NCBI GI NO: 2827777 NR Description: Metalloendoproteinase 1 precursor (SMEP1)
  misc_feature (62)..(341): NCBI GI NO: 15225398 NR Description: putative metalloproteinase; protein id:At2g45040
MMDVSQVAAAVALMAFAVAFPASGFPSGFPPGTPAAFPNPWAAFQNLSGCHMGEERQGLAGLKDYLSHFGYLPPPPPSSPFSDAFDQNLEAAIATYQRNFGLNATGALDPSTVSQMVAPRCGVADVINGTSTMARSSSADAHGRHLYAYFPGGPTWPPFRRDLKYAITATSAASIDRSTLSDVFARAFSRWAAATNLRFAETASESDADITIGFYSGSHGDGEPFDGPLGTLAHAFSPTDGRFHLDAAEAWVAGSDVSRSSATGAVDLESVAVHEIGHLLGLGHSSVPDAIMYPTIRTGTRKVELEADDVQGIQSLYGSNPNFKGATPTSPATSSREMDSSAGAGCRPDRVFVGVVAAVGLLLLVL

SEQ ID NO: 39968 - protein, 365 aa, Zea mays subsp. mays
  peptide (1)..(365): Ceres Seq. ID no. 12425301
  misc_feature (149)..(255): Pfam Name: Pfam Description:  Matrixin
  misc_feature (10)..(348): NCBI GI NO: 7488435 NR Description: zinc metalloproteinase homolog F3I6
  misc_feature (10)..(348): NCBI GI NO: 30688744 NR Description: metallo proteinase -related [Arabidopsis thaliana]
  misc_feature (12)..(365): NCBI GI NO: 15223067 NR Description: matrix metalloproteinase, putative
  misc_feature (35)..(365): NCBI GI NO: 15218963 NR Description: metalloproteinase, putative; protein id:At1g59970
  misc_feature (5)..(334): NCBI GI NO: 37536782 NR Description: putative metalloproteinase
  misc_feature (40)..(364): NCBI GI NO: 15235820 NR Description: proteinase like protein; protein id: At4g16640
  misc_feature (40)..(364): NCBI GI NO: 21553383 NR Description: proteinase like protein [Arabidopsis thaliana]
  misc_feature (40)..(364): NCBI GI NO: 28393482 NR Description: putative proteinase [Arabidopsis thaliana]
  misc_feature (30)..(320): NCBI GI NO: 2827777 NR Description: Metalloendoproteinase 1 precursor (SMEP1)
  misc_feature (61)..(340): NCBI GI NO: 15225398 NR Description: putative metalloproteinase; protein id:At2g45040
MDVSQVAAAVALMAFAVAFPASGFPSGFPPGTPAAFPNPWAAFQNLSGCHMGEERQGLAGLKDYLSHFGYLPPPPPSSPFSDAFDQNLEAAIATYQRNFGLNATGALDPSTVSQMVAPRCGVADVINGTSTMARSSSADAHGRHLYAYFPGGPTWPPFRRDLKYAITATSAASIDRSTLSDVFARAFSRWAAATNLRFAETASESDADITIGFYSGSHGDGEPFDGPLGTLAHAFSPTDGRFHLDAAEAWVAGSDVSRSSATGAVDLESVAVHEIGHLLGLGHSSVPDAIMYPTIRTGTRKVELEADDVQGIQSLYGSNPNFKGATPTSPATSSREMDSSAGAGCRPDRVFVGVVAAVGLLLLVL

SEQ ID NO: 39969 - DNA, 2506 bp, Zea mays subsp. mays
  misc_feature (1)..(2506): Ceres Seq. ID no. 12375134
gcacgagaccattacctagaacatcctaatcgaaaaagaagagcacgcccactcctccggctcttcttctccaccggcaccagtccaccacctcctgccaccgcgcggccccaaccaaccacaccgcagcgcagcaatggcgggcaacggcgccatcgtggagagcgacccgctgaactggggcgcggcggcggcggagctggccgggagccacctggacgaggtgaagcgcatggtggcgcaggcccggcagcccgtggtgaagatcgagggctccaccctccgcgtcggccaggtggccgccgtcgcctccgccaaggacgcgtccggcgtcgccgtcgagctcgacgaggaggcccgcccccgcgtcaaggccagcagcgagtggatcctcgactgcatcgcccacggcggcgacatctacggcgtcaccaccggcttcggcggcacctcccaccgccgcaccaaggacgggcccgcgctccaggtcgagctgctcaggcatctcaacgccggaatcttcggcaccggcagcgacgggcacacgctgccgtcggaggtcacccgcgcggcgatgctggtgcgcatcaacaccctcctccagggctactccggcatccgcttcgagatcctcgaggccatcacgaagctgctcaacaccggtgtcagcccctgcctgccgctccggggcaccatcaccgcgtcgggcgacctggtcccgctctcctacatcgccggcctcatcacgggccgccccaacgcgcaggccgtcaccgtcgacggaaggaaggtggacgccgccgaggcgttcaagatcgccggcatcgagggcggcttcttcaagctcaaccccaaggagggcctcgccatcgtcaacggcacgtccgtgggctccgcgctcgcggccaccgtgatgtacgacgccaacgtcctggccgtcctgtcggaggtcctgtccgccgtcttctgcgaggtcatgaacggcaagcccgagtacacggaccacctgacccacaagctgaagcaccacccggggtccatcgaggccgcggccatcatggagcacatcctggatggcagctccttcatgaagcaggccaagaaggtgaacgagctggacccgctgctgaagcccaagcaggacaggtacgcgctccgcacgtcgccgcagtggctgggcccccagatcgaggtcatccgcgccgccaccaagtccatcgagcgcgaggtcaactccgtgaacgacaacccggtcatcgacgtccaccgcggcaaggcgctgcacggcggcaacttccagggcacccccatcggcgtgtccatggacaacgcccgcctcgccatcgccaacatcggcaagctcatgttcgcgcagttctccgagctcgtcaacgagttctacaacaacgggctcacctccaacctggccggcagccgcaaccccagcctggactacggcttcaagggcaccgagatcgccatggcctcctactgctccgagctccagtacctgggcaaccccatcaccaaccacgtgcagagcgcggagcagcacaaccaggacgtgaactccctgggcctcgtctcggccaggaagaccgccgaggcgatcgacatcctgaagctcatgtcgtccacctacatcgtggcgctgtgccaggccgtggacctgcgccacctcgaggagaacatcaaggcgtcggtgaagaacaccgtgacccaggtggccaagaaggtgctgaccatgaacccctcgggcgagctctccagcgcccgcttcagcgagaaggagctgatcagcgccatcgaccgcgaggccgtgttcacgtacgcggaggacgcggccagcgccagcctgccgctgatgcagaagctgcgcgccgtgctggtggaccacgccctcagcagcggcgacgcggagcgggagccctccatgttctccaagatcaccaggttcgaggaggagctccgcgcggtgctgccccaggaggtggaggccgcccgcgtggcggtcgccgagggcaccgcccccgtggcgaaccggatcgcggacagccggtcgttcccgctgtaccgcttcgtgcgcgaggagctcggctgcgtgttcctgaccggcgagaggctcaagtcccccggcgaggagtgcaacaaggtgttcgtcggcatcagccagggcaagctcgtggaccccatgctcgagtgcctcaaggagtgggacggcaagccgctgcccatcaacgtcaagtaaaagaacgccaaggagaagaggagggaggggaggaaatacgtgaaaaaaaataaaacctgtacacgtgtctgtccagatcgtgccgtcgatcgctcttcgttgttgatttttggttgtattgatcgatccgtatgtgtgcgtgcgtgtgtggcgttgctctttcttcttttgtgtagctgtgccctgccaccggccgacgtgcgtgcatgccatggtggcgggcagcgttttctaaggtcatatactgttgttgtgttt

SEQ ID NO: 39970 - protein, 766 aa, Zea mays subsp. mays
  peptide (1)..(766): Ceres Seq. ID no. 12375135
  misc_feature (18)..(685): Pfam Name: Pfam Description:  High molecular weight glutenin subunit
  misc_feature (9)..(179): NCBI GI NO: 19923466 NR Description: splicing coactivator subunit SRm300
ARDHYLEHPNRKRRARPLLRLFFSTGTSPPPPATARPQPTTPQRSNGGQRRHRGERPAELGRGGGGAGREPPGRGEAHGGAGPAARGEDRGLHPPRRPGGRRRLRQGRVRRRRRARRGGPPPRQGQQRVDPRLHRPRRRHLRRHHRLRRHLPPPHQGRARAPGRAAQASQRRNLRHRQRRAHAAVGGHPRGDAGAHQHPPPGLLRHPLRDPRGHHEAAQHRCQPLPAAPGHHHRVGRPGPALLHRRPHHGPPQRAGRHRRRKEGGRRRGVQDRRHRGRLLQAQPQGGPRHRQRHVRGLRARGHRDVRRQRPGRPVGGPVRRLLRGHERQARVHGPPDPQAEAPPGVHRGRGHHGAHPGWQLLHEAGQEGERAGPAAEAQAGQVRAPHVAAVAGPPDRGHPRRHQVHRARGQLRERQPGHRRPPRQGAARRQLPGHPHRRVHGQRPPRHRQHRQAHVRAVLRARQRVLQQRAHLQPGRQPQPQPGLRLQGHRDRHGLLLLRAPVPGQPHHQPRAERGAAQPGRELPGPRLGQEDRRGDRHPEAHVVHLHRGAVPGRGPAPPRGEHQGVGEEHRDPGGQEGADHEPLGRALQRPLQREGADQRHRPRGRVHVRGGRGQRQPAADAEAARRAGGPRPQQRRRGAGALHVLQDHQVRGGAPRGAAPGGGGRPRGGRRGHRPRGEPDRGQPVVPAVPLRARGARLRVPDRREAQVPRRGVQQGVRRHQPGQARGPHARVPQGVGRQAAAHQRQVKERQGEEEGGEEIREKK

SEQ ID NO: 39971 - protein, 703 aa, Zea mays subsp. mays
  peptide (1)..(703): Ceres Seq. ID no. 12375136
  misc_feature (41)..(540): Pfam Name: Pfam Description:  Phenylalanine and histidine ammonia-lyase
  misc_feature (33)..(700): NCBI GI NO: 29367609 NR Description: phenylalanine ammonia-lyase
  misc_feature (10)..(700): NCBI GI NO: 3024363 NR Description: Phenylalanine ammonia-lyase
  misc_feature (10)..(700): NCBI GI NO: 129594 NR Description: Phenylalanine ammonia-lyase
  misc_feature (8)..(700): NCBI GI NO: 1171997 NR Description: Phenylalanine ammonia-lyase
  misc_feature (4)..(700): NCBI GI NO: 12240240 NR Description: phenylalanine ammonia-lyase [Ipomoea nil]
  misc_feature (11)..(700): NCBI GI NO: 3123241 NR Description: Phenylalanine ammonia-lyase
  misc_feature (1)..(700): NCBI GI NO: 6647711 NR Description: Phenylalanine ammonia-lyase 1
  misc_feature (1)..(700): NCBI GI NO: 129585 NR Description: Phenylalanine ammonia-lyase class II
  misc_feature (42)..(654): NCBI GI NO: 30580473 NR Description: Phenylalanine ammonia-lyase
  misc_feature (138)..(519): NCBI GI NO: 30580484 NR Description: Phenylalanine ammonia-lyase
MAGNGAIVESDPLNWGAAAAELAGSHLDEVKRMVAQARQPVVKIEGSTLRVGQVAAVASAKDASGVAVELDEEARPRVKASSEWILDCIAHGGDIYGVTTGFGGTSHRRTKDGPALQVELLRHLNAGIFGTGSDGHTLPSEVTRAAMLVRINTLLQGYSGIRFEILEAITKLLNTGVSPCLPLRGTITASGDLVPLSYIAGLITGRPNAQAVTVDGRKVDAAEAFKIAGIEGGFFKLNPKEGLAIVNGTSVGSALAATVMYDANVLAVLSEVLSAVFCEVMNGKPEYTDHLTHKLKHHPGSIEAAAIMEHILDGSSFMKQAKKVNELDPLLKPKQDRYALRTSPQWLGPQIEVIRAATKSIEREVNSVNDNPVIDVHRGKALHGGNFQGTPIGVSMDNARLAIANIGKLMFAQFSELVNEFYNNGLTSNLAGSRNPSLDYGFKGTEIAMASYCSELQYLGNPITNHVQSAEQHNQDVNSLGLVSARKTAEAIDILKLMSSTYIVALCQAVDLRHLEENIKASVKNTVTQVAKKVLTMNPSGELSSARFSEKELISAIDREAVFTYAEDAASASLPLMQKLRAVLVDHALSSGDAEREPSMFSKITRFEEELRAVLPQEVEAARVAVAEGTAPVANRIADSRSFPLYRFVREELGCVFLTGERLKSPGEECNKVFVGISQGKLVDPMLECLKEWDGKPLPINVK

SEQ ID NO: 39972 - protein, 671 aa, Zea mays subsp. mays
  peptide (1)..(671): Ceres Seq. ID no. 12375137
  misc_feature (9)..(508): Pfam Name: Pfam Description:  Phenylalanine and histidine ammonia-lyase
  misc_feature (1)..(668): NCBI GI NO: 29367609 NR Description: phenylalanine ammonia-lyase
  misc_feature (1)..(668): NCBI GI NO: 3024363 NR Description: Phenylalanine ammonia-lyase
  misc_feature (1)..(668): NCBI GI NO: 129594 NR Description: Phenylalanine ammonia-lyase
  misc_feature (1)..(668): NCBI GI NO: 1171997 NR Description: Phenylalanine ammonia-lyase
  misc_feature (1)..(668): NCBI GI NO: 12240240 NR Description: phenylalanine ammonia-lyase [Ipomoea nil]
  misc_feature (1)..(668): NCBI GI NO: 3123241 NR Description: Phenylalanine ammonia-lyase
  misc_feature (1)..(668): NCBI GI NO: 6647711 NR Description: Phenylalanine ammonia-lyase 1
  misc_feature (1)..(668): NCBI GI NO: 129585 NR Description: Phenylalanine ammonia-lyase class II
  misc_feature (10)..(622): NCBI GI NO: 30580473 NR Description: Phenylalanine ammonia-lyase
  misc_feature (106)..(487): NCBI GI NO: 30580484 NR Description: Phenylalanine ammonia-lyase
MVAQARQPVVKIEGSTLRVGQVAAVASAKDASGVAVELDEEARPRVKASSEWILDCIAHGGDIYGVTTGFGGTSHRRTKDGPALQVELLRHLNAGIFGTGSDGHTLPSEVTRAAMLVRINTLLQGYSGIRFEILEAITKLLNTGVSPCLPLRGTITASGDLVPLSYIAGLITGRPNAQAVTVDGRKVDAAEAFKIAGIEGGFFKLNPKEGLAIVNGTSVGSALAATVMYDANVLAVLSEVLSAVFCEVMNGKPEYTDHLTHKLKHHPGSIEAAAIMEHILDGSSFMKQAKKVNELDPLLKPKQDRYALRTSPQWLGPQIEVIRAATKSIEREVNSVNDNPVIDVHRGKALHGGNFQGTPIGVSMDNARLAIANIGKLMFAQFSELVNEFYNNGLTSNLAGSRNPSLDYGFKGTEIAMASYCSELQYLGNPITNHVQSAEQHNQDVNSLGLVSARKTAEAIDILKLMSSTYIVALCQAVDLRHLEENIKASVKNTVTQVAKKVLTMNPSGELSSARFSEKELISAIDREAVFTYAEDAASASLPLMQKLRAVLVDHALSSGDAEREPSMFSKITRFEEELRAVLPQEVEAARVAVAEGTAPVANRIADSRSFPLYRFVREELGCVFLTGERLKSPGEECNKVFVGISQGKLVDPMLECLKEWDGKPLPINVK

SEQ ID NO: 39973 - DNA, 1870 bp, Zea mays subsp. mays
  misc_feature (1)..(1870): Ceres Seq. ID no. 12361130
ctctaaaaccccaaccgtcgacgttcactcctcaccccctgcggccctgctcttttgagcctcactcctcagtcttcacgccgccggggcagtgctaagatccaggacacgcgctgtcccgctagcaccacgcctccccttgtcatcgtcctcctcccacgtgctgctgtgggggtgcagacgggagacacatccggacctgattgatttcttcgttttgttctgctggtttacatggctgcaagaaagaaaaagcctttgcttattgcttgccaagcaaccagtgccagaataacaagatctcaggctgctgcaaatagtacaagatctgggctggctccttctgtaccagtacctctgaaaacggagcataaccatgcagcgaaaaaaaagatgaaaagggaagcttcagatgaaaatgcttctgctgatgctggagcttcagctcctctgcctaaaaggcgtacagttctcaagaatgtaactaacataagctgtgctaaaatttccaaaaggtgcactgctgtgactgggctgaagttgggtccctcccagaaggctgggcagagcataaacaagcaatgcacaaacaagatctccatgcttctccctctggctgttggagggagttcacttgtggatgattctaataatgctgaagaaacacaaatggtagaccttttggcacagaaagagaagcagattgttttgcttaaggaggctcagccattacagaatactgaacaaaacaaaggcggtgcttgtgatgaggcatctgttgaggaaagaaatgccatgaatgtacacgaaactgctgccttaaaggctggggtctctaatggtttaaacattgtagatattgacaaaaataatggtgatcctcaaatgtgtgttacctacgttgcagagatatacagaaatctaatggcctcagagcttataagaagacctaggtcaaattacatggagactttgcaacaggacatcacagctagcatgcgaggtgttctaattgattggcttgttgaggtttcggacgaatataagcttgtggcagatacactttaccttacagtatatcttattgaccaatttctttctcagaactgtatccaaacgcacaagctgcaacttcttgggataactagtatgctgattgcctcgaaatatgaagagtattctgctcctagtgctgaagaattttgtaacataacggctggtacatatgcaaaggctgaggttctggaaatggagcaacaagtgcttaatgatctgggctttcatttatctgttccaacaacaaacacatttctcaggagattccttagagcagcacaggcttctcgtacagctcatctgaccactttgaattatctggcgagttatcttgccgagttgactttaatcagttacgatttcatgaaatttcttccctcagaggtggcagcatcttcgattttccttgcaaaatggacacttgaccaatctgaccatccttggaaccctactcttgagcactacacgtcttacaaaagcttcgatattagaacttgcgtgcgggctctacaggaactgcagcacaacaccagtaattgccccctcaacgccatccgtgagaagtatgggcagcagaagttcgagtgcgttgccaacctcaggtcaccggagctgctgcggtcgctcttcagttgatgtgctcccctgcactctgctgattcactcgccatttgctgcaacgatcctgacactgtataaaatatttcttcagtttctgttccatttccaaactttcttcagtttgaacatgcattctgtgacttgggtcaccgacaaaagaggcgcgacacactaatatatcaatttgtaactc

SEQ ID NO: 39974 - protein, 485 aa, Zea mays subsp. mays
  peptide (1)..(485): Ceres Seq. ID no. 12361131
  misc_feature (354)..(480): Pfam Name: Pfam Description:  Cyclin, C-terminal domain
  misc_feature (19)..(484): NCBI GI NO: 5420276 NR Description: cyclin A2 [Lycopersicon esculentum]
  misc_feature (19)..(484): NCBI GI NO: 7438491 NR Description: cyclin a2-type, mitosis-specific - soybean
  misc_feature (19)..(484): NCBI GI NO: 7438492 NR Description: cyclin, A-type - common tobacco
  misc_feature (6)..(484): NCBI GI NO: 5305100 NR Description: cyclin A2 [Medicago sativa]
  misc_feature (52)..(484): NCBI GI NO: 1245816 NR Description: cyclin A homolog
  misc_feature (28)..(484): NCBI GI NO: 15218225 NR Description: Cyclin A2;3; protein id: At1g15570
  misc_feature (6)..(484): NCBI GI NO: 15419009 NR Description: cyclin A2 [Medicago sativa]
  misc_feature (136)..(485): NCBI GI NO: 22326727 NR Description: Cyclin A2;2; protein id: At5g11300.1
  misc_feature (52)..(484): NCBI GI NO: 7438498 NR Description: cyclin cyc3 - alfalfa
  misc_feature (136)..(485): NCBI GI NO: 784946 NR Description: cyclin 3b [Arabidopsis thaliana]
MAARKKKPLLIACQATSARITRSQAAANSTRSGLAPSVPVPLKTEHNHAAKKKMKREASDENASADAGASAPLPKRRTVLKNVTNISCAKISKRCTAVTGLKLGPSQKAGQSINKQCTNKISMLLPLAVGGSSLVDDSNNAEETQMVDLLAQKEKQIVLLKEAQPLQNTEQNKGGACDEASVEERNAMNVHETAALKAGVSNGLNIVDIDKNNGDPQMCVTYVAEIYRNLMASELIRRPRSNYMETLQQDITASMRGVLIDWLVEVSDEYKLVADTLYLTVYLIDQFLSQNCIQTHKLQLLGITSMLIASKYEEYSAPSAEEFCNITAGTYAKAEVLEMEQQVLNDLGFHLSVPTTNTFLRRFLRAAQASRTAHLTTLNYLASYLAELTLISYDFMKFLPSEVAASSIFLAKWTLDQSDHPWNPTLEHYTSYKSFDIRTCVRALQELQHNTSNCPLNAIREKYGQQKFECVANLRSPELLRSLFS

SEQ ID NO: 39975 - protein, 432 aa, Zea mays subsp. mays
  peptide (1)..(432): Ceres Seq. ID no. 12361132
  misc_feature (301)..(427): Pfam Name: Pfam Description:  Cyclin, C-terminal domain
  misc_feature (1)..(431): NCBI GI NO: 5420276 NR Description: cyclin A2 [Lycopersicon esculentum]
  misc_feature (1)..(431): NCBI GI NO: 7438491 NR Description: cyclin a2-type, mitosis-specific - soybean
  misc_feature (1)..(431): NCBI GI NO: 7438492 NR Description: cyclin, A-type - common tobacco
  misc_feature (1)..(431): NCBI GI NO: 5305100 NR Description: cyclin A2 [Medicago sativa]
  misc_feature (1)..(431): NCBI GI NO: 1245816 NR Description: cyclin A homolog
  misc_feature (1)..(431): NCBI GI NO: 15218225 NR Description: Cyclin A2;3; protein id: At1g15570
  misc_feature (1)..(431): NCBI GI NO: 15419009 NR Description: cyclin A2 [Medicago sativa]
  misc_feature (83)..(432): NCBI GI NO: 22326727 NR Description: Cyclin A2;2; protein id: At5g11300.1
  misc_feature (1)..(431): NCBI GI NO: 7438498 NR Description: cyclin cyc3 - alfalfa
  misc_feature (83)..(432): NCBI GI NO: 784946 NR Description: cyclin 3b [Arabidopsis thaliana]
MKREASDENASADAGASAPLPKRRTVLKNVTNISCAKISKRCTAVTGLKLGPSQKAGQSINKQCTNKISMLLPLAVGGSSLVDDSNNAEETQMVDLLAQKEKQIVLLKEAQPLQNTEQNKGGACDEASVEERNAMNVHETAALKAGVSNGLNIVDIDKNNGDPQMCVTYVAEIYRNLMASELIRRPRSNYMETLQQDITASMRGVLIDWLVEVSDEYKLVADTLYLTVYLIDQFLSQNCIQTHKLQLLGITSMLIASKYEEYSAPSAEEFCNITAGTYAKAEVLEMEQQVLNDLGFHLSVPTTNTFLRRFLRAAQASRTAHLTTLNYLASYLAELTLISYDFMKFLPSEVAASSIFLAKWTLDQSDHPWNPTLEHYTSYKSFDIRTCVRALQELQHNTSNCPLNAIREKYGQQKFECVANLRSPELLRSLFS

SEQ ID NO: 39976 - protein, 363 aa, Zea mays subsp. mays
  peptide (1)..(363): Ceres Seq. ID no. 12361133
  misc_feature (232)..(358): Pfam Name: Pfam Description:  Cyclin, C-terminal domain
  misc_feature (1)..(362): NCBI GI NO: 5420276 NR Description: cyclin A2 [Lycopersicon esculentum]
  misc_feature (1)..(362): NCBI GI NO: 7438491 NR Description: cyclin a2-type, mitosis-specific - soybean
  misc_feature (1)..(362): NCBI GI NO: 7438492 NR Description: cyclin, A-type - common tobacco
  misc_feature (1)..(362): NCBI GI NO: 5305100 NR Description: cyclin A2 [Medicago sativa]
  misc_feature (1)..(362): NCBI GI NO: 1245816 NR Description: cyclin A homolog
  misc_feature (1)..(362): NCBI GI NO: 15218225 NR Description: Cyclin A2;3; protein id: At1g15570
  misc_feature (1)..(362): NCBI GI NO: 15419009 NR Description: cyclin A2 [Medicago sativa]
  misc_feature (14)..(363): NCBI GI NO: 22326727 NR Description: Cyclin A2;2; protein id: At5g11300.1
  misc_feature (1)..(362): NCBI GI NO: 7438498 NR Description: cyclin cyc3 - alfalfa
  misc_feature (14)..(363): NCBI GI NO: 784946 NR Description: cyclin 3b [Arabidopsis thaliana]
MLLPLAVGGSSLVDDSNNAEETQMVDLLAQKEKQIVLLKEAQPLQNTEQNKGGACDEASVEERNAMNVHETAALKAGVSNGLNIVDIDKNNGDPQMCVTYVAEIYRNLMASELIRRPRSNYMETLQQDITASMRGVLIDWLVEVSDEYKLVADTLYLTVYLIDQFLSQNCIQTHKLQLLGITSMLIASKYEEYSAPSAEEFCNITAGTYAKAEVLEMEQQVLNDLGFHLSVPTTNTFLRRFLRAAQASRTAHLTTLNYLASYLAELTLISYDFMKFLPSEVAASSIFLAKWTLDQSDHPWNPTLEHYTSYKSFDIRTCVRALQELQHNTSNCPLNAIREKYGQQKFECVANLRSPELLRSLFS

SEQ ID NO: 39977 - DNA, 677 bp, Zea mays subsp. mays
  misc_feature (1)..(677): Ceres Seq. ID no. 13493127
atagaaatcgaccgagcgaatcctcgcttcgcagtcgcagcctttcctgcatcacaccaccgcgaaaccccagcagccgcatcgatggcgcccaaggcggagaagaagcccgctgcgaagaagccagcggaggaggagcccgctgccgcgaaggccccggcggggaagaagcccaaggccgagaagcgcctcccggcggccaagtcgtccggcaaagaaggcggcgacaagaagggcaagaagaaggcgaagaagtcggtggagacctacaagatctacatcttcaaggtgctgaagcaggtccaccccgacatcggcatctcttccaaggccatgtccatcatgaactccttcatcaacgacatcttcgagaagctcgccggcgaggctgccaagcttgcgcgctacaacaagaagcccaccatcacctctcgggagattcaaacctctgttcgccttgtccttcccggcgagctcgccaagcacgctgtctctgagggcaccaaggccgtcactaagttcacatcatcttagatttgaggtagtagctattgggtggcgttggtagttgtgtctcaatttgtctgctactaatagtggtaggagtatccatgtgtagttgggttgcggtaagaattgtgttaaactggtaatatgtttgaaattgctttttgtgg

SEQ ID NO: 39978 - protein, 177 aa, Zea mays subsp. mays
  peptide (1)..(177): Ceres Seq. ID no. 13493128
  misc_feature (49)..(177): Pfam Name: Pfam Description:  Core histone H2A/H2B/H3/H4
  misc_feature (29)..(177): NCBI GI NO: 122022 NR Description: Histone H2B
  misc_feature (29)..(177): NCBI GI NO: 399854 NR Description: Histone H2B.2
  misc_feature (29)..(177): NCBI GI NO: 1708107 NR Description: Histone H2B
  misc_feature (29)..(177): NCBI GI NO: 3913804 NR Description: Histone H2B.3
  misc_feature (29)..(177): NCBI GI NO: 399853 NR Description: Histone H2B.1
  misc_feature (29)..(177): NCBI GI NO: 34895838 NR Description: putative histone H2B
  misc_feature (22)..(177): NCBI GI NO: 122041 NR Description: Histone H2B-IV
  misc_feature (32)..(177): NCBI GI NO: 34876159 NR Description: similar to Histone H2B 291B [Rattus norvegicus]
  misc_feature (30)..(174): NCBI GI NO: 15223150 NR Description: histone H2B family [Arabidopsis thaliana]
  misc_feature (2)..(173): NCBI GI NO: 18596433 NR Description: similar to bA370B6.1 (similar to histone H2B)
IEIDRANPRFAVAAFPASHHRETPAAASMAPKAEKKPAAKKPAEEEPAAAKAPAGKKPKAEKRLPAAKSSGKEGGDKKGKKKAKKSVETYKIYIFKVLKQVHPDIGISSKAMSIMNSFINDIFEKLAGEAAKLARYNKKPTITSREIQTSVRLVLPGELAKHAVSEGTKAVTKFTSS

SEQ ID NO: 39979 - protein, 164 aa, Zea mays subsp. mays
  peptide (1)..(164): Ceres Seq. ID no. 13493129
  misc_feature (55)..(164): NCBI GI NO: 17505204 NR Description: histone 1, H2bc; H2B histone family, member S
RNRPSESSLRSRSLSCITPPRNPSSRIDGAQGGEEARCEEASGGGARCREGPGGEEAQGREAPPGGQVVRQRRRRQEGQEEGEEVGGDLQDLHLQGAEAGPPRHRHLFQGHVHHELLHQRHLREARRRGCQACALQQEAHHHLSGDSNLCSPCPSRRARQARCL

SEQ ID NO: 39980 - protein, 149 aa, Zea mays subsp. mays; identical to SEQ ID NO: 24058
  peptide (1)..(149): Ceres Seq. ID no. 13493130
  misc_feature (21)..(149): Pfam Name: Pfam Description:  Core histone H2A/H2B/H3/H4
  misc_feature (1)..(149): NCBI GI NO: 122022 NR Description: Histone H2B
  misc_feature (1)..(149): NCBI GI NO: 399854 NR Description: Histone H2B.2
  misc_feature (1)..(149): NCBI GI NO: 1708107 NR Description: Histone H2B
  misc_feature (1)..(149): NCBI GI NO: 3913804 NR Description: Histone H2B.3
  misc_feature (1)..(149): NCBI GI NO: 399853 NR Description: Histone H2B.1
  misc_feature (1)..(149): NCBI GI NO: 34895838 NR Description: putative histone H2B
  misc_feature (1)..(149): NCBI GI NO: 122041 NR Description: Histone H2B-IV
  misc_feature (4)..(149): NCBI GI NO: 34876159 NR Description: similar to Histone H2B 291B [Rattus norvegicus]
  misc_feature (2)..(146): NCBI GI NO: 15223150 NR Description: histone H2B family [Arabidopsis thaliana]
  misc_feature (1)..(145): NCBI GI NO: 18596433 NR Description: similar to bA370B6.1 (similar to histone H2B)

SEQ ID NO: 39981 - DNA, 2706 bp, Zea mays subsp. mays
  misc_feature (1)..(2706): Ceres Seq. ID no. 12361500
gcacgagaccattacctagaacatcctaatcgaaaaattatcgatcccagccccaggccatggcgacgaggtggaggaggtcgctgctctgggtcgccgtcgtccagttcctgaccctgtgcgtcgccgagcatctcgtagtggaagcatacaaaaagtcctacattgtgtatctgggatcacatgcatatggccgtgatgcgtcggcggaggagcatgctcgcgcaacccagtctcaccaccacctcctggcatcgatcctcggcggcgacgacgaccaccaccatgagacggcgcggcagtccatcttctactcctacaccaagagcagcatcaatggcttcgcggcgcacctggaggagtcggtcgcgcagcagatcgcggagcaccctgaggtggtggcggtgctggagagcaagatgctcaagctgcacaccacgcggtcctgggacttcatggacctggagcgcgacggtcacgtcctccctggctccatctggaaccacgctaggttcggacaggacgtcatcatcgccagtctcgacagcggagtgtggcccgagtcccacagcttccaagacgacggcggccaagtgccagctcgctggaagggctcctgtcaagacaccgttaagtacggtgtcgcctgcaaccgcaaactcatcggcgctaggttcttcaacaaagacatgctctttagcaacccagccgtggtgaacgccaactggacgcgcgacaccgagggccacggcacccacacgctctccaccgccgccggtggctttgtgccccgtgccagtctcttcggctatgccactggcacagccaaaggcggcgcgccgcgtgcgcgcgtcgccgcttataaggtttgctggtcgggagagtgcgccgccgccgacgtccttgcgggcttcgagtccgccatccatgacggcgccgacgtcatttccgtctccttcggtcaggacgcgcccctcgccgatgacgtcaagtcactcttccacgagcctgtcatgctcggctcgctccacgccgccatccacggtgtctccgtcatctgctccgccggcaactccggcccgtacgatgacaccgtcgtcaatgccgcgccatgggtcaccacagtcgccgccaccaccgtcgacagagacttccccaacgttctcaccctcggcaatagcgtgcgccttaggggaacgagcctcgagtctactacgctgcactccagcatgctctacccgatgatcgacgccgcgcgcgccgcgcgcaccacctctaacccgtacgacgcggccagctgcgggctcggcaccctcgaccctgctgccatcaggggcaagatcgtcgtgtgtcgccgcggcggcggaggcggaggcgacgtctcccgagtcagcaaggggatggccgtgctcgaggccgggggagccgggatgatcctcgccaacgacaggatggacggtgacgacatcgtcgcagacccgcacgtcctcccggccaccatgatcacctacagcgaggccgtctctctgtacggctacatggagtccaccagcaaccccgtcgccaacatctcacccgccaagacggaggtgggcgtcaagaactcgccgtccgtggcgggcttctcctcccgcgggcccagcgggactctgccgtacgtgctcaagcccgacatcgccgcgccgggggtcgacatcctggccgccttcaccgagtacgtcggccccacggagctcgcctccgacaagcgccgctccgagtacgccatcctgtccggcacgtccatggcctgcccacacgtctccggcgtcatcgctctcctcaaggcggcgcgccccgagtggagccccgccgcgatgcgctccgcgatcatgaccacggcgcgcacccaggacaacacgggagcgcccatgcgcgaccacgacggcaaggaggccaacgccttcgcctacggcgccggcaacgtgcaccccaaccgcgccgtcgacccgggcctcgtgtacgacgccggccccgacgactacttcaccttcctctgcgccatgggcatctccgcggcagacatgaagcggctcagcgccggcaagttcgcgtgcccagctaatagcgctaaggaggcgcccgccatggaggacctcaactacccgtccatcgtggtgccgtcgctgcgcggcacgcagacggtgacgcgacggctgaagaacgtcggccgtccggccaagtacctcgcgtcctggcgcgcgccggttgggatcaccatggaggtgaagccgagggtgcttgagttcagcaaggtcggtgaggaaaaggagttcaaggtgacggtgacgtcgcagcaggacaagctcgggatgggctacgtctttgggaggctcgtctggacagacgggacccactatgtcagaagccccgtcgtcgtcaacgccctcgcatgatctatccagttcgtgctaactagagtacactacctactactactacttgagggccttgtggatttttgtgacatcttagataagtagtaaggctctaaaatatatttttatttcttcttgttattattagtaaagaaatgagataggtttttttttgcttagctaaaagacatatcatctataataaattttggctctttgcatgggaacttgaattaatggtaaaaaactgcatataatataatgaagggaaaagggcacttctagtttc

SEQ ID NO: 39982 - protein, 791 aa, Zea mays subsp. mays
  peptide (1)..(791): Ceres Seq. ID no. 12361501
  misc_feature (386)..(494): Pfam Name: Pfam Description:  PA domain
  misc_feature (35)..(790): NCBI GI NO: 24414066 NR Description: subtilisin-like serine protease
  misc_feature (23)..(787): NCBI GI NO: 22325457 NR Description: subtilisin-like serine protease AIR3
  misc_feature (23)..(787): NCBI GI NO: 11358862 NR Description: subtilisin-like proteinase AIR3, auxin-induced
  misc_feature (34)..(787): NCBI GI NO: 9757901 NR Description: serine protease-like protein
  misc_feature (23)..(772): NCBI GI NO: 20198252 NR Description: subtilisin-like serine protease AIR3
  misc_feature (30)..(769): NCBI GI NO: 26451139 NR Description: putative subtilisin-like protease
  misc_feature (87)..(786): NCBI GI NO: 34911518 NR Description: putative subtilisin-like protease
  misc_feature (74)..(790): NCBI GI NO: 18418552 NR Description: subtilisin-like serine protease
  misc_feature (82)..(785): NCBI GI NO: 7435657 NR Description: subtilisin-like proteinase (EC 3
  misc_feature (83)..(788): NCBI GI NO: 18425181 NR Description: subtilisin-like serine protease ARA12
MATRWRRSLLWVAVVQFLTLCVAEHLVVEAYKKSYIVYLGSHAYGRDASAEEHARATQSHHHLLASILGGDDDHHHETARQSIFYSYTKSSINGFAAHLEESVAQQIAEHPEVVAVLESKMLKLHTTRSWDFMDLERDGHVLPGSIWNHARFGQDVIIASLDSGVWPESHSFQDDGGQVPARWKGSCQDTVKYGVACNRKLIGARFFNKDMLFSNPAVVNANWTRDTEGHGTHTLSTAAGGFVPRASLFGYATGTAKGGAPRARVAAYKVCWSGECAAADVLAGFESAIHDGADVISVSFGQDAPLADDVKSLFHEPVMLGSLHAAIHGVSVICSAGNSGPYDDTVVNAAPWVTTVAATTVDRDFPNVLTLGNSVRLRGTSLESTTLHSSMLYPMIDAARAARTTSNPYDAASCGLGTLDPAAIRGKIVVCRRGGGGGGDVSRVSKGMAVLEAGGAGMILANDRMDGDDIVADPHVLPATMITYSEAVSLYGYMESTSNPVANISPAKTEVGVKNSPSVAGFSSRGPSGTLPYVLKPDIAAPGVDILAAFTEYVGPTELASDKRRSEYAILSGTSMACPHVSGVIALLKAARPEWSPAAMRSAIMTTARTQDNTGAPMRDHDGKEANAFAYGAGNVHPNRAVDPGLVYDAGPDDYFTFLCAMGISAADMKRLSAGKFACPANSAKEAPAMEDLNYPSIVVPSLRGTQTVTRRLKNVGRPAKYLASWRAPVGITMEVKPRVLEFSKVGEEKEFKVTVTSQQDKLGMGYVFGRLVWTDGTHYVRSPVVVNALA

SEQ ID NO: 39983 - protein, 671 aa, Zea mays subsp. mays
  peptide (1)..(671): Ceres Seq. ID no. 12361502
  misc_feature (266)..(374): Pfam Name: Pfam Description:  PA domain
  misc_feature (1)..(670): NCBI GI NO: 24414066 NR Description: subtilisin-like serine protease
  misc_feature (1)..(667): NCBI GI NO: 22325457 NR Description: subtilisin-like serine protease AIR3
  misc_feature (1)..(667): NCBI GI NO: 11358862 NR Description: subtilisin-like proteinase AIR3, auxin-induced
  misc_feature (1)..(667): NCBI GI NO: 9757901 NR Description: serine protease-like protein
  misc_feature (1)..(652): NCBI GI NO: 20198252 NR Description: subtilisin-like serine protease AIR3
  misc_feature (1)..(649): NCBI GI NO: 26451139 NR Description: putative subtilisin-like protease
  misc_feature (1)..(666): NCBI GI NO: 34911518 NR Description: putative subtilisin-like protease
  misc_feature (1)..(670): NCBI GI NO: 18418552 NR Description: subtilisin-like serine protease
  misc_feature (1)..(665): NCBI GI NO: 7435657 NR Description: subtilisin-like proteinase (EC 3
  misc_feature (1)..(668): NCBI GI NO: 18425181 NR Description: subtilisin-like serine protease ARA12
MLKLHTTRSWDFMDLERDGHVLPGSIWNHARFGQDVIIASLDSGVWPESHSFQDDGGQVPARWKGSCQDTVKYGVACNRKLIGARFFNKDMLFSNPAVVNANWTRDTEGHGTHTLSTAAGGFVPRASLFGYATGTAKGGAPRARVAAYKVCWSGECAAADVLAGFESAIHDGADVISVSFGQDAPLADDVKSLFHEPVMLGSLHAAIHGVSVICSAGNSGPYDDTVVNAAPWVTTVAATTVDRDFPNVLTLGNSVRLRGTSLESTTLHSSMLYPMIDAARAARTTSNPYDAASCGLGTLDPAAIRGKIVVCRRGGGGGGDVSRVSKGMAVLEAGGAGMILANDRMDGDDIVADPHVLPATMITYSEAVSLYGYMESTSNPVANISPAKTEVGVKNSPSVAGFSSRGPSGTLPYVLKPDIAAPGVDILAAFTEYVGPTELASDKRRSEYAILSGTSMACPHVSGVIALLKAARPEWSPAAMRSAIMTTARTQDNTGAPMRDHDGKEANAFAYGAGNVHPNRAVDPGLVYDAGPDDYFTFLCAMGISAADMKRLSAGKFACPANSAKEAPAMEDLNYPSIVVPSLRGTQTVTRRLKNVGRPAKYLASWRAPVGITMEVKPRVLEFSKVGEEKEFKVTVTSQQDKLGMGYVFGRLVWTDGTHYVRSPVVVNALA

SEQ ID NO: 39984 - protein, 659 aa, Zea mays subsp. mays
  peptide (1)..(659): Ceres Seq. ID no. 12361503
  misc_feature (254)..(362): Pfam Name: Pfam Description:  PA domain
  misc_feature (1)..(658): NCBI GI NO: 24414066 NR Description: subtilisin-like serine protease
  misc_feature (1)..(655): NCBI GI NO: 22325457 NR Description: subtilisin-like serine protease AIR3
  misc_feature (1)..(655): NCBI GI NO: 11358862 NR Description: subtilisin-like proteinase AIR3, auxin-induced
  misc_feature (1)..(655): NCBI GI NO: 9757901 NR Description: serine protease-like protein
  misc_feature (1)..(640): NCBI GI NO: 20198252 NR Description: subtilisin-like serine protease AIR3
  misc_feature (1)..(637): NCBI GI NO: 26451139 NR Description: putative subtilisin-like protease
  misc_feature (1)..(654): NCBI GI NO: 34911518 NR Description: putative subtilisin-like protease
  misc_feature (1)..(658): NCBI GI NO: 18418552 NR Description: subtilisin-like serine protease
  misc_feature (1)..(653): NCBI GI NO: 7435657 NR Description: subtilisin-like proteinase (EC 3
  misc_feature (1)..(656): NCBI GI NO: 18425181 NR Description: subtilisin-like serine protease ARA12
MDLERDGHVLPGSIWNHARFGQDVIIASLDSGVWPESHSFQDDGGQVPARWKGSCQDTVKYGVACNRKLIGARFFNKDMLFSNPAVVNANWTRDTEGHGTHTLSTAAGGFVPRASLFGYATGTAKGGAPRARVAAYKVCWSGECAAADVLAGFESAIHDGADVISVSFGQDAPLADDVKSLFHEPVMLGSLHAAIHGVSVICSAGNSGPYDDTVVNAAPWVTTVAATTVDRDFPNVLTLGNSVRLRGTSLESTTLHSSMLYPMIDAARAARTTSNPYDAASCGLGTLDPAAIRGKIVVCRRGGGGGGDVSRVSKGMAVLEAGGAGMILANDRMDGDDIVADPHVLPATMITYSEAVSLYGYMESTSNPVANISPAKTEVGVKNSPSVAGFSSRGPSGTLPYVLKPDIAAPGVDILAAFTEYVGPTELASDKRRSEYAILSGTSMACPHVSGVIALLKAARPEWSPAAMRSAIMTTARTQDNTGAPMRDHDGKEANAFAYGAGNVHPNRAVDPGLVYDAGPDDYFTFLCAMGISAADMKRLSAGKFACPANSAKEAPAMEDLNYPSIVVPSLRGTQTVTRRLKNVGRPAKYLASWRAPVGITMEVKPRVLEFSKVGEEKEFKVTVTSQQDKLGMGYVFGRLVWTDGTHYVRSPVVVNALA

SEQ ID NO: 39985 - DNA, 1885 bp, Zea mays subsp. mays; identical to SEQ ID NO: 35649
  misc_feature (1)..(1885): Ceres Seq. ID no. 12435283

SEQ ID NO: 39986 - protein, 548 aa, Zea mays subsp. mays; identical to SEQ ID NO: 35650
  peptide (1)..(548): Ceres Seq. ID no. 12435284
  misc_feature (100)..(328): Pfam Name: Pfam Description:  HlyD family secretion protein
  misc_feature (1)..(35): NCBI GI NO: 11991110 NR Description: monosaccharide transporter 1 [Oryza sativa]

SEQ ID NO: 39987 - protein, 534 aa, Zea mays subsp. mays; identical to SEQ ID NO: 35651
  peptide (1)..(534): Ceres Seq. ID no. 12435285
  misc_feature (86)..(314): Pfam Name: Pfam Description:  HlyD family secretion protein
  misc_feature (1)..(21): NCBI GI NO: 11991110 NR Description: monosaccharide transporter 1 [Oryza sativa]

SEQ ID NO: 39988 - protein, 458 aa, Zea mays subsp. mays; identical to SEQ ID NO: 35652
  peptide (1)..(458): Ceres Seq. ID no. 12435286
  misc_feature (1)..(437): Pfam Name: and other Pfam Description: Sugar
  misc_feature (1)..(448): NCBI GI NO: 32489200 NR Description: OSJNBa0027G07.27
  misc_feature (1)..(458): NCBI GI NO: 11991110 NR Description: monosaccharide transporter 1 [Oryza sativa]
  misc_feature (1)..(449): NCBI GI NO: 21741620 NR Description: OSJNBa0027G07.12
  misc_feature (1)..(447): NCBI GI NO: 21740734 NR Description: OSJNBa0086B14.28
  misc_feature (1)..(448): NCBI GI NO: 15218693 NR Description: monosaccharide transporter, putative
  misc_feature (1)..(453): NCBI GI NO: 30349813 NR Description: putative monosaccharide-H+ symporter
  misc_feature (1)..(450): NCBI GI NO: 34915514 NR Description: monosaccharide transporter 3
  misc_feature (1)..(449): NCBI GI NO: 30349804 NR Description: monosaccharide-H+ symporter [Datisca glomerata]
  misc_feature (1)..(449): NCBI GI NO: 3915039 NR Description: Sugar carrier protein C
  misc_feature (1)..(449): NCBI GI NO: 81619 NR Description: glucose transport protein STP1

SEQ ID NO: 39989 - DNA, 1889 bp, Zea mays subsp. mays
  misc_feature (1)..(1889): Ceres Seq. ID no. 12359044
cccggtttattttttcttcgtcctggatgcgtcggtcgcgtgtttgatctgactaagccgcggaggagggtgctagatgtccgtgcggtgggcggtggctcccgagggcgaccggagttaggtccttgccgccttcagtgcggtggggaagcgagacattgaaggcgcagaacccaaagaatgggtaagagaggaaagtggtttagtgcggtgaagaaagtcttcagctcctccgatccagatggaaaggaagccaaggcccagaaggcagacaaatcgaaatccaagaggagatggccatttggaaagtccaagcactcggagccttccatatcgacggtgccaggcactgctccagcagtagctccgttgccatcaccaccagcaactcagccccactctctgggagatcaaagatgtcaatccagttgaaacagacagtgagcagaacaagcatgcctactccgttgcgcttgcgtctgctgtcgctgctgaagctgcagcagttgctgcccaggctgctgcggaagttgtccgcctcacagcagttaccacggctgcaccaaagatgcctgttagttcgagggaataacttgccgccaccaagattcagactgccttcaggggttatctggcaaggagagcattgcgtgcactaagagggctagttagattgaagtcgcttgttgatggaaatgctgtcaaacgccaaaccgctcacaccttgcaatgcacacaagcaatgacaagagttcaaactcaaatctactctagaagggtgaagttggaggaggagaaacaggctcttcaaagacaactccaattgaaacatcaaagggaacttgagaaaatgaagattgatgaagattgggatcacagccatcaatccaaagagcaaattgaggccaacctaatgatgaaacaggaagctgcactgaggcgagagagagcacttgcatatgcattttctcaccagtggaggaattctggtcgaactataacccctacttttacggaacctgggaaccccaactggggctggagctggatggagcgctggatgacagcaagaccatgggagagtcggttggcggcggcatcggacaaggaccctaaagaacgtgctgtgacaaagaatgcgagcaccagtgctgttcgagtacctgtatcccgtgccatctcgattcagagaccagcaacaccaaacaagtcgagccgcccaccaagccggcagtcactttcaaccccgccatcgaagaccccgtcagcctcaggaaaggccaggccggcaagtccaaggaacagttggctgtacaaggaggatgacctgaggagcatcacgagcatccgctccgagcgcccaaggaggcagagcacgggtggaggctcggtccgggacgataccagcctgaccagcacaccacctctccccagctacatgcagtcgaccgagtctgcacgggccaagtctcggtaccgcagtctactactgactgagaagcttgaggttcctgagagagcgcctctggcccactccgttgtcaagaagcgcctgtcgttccccgtcgtcgagaagccaagcgttgtgccgacagagaagcccagggaaagagtgaggcgccattccgaccctccgaaggtcgatcctgcgacgctcaaggatgcccctgctgcctgaccagtgaccaggccttatgtgattgttaggtttcgtgctcttttaacaccgtgatgtattatctgagttaggttgctttgttcgtgtcatcgtatgatctgtccgggttgattttgagacagttctaactgtgtttacagacaatgcgtgatgctaaatgtatgtgtggttggttggctttaaatgtactgatatgatagtatttgatttc

SEQ ID NO: 39990 - protein, 311 aa, Zea mays subsp. mays
  peptide (1)..(311): Ceres Seq. ID no. 12359045
  misc_feature (1)..(38): NCBI GI NO: 34908016 NR Description: P0460C04.18
  misc_feature (1)..(288): NCBI GI NO: 15982840 NR Description: AT5g03040/F15A17_70 [Arabidopsis thaliana]
  misc_feature (1)..(188): NCBI GI NO: 15231175 NR Description: unknown protein; protein id: At3g52290.1
  misc_feature (1)..(127): NCBI GI NO: 18414094 NR Description: putative protein; protein id: At5g03040
  misc_feature (1)..(306): NCBI GI NO: 15232741 NR Description: putative SF16 protein; protein id: At3g09710.1
  misc_feature (1)..(204): NCBI GI NO: 15225299 NR Description: putative SF16 protein {Helianthus annuus}
  misc_feature (1)..(224): NCBI GI NO: 11292162 NR Description: hypothetical protein F15A17
  misc_feature (1)..(211): NCBI GI NO: 15233296 NR Description: unknown protein; protein id: At3g22190.1
  misc_feature (1)..(278): NCBI GI NO: 11994738 NR Description: contains similarity to SF16protein~gene_id:MKA23
  misc_feature (1)..(288): NCBI GI NO: 15225258 NR Description: putative SF16 protein {Helianthus annuus}
MTRVQTQIYSRRVKLEEEKQALQRQLQLKHQRELEKMKIDEDWDHSHQSKEQIEANLMMKQEAALRRERALAYAFSHQWRNSGRTITPTFTEPGNPNWGWSWMERWMTARPWESRLAAASDKDPKERAVTKNASTSAVRVPVSRAISIQRPATPNKSSRPPSRQSLSTPPSKTPSASGKARPASPRNSWLYKEDDLRSITSIRSERPRRQSTGGGSVRDDTSLTSTPPLPSYMQSTESARAKSRYRSLLLTEKLEVPERAPLAHSVVKKRLSFPVVEKPSVVPTEKPRERVRRHSDPPKVDPATLKDAPAA

SEQ ID NO: 39991 - protein, 275 aa, Zea mays subsp. mays
  peptide (1)..(275): Ceres Seq. ID no. 12359046
  misc_feature (1)..(252): NCBI GI NO: 15982840 NR Description: AT5g03040/F15A17_70 [Arabidopsis thaliana]
  misc_feature (1)..(152): NCBI GI NO: 15231175 NR Description: unknown protein; protein id: At3g52290.1
  misc_feature (1)..(91): NCBI GI NO: 18414094 NR Description: putative protein; protein id: At5g03040
  misc_feature (1)..(270): NCBI GI NO: 15232741 NR Description: putative SF16 protein; protein id: At3g09710.1
  misc_feature (1)..(168): NCBI GI NO: 15225299 NR Description: putative SF16 protein {Helianthus annuus}
  misc_feature (1)..(188): NCBI GI NO: 11292162 NR Description: hypothetical protein F15A17
  misc_feature (1)..(175): NCBI GI NO: 15233296 NR Description: unknown protein; protein id: At3g22190.1
  misc_feature (1)..(242): NCBI GI NO: 11994738 NR Description: contains similarity to SF16protein~gene_id:MKA23
  misc_feature (1)..(252): NCBI GI NO: 15225258 NR Description: putative SF16 protein {Helianthus annuus}
  misc_feature (1)..(208): NCBI GI NO: 34903518 NR Description: P0001B06.11
MKIDEDWDHSHQSKEQIEANLMMKQEAALRRERALAYAFSHQWRNSGRTITPTFTEPGNPNWGWSWMERWMTARPWESRLAAASDKDPKERAVTKNASTSAVRVPVSRAISIQRPATPNKSSRPPSRQSLSTPPSKTPSASGKARPASPRNSWLYKEDDLRSITSIRSERPRRQSTGGGSVRDDTSLTSTPPLPSYMQSTESARAKSRYRSLLLTEKLEVPERAPLAHSVVKKRLSFPVVEKPSVVPTEKPRERVRRHSDPPKVDPATLKDAPAA

SEQ ID NO: 39992 - protein, 254 aa, Zea mays subsp. mays
  peptide (1)..(254): Ceres Seq. ID no. 12359047
  misc_feature (1)..(231): NCBI GI NO: 15982840 NR Description: AT5g03040/F15A17_70 [Arabidopsis thaliana]
  misc_feature (1)..(131): NCBI GI NO: 15231175 NR Description: unknown protein; protein id: At3g52290.1
  misc_feature (1)..(70): NCBI GI NO: 18414094 NR Description: putative protein; protein id: At5g03040
  misc_feature (1)..(249): NCBI GI NO: 15232741 NR Description: putative SF16 protein; protein id: At3g09710.1
  misc_feature (1)..(147): NCBI GI NO: 15225299 NR Description: putative SF16 protein {Helianthus annuus}
  misc_feature (1)..(167): NCBI GI NO: 11292162 NR Description: hypothetical protein F15A17
  misc_feature (1)..(154): NCBI GI NO: 15233296 NR Description: unknown protein; protein id: At3g22190.1
  misc_feature (1)..(221): NCBI GI NO: 11994738 NR Description: contains similarity to SF16protein~gene_id:MKA23
  misc_feature (1)..(231): NCBI GI NO: 15225258 NR Description: putative SF16 protein {Helianthus annuus}
  misc_feature (1)..(187): NCBI GI NO: 34903518 NR Description: P0001B06.11
MMKQEAALRRERALAYAFSHQWRNSGRTITPTFTEPGNPNWGWSWMERWMTARPWESRLAAASDKDPKERAVTKNASTSAVRVPVSRAISIQRPATPNKSSRPPSRQSLSTPPSKTPSASGKARPASPRNSWLYKEDDLRSITSIRSERPRRQSTGGGSVRDDTSLTSTPPLPSYMQSTESARAKSRYRSLLLTEKLEVPERAPLAHSVVKKRLSFPVVEKPSVVPTEKPRERVRRHSDPPKVDPATLKDAPAA

SEQ ID NO: 39993 - DNA, 1718 bp, Zea mays subsp. mays
  misc_feature (1)..(1718): Ceres Seq. ID no. 12368120
gaggaagccttggcctgccgaccaaaccatgcttgcgcgccgactcgcggcccccgacggcggtaggctgttctctgcggcgtcctccgcctccgcccgaggcggtcacgcgggtggcgacacactagggaagcgcctgctgaagctcatctacccgaagcggagcgcggtggtggtgctgcagcggtgggcggacgaaggccgcaccgtgcagaagtaccagctcaaccgcgtcgtcagggagcttcggaagtacggtcgcttcaagcacgccctggagatatgcgagtggatgcggacccagccggagatgcggctgcttccgggggatcacgcggtgcaccttgacctcgtcgccaaggtcaggggactcgccagtgccaccaagttcttcgaggacatgccggagcgcgccaaggggccgtccacctgcaacgcgctgctgcacgcgtacgtacagaatggcgcaagagagaaggccgaggccatgctggcggagatggcccgtgttgggtacctcacctgtgccctgcccttcaaccacatgatgtcgctctacatggcgactggtgagctcgagcgggtgccagaaatgatcaaggagctaaggaggtacacactccccgacctcgttacctacaacatatggctgacatactgctccaaaaaggacagcgtgaagagtgccgaaaaggtctttggtctgatgaaggatgactgcgtggttcctgattggatgaccttcagcttgctcggtagcatttacatcaacgccggactccatgtggaaggtcggaacgcgttggtggagatggagaagagggcctccaggaaggagcgagctgcttactcatcgctcctcaccctgtatgcaagcttgtcagatagaggtaacttggacagagtatggaataagatgagaggaaccttcaggaagttcagtgacacagagtacaagtgcatgctcacttccctcttgaggtttgacgacatagcagcagcagaaagcatttttagtgagtgggaatcaacatctggaacacgtgattcaaggatcccaaacacgatcctttcatattacatcaagaatggcatgataaaaaaggcagagagctttcttgaccacattgtggagaaaggagtcaagcccagctatagcacatgggaggcattcgtctggggttatctcggtgacaagacggacaaagtccttgagtgcatgaagaaagccctgtcatgcttggagaaatgggagccgaaccatgagctcgctaccgcgatcttttctcagatcgagaagacaggtgacattgaagctgcagagaagctcctggtcatattccgggatgcagagtatgttaccactgagatgtacaactcagtcttgcgcacttatgcagaggccaagctcatgcctctgatagttgacgaacgcatggagcaggataaggtggccatggatgtggaaaccaagagattgttgaggttgaccagcaaatatccaatcggtgaggtttcagtatcgatgtcttgaggtgtgccaacaatagaagggtgtttcaggatgcaatgtgtactagcccttacgttttcatgcactttagttctgaagtacaatgcaatgcaaataacaaacatttagttttgaagtgcaatacagatggttgtgattttttttgcatacttatctaacttgttggactgtattgtctctatct

SEQ ID NO: 39994 - protein, 510 aa, Zea mays subsp. mays
  peptide (1)..(510): Ceres Seq. ID no. 12368121
  misc_feature (177)..(210): Pfam Name: Pfam Description:  PPR repeat
  misc_feature (20)..(510): NCBI GI NO: 15235508 NR Description: hypothetical protein; protein id: At4g02820
  misc_feature (20)..(510): NCBI GI NO: 17064738 NR Description: Unknown protein [Arabidopsis thaliana]
  misc_feature (44)..(462): NCBI GI NO: 22329290 NR Description: hypothetical protein; protein id: At1g02150
  misc_feature (44)..(462): NCBI GI NO: 20453085 NR Description: At1g02150/T7I23.8 [Arabidopsis thaliana]
  misc_feature (70)..(494): NCBI GI NO: 15219808 NR Description: hypothetical protein; protein id: At1g60770.1
  misc_feature (22)..(484): NCBI GI NO: 15240937 NR Description: putative protein; protein id: At5g27460.1
  misc_feature (38)..(494): NCBI GI NO: 37535776 NR Description: putative leaf protein
  misc_feature (41)..(498): NCBI GI NO: 22328859 NR Description: unknown protein; protein id: At4g21705.1
  misc_feature (22)..(463): NCBI GI NO: 34393591 NR Description: putative DNA-binding protein
  misc_feature (40)..(476): NCBI GI NO: 15225409 NR Description: hypothetical protein; protein id: At2g20710.1
RKPWPADQTMLARRLAAPDGGRLFSAASSASARGGHAGGDTLGKRLLKLIYPKRSAVVVLQRWADEGRTVQKYQLNRVVRELRKYGRFKHALEICEWMRTQPEMRLLPGDHAVHLDLVAKVRGLASATKFFEDMPERAKGPSTCNALLHAYVQNGAREKAEAMLAEMARVGYLTCALPFNHMMSLYMATGELERVPEMIKELRRYTLPDLVTYNIWLTYCSKKDSVKSAEKVFGLMKDDCVVPDWMTFSLLGSIYINAGLHVEGRNALVEMEKRASRKERAAYSSLLTLYASLSDRGNLDRVWNKMRGTFRKFSDTEYKCMLTSLLRFDDIAAAESIFSEWESTSGTRDSRIPNTILSYYIKNGMIKKAESFLDHIVEKGVKPSYSTWEAFVWGYLGDKTDKVLECMKKALSCLEKWEPNHELATAIFSQIEKTGDIEAAEKLLVIFRDAEYVTTEMYNSVLRTYAEAKLMPLIVDERMEQDKVAMDVETKRLLRLTSKYPIGEVSVSMS

SEQ ID NO: 39995 - protein, 501 aa, Zea mays subsp. mays
  peptide (1)..(501): Ceres Seq. ID no. 12368122
  misc_feature (168)..(201): Pfam Name: Pfam Description:  PPR repeat
  misc_feature (11)..(501): NCBI GI NO: 15235508 NR Description: hypothetical protein; protein id: At4g02820
  misc_feature (11)..(501): NCBI GI NO: 17064738 NR Description: Unknown protein [Arabidopsis thaliana]
  misc_feature (35)..(453): NCBI GI NO: 22329290 NR Description: hypothetical protein; protein id: At1g02150
  misc_feature (35)..(453): NCBI GI NO: 20453085 NR Description: At1g02150/T7I23.8 [Arabidopsis thaliana]
  misc_feature (61)..(485): NCBI GI NO: 15219808 NR Description: hypothetical protein; protein id: At1g60770.1
  misc_feature (13)..(475): NCBI GI NO: 15240937 NR Description: putative protein; protein id: At5g27460.1
  misc_feature (29)..(485): NCBI GI NO: 37535776 NR Description: putative leaf protein
  misc_feature (32)..(489): NCBI GI NO: 22328859 NR Description: unknown protein; protein id: At4g21705.1
  misc_feature (13)..(454): NCBI GI NO: 34393591 NR Description: putative DNA-binding protein
  misc_feature (31)..(467): NCBI GI NO: 15225409 NR Description: hypothetical protein; protein id: At2g20710.1
MLARRLAAPDGGRLFSAASSASARGGHAGGDTLGKRLLKLIYPKRSAVVVLQRWADEGRTVQKYQLNRVVRELRKYGRFKHALEICEWMRTQPEMRLLPGDHAVHLDLVAKVRGLASATKFFEDMPERAKGPSTCNALLHAYVQNGAREKAEAMLAEMARVGYLTCALPFNHMMSLYMATGELERVPEMIKELRRYTLPDLVTYNIWLTYCSKKDSVKSAEKVFGLMKDDCVVPDWMTFSLLGSIYINAGLHVEGRNALVEMEKRASRKERAAYSSLLTLYASLSDRGNLDRVWNKMRGTFRKFSDTEYKCMLTSLLRFDDIAAAESIFSEWESTSGTRDSRIPNTILSYYIKNGMIKKAESFLDHIVEKGVKPSYSTWEAFVWGYLGDKTDKVLECMKKALSCLEKWEPNHELATAIFSQIEKTGDIEAAEKLLVIFRDAEYVTTEMYNSVLRTYAEAKLMPLIVDERMEQDKVAMDVETKRLLRLTSKYPIGEVSVSMS

SEQ ID NO: 39996 - protein, 413 aa, Zea mays subsp. mays
  peptide (1)..(413): Ceres Seq. ID no. 12368123
  misc_feature (80)..(113): Pfam Name: Pfam Description:  PPR repeat
  misc_feature (1)..(413): NCBI GI NO: 15235508 NR Description: hypothetical protein; protein id: At4g02820
  misc_feature (1)..(413): NCBI GI NO: 17064738 NR Description: Unknown protein [Arabidopsis thaliana]
  misc_feature (1)..(365): NCBI GI NO: 22329290 NR Description: hypothetical protein; protein id: At1g02150
  misc_feature (1)..(365): NCBI GI NO: 20453085 NR Description: At1g02150/T7I23.8 [Arabidopsis thaliana]
  misc_feature (1)..(397): NCBI GI NO: 15219808 NR Description: hypothetical protein; protein id: At1g60770.1
  misc_feature (1)..(387): NCBI GI NO: 15240937 NR Description: putative protein; protein id: At5g27460.1
  misc_feature (1)..(397): NCBI GI NO: 37535776 NR Description: putative leaf protein
  misc_feature (1)..(401): NCBI GI NO: 22328859 NR Description: unknown protein; protein id: At4g21705.1
  misc_feature (1)..(366): NCBI GI NO: 34393591 NR Description: putative DNA-binding protein
  misc_feature (1)..(379): NCBI GI NO: 15225409 NR Description: hypothetical protein; protein id: At2g20710.1
MRTQPEMRLLPGDHAVHLDLVAKVRGLASATKFFEDMPERAKGPSTCNALLHAYVQNGAREKAEAMLAEMARVGYLTCALPFNHMMSLYMATGELERVPEMIKELRRYTLPDLVTYNIWLTYCSKKDSVKSAEKVFGLMKDDCVVPDWMTFSLLGSIYINAGLHVEGRNALVEMEKRASRKERAAYSSLLTLYASLSDRGNLDRVWNKMRGTFRKFSDTEYKCMLTSLLRFDDIAAAESIFSEWESTSGTRDSRIPNTILSYYIKNGMIKKAESFLDHIVEKGVKPSYSTWEAFVWGYLGDKTDKVLECMKKALSCLEKWEPNHELATAIFSQIEKTGDIEAAEKLLVIFRDAEYVTTEMYNSVLRTYAEAKLMPLIVDERMEQDKVAMDVETKRLLRLTSKYPIGEVSVSMS

SEQ ID NO: 39997 - DNA, 1041 bp, Zea mays subsp. mays
  misc_feature (1)..(1041): Ceres Seq. ID no. 14301986
accgcctccattcctctctgctctgttctgctccaccaccctgatgacgacgaggccagacggcagcgcctccacgcccgcggacaagcagctcgtggcggcctccaacggcaacggcaacggcaacccgctggccgtccgcaaggcgccctccaaggaccggcacagcaaggtggacgggcgaggccggcgcatccgcatgcccatcatctgcgccgctcgcgtgttccagctcacgagggagctcgggcacaagtccgacggacagaccatcgagtggctgctcaggcaggccgagccctccatcatcgccgccaccggcaccggcaccacgccggcctccttctccacctcgtccccgtcatcgctccgctcctcctcgtcctccacagccggcgtccacccgcacgccgccccggcccaggggttctgggcgctgccggcgcgggccgacttcggacagctctggagcttcgcggccgcgccggagatgatggtcgccgcggctgcagcagcagcgccgggcatggccggggaggcgtccgccgccagggtcggcaactacctccccgtcgcgcagggcaacctcaacctgctggcctccttctccggcgggcctgctcccacagcggccgccggacgggccgaggaggagaccgcccgctaagggtcgtcaattcccagtctctctgtgtgtggctcaatccgggatagacagtgtcactctcacccaactctccatttctttttttggggttcagttcagatcagtgttggccacccgaattgggtggccttccactccatcccagtgagcaatcaagcaaggaggagctgcatcagctctccctcccgtcctatctatctatatgattttttttctttctttttgagcattggattagtgctctcaactacccacaagtgtttattagtcagccagctccttcagtgctactagcagctcagttcagtccatggtatgtgtccggattgtttgctgatgtgcttgttgatcaattaatggacataatggttgcg

SEQ ID NO: 39998 - protein, 237 aa, Zea mays subsp. mays
  peptide (1)..(237): Ceres Seq. ID no. 14301987
TASIPLCSVLLHHPDDDEARRQRLHARGQAARGGLQRQRQRQPAGRPQGALQGPAQQGGRARPAHPHAHHLRRSRVPAHEGARAQVRRTDHRVAAQAGRALHHRRHRHRHHAGLLLHLVPVIAPLLLVLHSRRPPARRPGPGVLGAAGAGRLRTALELRGRAGDDGRRGCSSSAGHGRGGVRRQGRQLPPRRAGQPQPAGLLLRRACSHSGRRTGRGGDRPLRVVNSQSLCVWLNPG

SEQ ID NO: 39999 - protein, 221 aa, Zea mays subsp. mays
  peptide (1)..(221): Ceres Seq. ID no. 14301988
  misc_feature (44)..(134): Pfam Name: Pfam Description:  TCP family transcription factor
  misc_feature (31)..(134): NCBI GI NO: 15237274 NR Description: TCP family transcription factor, putative
  misc_feature (139)..(218): NCBI GI NO: 15237274 NR Description: TCP family transcription factor, putative
  misc_feature (31)..(134): NCBI GI NO: 26452377 NR Description: unknown protein [Arabidopsis thaliana]
  misc_feature (139)..(218): NCBI GI NO: 26452377 NR Description: unknown protein [Arabidopsis thaliana]
  misc_feature (33)..(132): NCBI GI NO: 15241596 NR Description: TCP family transcription factor, putative
  misc_feature (142)..(218): NCBI GI NO: 15241596 NR Description: TCP family transcription factor, putative
  misc_feature (20)..(213): NCBI GI NO: 18409345 NR Description: TCP family transcription factor, putative
  misc_feature (11)..(130): NCBI GI NO: 15218305 NR Description: TCP family transcription factor, putative
  misc_feature (24)..(142): NCBI GI NO: 15217857 NR Description: TCP family transcription factor, putative
  misc_feature (46)..(129): NCBI GI NO: 11357581 NR Description: hypothetical protein F1P2
PPPFLSALFCSTTLMTTRPDGSASTPADKQLVAASNGNGNGNPLAVRKAPSKDRHSKVDGRGRRIRMPIICAARVFQLTRELGHKSDGQTIEWLLRQAEPSIIAATGTGTTPASFSTSSPSSLRSSSSSTAGVHPHAAPAQGFWALPARADFGQLWSFAAAPEMMVAAAAAAAPGMAGEASAARVGNYLPVAQGNLNLLASFSGGPAPTAAAGRAEEETAR

SEQ ID NO: 40000 - protein, 207 aa, Zea mays subsp. mays
  peptide (1)..(207): Ceres Seq. ID no. 14301989
  misc_feature (30)..(120): Pfam Name: Pfam Description:  TCP family transcription factor
  misc_feature (17)..(120): NCBI GI NO: 15237274 NR Description: TCP family transcription factor, putative
  misc_feature (125)..(204): NCBI GI NO: 15237274 NR Description: TCP family transcription factor, putative
  misc_feature (17)..(120): NCBI GI NO: 26452377 NR Description: unknown protein [Arabidopsis thaliana]
  misc_feature (125)..(204): NCBI GI NO: 26452377 NR Description: unknown protein [Arabidopsis thaliana]
  misc_feature (19)..(118): NCBI GI NO: 15241596 NR Description: TCP family transcription factor, putative
  misc_feature (128)..(204): NCBI GI NO: 15241596 NR Description: TCP family transcription factor, putative
  misc_feature (6)..(199): NCBI GI NO: 18409345 NR Description: TCP family transcription factor, putative
  misc_feature (1)..(116): NCBI GI NO: 15218305 NR Description: TCP family transcription factor, putative
  misc_feature (10)..(128): NCBI GI NO: 15217857 NR Description: TCP family transcription factor, putative
  misc_feature (32)..(115): NCBI GI NO: 11357581 NR Description: hypothetical protein F1P2
MTTRPDGSASTPADKQLVAASNGNGNGNPLAVRKAPSKDRHSKVDGRGRRIRMPIICAARVFQLTRELGHKSDGQTIEWLLRQAEPSIIAATGTGTTPASFSTSSPSSLRSSSSSTAGVHPHAAPAQGFWALPARADFGQLWSFAAAPEMMVAAAAAAAPGMAGEASAARVGNYLPVAQGNLNLLASFSGGPAPTAAAGRAEEETAR

SEQ ID NO: 40001 - DNA, 942 bp, Zea mays subsp. mays
  misc_feature (1)..(942): Ceres Seq. ID no. 12358481
catgttcacaacttaagaactgtttattctggtgtcagtgacagcactgcatttgccactccattccccttccctgggaaacaacagttatctgggatgcatgcacaaggggctaccaatgaaaagacatggcaagatttccgtctttttgagccttcaaaacagaacatgctccaaaattaccaccaaagaaatcagcaaaatggtcaaatagctgaacaagagccagaaaattctgtctggtctagcagttaccatgtgtgattcagtaacttgtaccaggatgattgctggagttgctggggactattggattaagtggcacagcctgatctattgagcttggcccatacctgcagcactctgttaaatttcttttgagcatggtggtctttgaagcatgacaatggctgctcttaggtttgggattgccaccatcttctgggacaaagagggagtggaggttgattgatctgtcggcagtctgatggggatgaattatacgaggtcttcaacgctgacacaaagggttaatgaaacaaactcgaatccattgattataggcgctccgcacggaccatatgattcatctctcgttggacatgtagctacaagaatggtgtcagtgggcggttgctgccgcaactaaaagtccattcagtgtggatgtcagttgggctacgctatctaagaataaaaagtttgaggaacaacgagcatgttgccaagtagtttctcaagtataagttactgcgtctagttatattgttcctttcctttcggcaacaatgtgtcatgttgctgtcgcgctagttgcaagttgcaattaaacgtttggaacagtttgtcatgttatttgtgtggcttctatatggctatatgtttgctggaactgtatggaccaaccctcagtgctacctacaaaagtttatgatttgactg

SEQ ID NO: 40002 - protein, 87 aa, Zea mays subsp. mays
  peptide (1)..(87): Ceres Seq. ID no. 12358482
  misc_feature (1)..(87): NCBI GI NO: 35215104 NR Description: putative cig3
  misc_feature (1)..(87): NCBI GI NO: 34015261 NR Description: putative cytokinin inducibl protein
HVHNLRTVYSGVSDSTAFATPFPFPGKQQLSGMHAQGATNEKTWQDFRLFEPSKQNMLQNYHQRNQQNGQIAEQEPENSVWSSSYHV

SEQ ID NO: 40003 - protein, 55 aa, Zea mays subsp. mays
  peptide (1)..(55): Ceres Seq. ID no. 12358483
  misc_feature (1)..(55): NCBI GI NO: 35215104 NR Description: putative cig3
  misc_feature (1)..(55): NCBI GI NO: 34015261 NR Description: putative cytokinin inducibl protein
MHAQGATNEKTWQDFRLFEPSKQNMLQNYHQRNQQNGQIAEQEPENSVWSSSYHV

SEQ ID NO: 40004 - protein, 53 aa, Zea mays subsp. mays
  peptide (1)..(53): Ceres Seq. ID no. 12358484
MGMNYTRSSTLTQRVNETNSNPLIIGAPHGPYDSSLVGHVATRMVSVGGCCRN

SEQ ID NO: 40005 - DNA, 2125 bp, Zea mays subsp. mays; identical to SEQ ID NO: 39094
  misc_feature (1)..(2125): Ceres Seq. ID no. 12366165

SEQ ID NO: 40006 - protein, 547 aa, Zea mays subsp. mays; identical to SEQ ID NO: 39095
  peptide (1)..(547): Ceres Seq. ID no. 12366166
  misc_feature (53)..(81): Pfam Name: Pfam Description:  EF hand
  misc_feature (1)..(547): NCBI GI NO: 18402561 NR Description: expressed protein; protein id: At3g20290
  misc_feature (123)..(547): NCBI GI NO: 9294546 NR Description: contains similarity to EH domain containingproteins~gene_id:MQC12
  misc_feature (1)..(110): NCBI GI NO: 9294546 NR Description: contains similarity to EH domain containingproteins~gene_id:MQC12
  misc_feature (14)..(547): NCBI GI NO: 38345297 NR Description: OSJNBa0043A12.19
  misc_feature (11)..(493): NCBI GI NO: 18412957 NR Description: score=11.7, E=0.66,N=1; protein id: At4g05520.1
  misc_feature (129)..(542): NCBI GI NO: 39594267 NR Description: Hypothetical protein CBG18887
  misc_feature (126)..(542): NCBI GI NO: 17565130 NR Description: Receptor Mediated Endocytosis 1 isoform 1
  misc_feature (118)..(542): NCBI GI NO: 7206819 NR Description: Receptor mediated endocytosis protein 1, isoform a
  misc_feature (118)..(542): NCBI GI NO: 17565132 NR Description: Receptor Mediated Endocytosis 1 RME-1 isoform 2
  misc_feature (139)..(543): NCBI GI NO: 34861835 NR Description: similar to EH-domain containing 1

SEQ ID NO: 40007 - protein, 502 aa, Zea mays subsp. mays; identical to SEQ ID NO: 39096
  peptide (1)..(502): Ceres Seq. ID no. 12366167
  misc_feature (8)..(36): Pfam Name: Pfam Description:  EF hand
  misc_feature (1)..(502): NCBI GI NO: 18402561 NR Description: expressed protein; protein id: At3g20290
  misc_feature (78)..(502): NCBI GI NO: 9294546 NR Description: contains similarity to EH domain containingproteins~gene_id:MQC12
  misc_feature (1)..(65): NCBI GI NO: 9294546 NR Description: contains similarity to EH domain containingproteins~gene_id:MQC12
  misc_feature (1)..(502): NCBI GI NO: 38345297 NR Description: OSJNBa0043A12.19
  misc_feature (1)..(448): NCBI GI NO: 18412957 NR Description: score=11.7, E=0.66,N=1; protein id: At4g05520.1
  misc_feature (84)..(497): NCBI GI NO: 39594267 NR Description: Hypothetical protein CBG18887
  misc_feature (81)..(497): NCBI GI NO: 17565130 NR Description: Receptor Mediated Endocytosis 1 isoform 1
  misc_feature (73)..(497): NCBI GI NO: 7206819 NR Description: Receptor mediated endocytosis protein 1, isoform a
  misc_feature (73)..(497): NCBI GI NO: 17565132 NR Description: Receptor Mediated Endocytosis 1 RME-1 isoform 2
  misc_feature (94)..(498): NCBI GI NO: 34861835 NR Description: similar to EH-domain containing 1

SEQ ID NO: 40008 - protein, 470 aa, Zea mays subsp. mays; identical to SEQ ID NO: 39097
  peptide (1)..(470): Ceres Seq. ID no. 12366168
  misc_feature (1)..(470): NCBI GI NO: 18402561 NR Description: expressed protein; protein id: At3g20290
  misc_feature (46)..(470): NCBI GI NO: 9294546 NR Description: contains similarity to EH domain containingproteins~gene_id:MQC12
  misc_feature (1)..(33): NCBI GI NO: 9294546 NR Description: contains similarity to EH domain containingproteins~gene_id:MQC12
  misc_feature (1)..(470): NCBI GI NO: 38345297 NR Description: OSJNBa0043A12.19
  misc_feature (1)..(416): NCBI GI NO: 18412957 NR Description: score=11.7, E=0.66,N=1; protein id: At4g05520.1
  misc_feature (52)..(465): NCBI GI NO: 39594267 NR Description: Hypothetical protein CBG18887
  misc_feature (49)..(465): NCBI GI NO: 17565130 NR Description: Receptor Mediated Endocytosis 1 isoform 1
  misc_feature (41)..(465): NCBI GI NO: 7206819 NR Description: Receptor mediated endocytosis protein 1, isoform a
  misc_feature (41)..(465): NCBI GI NO: 17565132 NR Description: Receptor Mediated Endocytosis 1 RME-1 isoform 2
  misc_feature (62)..(466): NCBI GI NO: 34861835 NR Description: similar to EH-domain containing 1

SEQ ID NO: 40009 - DNA, 979 bp, Zea mays subsp. mays
  misc_feature (1)..(979): Ceres Seq. ID no. 12443269
agaatctcgtctgtatcccacccctcttttttgaccctgagctcctagaagccatccccaaatcgccctacgcccacggttccacctcctcgtccacgaggtgaggaaaccctagcgaccgaccatggcgttgctcccgcgcaccgcgcggctggccctcctttccaccccgcgggcgtactccgctgccgctgctgcgggcgcctccccgacgtccccagcgccatacgggggcgcccccccaccggcgatgtcgaagacggccgagttcgtggtctctaaggtggacgacctgatgaactgggcgcgtaagggctcgatctggcccatgaccttcgggctcgcctgctgcgcggtggagatgatgcacgccggcgcgtcccgctacgacttcgaccggttcggcgtcatcttccgtccgtcgccgcgccagtccgattgcatgatcgtcgccggcacgctcaccaacaagatggctccggccctccgcaaggtttatgaccaaatgcctgagcctaggtgggttatttcaatgggcagctgtgccaacggtggtggatactaccattactcctactctgttgtacgtggatgtgaccgtatagtccctgtggacatctacgtccctgggtgcccaccaactgctgaggcactgctgtacggcgttcttcagctccaaaagaagatcaacaggcgtaaggatttccttcactggtggaccaagtgaagcatgctcctgctatttctcggtcgctatgttttctttgcatttgacctgcttgtcacatctgaaataaggacacactttgctcggatttgcaagttctctctttttttttcttggtgtgtctggaaggatgtatgtccaggttgtttgatgaaacatataactcgtgtaccagcagacttgctgtgaatctattttcgagcttctagtcttccactgtaatacagcaaatacaccatctccttgtctgcc

SEQ ID NO: 40010 - protein, 200 aa, Zea mays subsp. mays
  peptide (1)..(200): Ceres Seq. ID no. 12443270
  misc_feature (78)..(185): Pfam Name: Pfam Description:  NADH ubiquinone oxidoreductase, 20 Kd subunit
  misc_feature (1)..(200): NCBI GI NO: 34910678 NR Description: putative NADH dehydrogenase
  misc_feature (6)..(200): NCBI GI NO: 1171866 NR Description: NADH-ubiquinone oxidoreductase 20 kDa subunit
  misc_feature (1)..(200): NCBI GI NO: 11277624 NR Description: NADH2 dehydrogenase (ubiquinone) (EC 1
  misc_feature (1)..(200): NCBI GI NO: 15239782 NR Description: NADH dehydrogenase
  misc_feature (1)..(200): NCBI GI NO: 9652180 NR Description: NADH-ubiquinone oxidoreductase subunit PSST
  misc_feature (1)..(200): NCBI GI NO: 2499328 NR Description: NADH-ubiquinone oxidoreductase 20 kDa subunit
  misc_feature (28)..(200): NCBI GI NO: 9652190 NR Description: NADH-ubiquinone oxidoreductase subunit PSST
  misc_feature (43)..(200): NCBI GI NO: 11466592 NR Description: NADH dehydrogenase subunit 10 [Rhodomonas salina]
  misc_feature (40)..(200): NCBI GI NO: 34328788 NR Description: NADH:ubiquinone oxidoreductase subunit 10
  misc_feature (44)..(200): NCBI GI NO: 11466535 NR Description: NADH dehydrogenase, subunit 10
MALLPRTARLALLSTPRAYSAAAAAGASPTSPAPYGGAPPPAMSKTAEFVVSKVDDLMNWARKGSIWPMTFGLACCAVEMMHAGASRYDFDRFGVIFRPSPRQSDCMIVAGTLTNKMAPALRKVYDQMPEPRWVISMGSCANGGGYYHYSYSVVRGCDRIVPVDIYVPGCPPTAEALLYGVLQLQKKINRRKDFLHWWTK

SEQ ID NO: 40011 - protein, 158 aa, Zea mays subsp. mays; identical to SEQ ID NO: 24504
  peptide (1)..(158): Ceres Seq. ID no. 12443271
  misc_feature (36)..(143): Pfam Name: Pfam Description:  NADH ubiquinone oxidoreductase, 20 Kd subunit
  misc_feature (1)..(158): NCBI GI NO: 34910678 NR Description: putative NADH dehydrogenase
  misc_feature (1)..(158): NCBI GI NO: 1171866 NR Description: NADH-ubiquinone oxidoreductase 20 kDa subunit
  misc_feature (1)..(158): NCBI GI NO: 11277624 NR Description: NADH2 dehydrogenase (ubiquinone) (EC 1
  misc_feature (1)..(158): NCBI GI NO: 15239782 NR Description: NADH dehydrogenase
  misc_feature (1)..(158): NCBI GI NO: 9652180 NR Description: NADH-ubiquinone oxidoreductase subunit PSST
  misc_feature (1)..(158): NCBI GI NO: 2499328 NR Description: NADH-ubiquinone oxidoreductase 20 kDa subunit
  misc_feature (1)..(158): NCBI GI NO: 9652190 NR Description: NADH-ubiquinone oxidoreductase subunit PSST
  misc_feature (1)..(158): NCBI GI NO: 11466592 NR Description: NADH dehydrogenase subunit 10 [Rhodomonas salina]
  misc_feature (1)..(158): NCBI GI NO: 34328788 NR Description: NADH:ubiquinone oxidoreductase subunit 10
  misc_feature (2)..(158): NCBI GI NO: 11466535 NR Description: NADH dehydrogenase, subunit 10

SEQ ID NO: 40012 - protein, 143 aa, Zea mays subsp. mays; identical to SEQ ID NO: 24505
  peptide (1)..(143): Ceres Seq. ID no. 12443272
  misc_feature (21)..(128): Pfam Name: Pfam Description:  NADH ubiquinone oxidoreductase, 20 Kd subunit
  misc_feature (1)..(143): NCBI GI NO: 34910678 NR Description: putative NADH dehydrogenase
  misc_feature (1)..(143): NCBI GI NO: 1171866 NR Description: NADH-ubiquinone oxidoreductase 20 kDa subunit
  misc_feature (1)..(143): NCBI GI NO: 11277624 NR Description: NADH2 dehydrogenase (ubiquinone) (EC 1
  misc_feature (1)..(143): NCBI GI NO: 15239782 NR Description: NADH dehydrogenase
  misc_feature (1)..(143): NCBI GI NO: 9652180 NR Description: NADH-ubiquinone oxidoreductase subunit PSST
  misc_feature (1)..(143): NCBI GI NO: 2499328 NR Description: NADH-ubiquinone oxidoreductase 20 kDa subunit
  misc_feature (1)..(143): NCBI GI NO: 9652190 NR Description: NADH-ubiquinone oxidoreductase subunit PSST
  misc_feature (1)..(143): NCBI GI NO: 11466592 NR Description: NADH dehydrogenase subunit 10 [Rhodomonas salina]
  misc_feature (1)..(143): NCBI GI NO: 34328788 NR Description: NADH:ubiquinone oxidoreductase subunit 10
  misc_feature (1)..(143): NCBI GI NO: 11466535 NR Description: NADH dehydrogenase, subunit 10

SEQ ID NO: 40013 - DNA, 2197 bp, Zea mays subsp. mays
  misc_feature (1)..(2197): Ceres Seq. ID no. 12424079
gttgggtgccgtgcgagctccaagtacccctgtctccctcccgtcttgcgggcttgcctttgcctgttccatttccggctcctccagttggtagtgtcgtttcaatgcgagacgccgtccttcacgagcttgattgcccttgaaagcgaagttggtgttggtgtcgttgccggtgaggaggaagaggggatatatggctcccacggaagaggcagcaggggaggacgagcggctgctgaaggatcttctcgcttcttcgtcagataaggaaggagaggatgaagagagtacaaagacacagtccgatgaatctactaggggggattgtgataacggcgggtccgtagccgccttatcgagtgaagatgtcaatgataggcatggtagtgacagcaacagccaatgtgctgaatctgatggtgcttgcagtcaagtgcctggaacaggctccaagagcagcaacgatgagtgcggtgctgaagtgcctcaaaccggatccaagagcagtaatgatgaagatgacgggtgtgctgatgaaatgccaggagccctctccaagagcagtagcaatgacagcagtgagtgcgctgaccggagctctccgcgagctgtcctagatatctcagtatctggcagcatggactcggatgacagtgtttcagtcgagcagtcagcagaatcaaaccaaaatgtgcagtggaggaacctgatcagcagtctaatactcagaagaaagaagtccatgggcagcgcagtgacgttccctcagagacccaagagcaaagggcttagagggtacttggagaggatgaggagtggtaagaaccaaatggactgcagcgccattgctcctgagatcctccctcagatcgggaaatggaggccatcatggcggagctttgactacaatgagctttgtgctgcaactgacagttttggttcagagaaaatgattgggaagggagggcatgcagaggtatacaaaggacagcttgctgatggacaatttgtggcagtgaagagattaacaaaaggcggtaacaaagaggacagagttagcgatttcttatctgagcttggaataatagcccatgttaaccacccaaacgcagcacagctcctggggtttagcgtggaagggggtctgcacttggttcttcagttctcacctcatggaagccttgcttctgttctacatggtacaaaggagcccctgaagtggaaagtcaggttcaaaattgcacttggaattgctgaagggctgctttatctacatgaaggctgccatcgccgcataattcacagagacatcaaggcatctaatatccttctaactgaagactaccaacctcagatatcagattttgggcttgcaaagtggctccctgacaaattgacccatcatgttgtgtatcccattgaaggcacattcgggtatatggccccagaatacttcatgcatgggatcataaatgagaagaccgatgtgttcgcatatggagttctacttcttgaactagttaccgggcggaaagcggtggactcatccagacagagcctagtgatatgggcaaaaccgctgcttgatgcgaacaacatccaagagctggtggatccttcccttggtaacgagtatgaccctgaagagatggtgtacacactagcagtggcatccttgtgcatccaccacagctcaacctcgaggcctagtatgaaatcggtagtctgtttcttgaagggtgaccgggagtcacttgagctggtgagaaggcctaaaatcgtgaagcccctgatgtttgactcgggcgattcagaagattacacgcgctcgagctacctcagcgatctcaaccggcacaagcagctcgcgctggagcagtgaacatcgaattgagtttgaacagattcactgtaattttgtacatcatttacgctgtacccatgcacactgtgatcctcccacctttccacataggttttaaaaattgtatggattgatgtgggggggtcagctatcattcactacatggttgctgatctatgctgtaactttgcccagagtttcagcgcatgttacggccctgcgatcatctgtatcatccggactgtccgattgtaatgtcaggtgatgcagccactagcgaccagtctgctatactgttcgtgaaatggtgattgttagcatggttgtgtcctg

SEQ ID NO: 40014 - protein, 562 aa, Zea mays subsp. mays
  peptide (1)..(562): Ceres Seq. ID no. 12424080
  misc_feature (126)..(561): NCBI GI NO: 26452369 NR Description: unknown protein [Arabidopsis thaliana]
  misc_feature (126)..(561): NCBI GI NO: 30698132 NR Description: protein kinase, putative [Arabidopsis thaliana]
  misc_feature (108)..(561): NCBI GI NO: 15810235 NR Description: putative Pto kinase interactor
  misc_feature (108)..(561): NCBI GI NO: 18416299 NR Description: Pto kinase interactor - like protein
  misc_feature (108)..(561): NCBI GI NO: 11358733 NR Description: Pto kinase interactor-like protein
  misc_feature (67)..(560): NCBI GI NO: 30687061 NR Description: protein kinase family [Arabidopsis thaliana]
  misc_feature (133)..(529): NCBI GI NO: 15239245 NR Description: serine/threonine protein kinase-like
  misc_feature (130)..(560): NCBI GI NO: 22330852 NR Description: putative serine/threonine protein kinase
  misc_feature (230)..(546): NCBI GI NO: 40253745 NR Description: SERK1 protein-like
  misc_feature (230)..(550): NCBI GI NO: 15224251 NR Description: putative protein kinase; protein id: At2g18890.1
MAPTEEAAGEDERLLKDLLASSSDKEGEDEESTKTQSDESTRGDCDNGGSVAALSSEDVNDRHGSDSNSQCAESDGACSQVPGTGSKSSNDECGAEVPQTGSKSSNDEDDGCADEMPGALSKSSSNDSSECADRSSPRAVLDISVSGSMDSDDSVSVEQSAESNQNVQWRNLISSLILRRKKSMGSAVTFPQRPKSKGLRGYLERMRSGKNQMDCSAIAPEILPQIGKWRPSWRSFDYNELCAATDSFGSEKMIGKGGHAEVYKGQLADGQFVAVKRLTKGGNKEDRVSDFLSELGIIAHVNHPNAAQLLGFSVEGGLHLVLQFSPHGSLASVLHGTKEPLKWKVRFKIALGIAEGLLYLHEGCHRRIIHRDIKASNILLTEDYQPQISDFGLAKWLPDKLTHHVVYPIEGTFGYMAPEYFMHGIINEKTDVFAYGVLLLELVTGRKAVDSSRQSLVIWAKPLLDANNIQELVDPSLGNEYDPEEMVYTLAVASLCIHHSSTSRPSMKSVVCFLKGDRESLELVRRPKIVKPLMFDSGDSEDYTRSSYLSDLNRHKQLALEQ

SEQ ID NO: 40015 - protein, 447 aa, Zea mays subsp. mays
  peptide (1)..(447): Ceres Seq. ID no. 12424081
  misc_feature (11)..(446): NCBI GI NO: 26452369 NR Description: unknown protein [Arabidopsis thaliana]
  misc_feature (11)..(446): NCBI GI NO: 30698132 NR Description: protein kinase, putative [Arabidopsis thaliana]
  misc_feature (1)..(446): NCBI GI NO: 15810235 NR Description: putative Pto kinase interactor
  misc_feature (1)..(446): NCBI GI NO: 18416299 NR Description: Pto kinase interactor - like protein
  misc_feature (1)..(446): NCBI GI NO: 11358733 NR Description: Pto kinase interactor-like protein
  misc_feature (1)..(445): NCBI GI NO: 30687061 NR Description: protein kinase family [Arabidopsis thaliana]
  misc_feature (18)..(414): NCBI GI NO: 15239245 NR Description: serine/threonine protein kinase-like
  misc_feature (15)..(445): NCBI GI NO: 22330852 NR Description: putative serine/threonine protein kinase
  misc_feature (115)..(431): NCBI GI NO: 40253745 NR Description: SERK1 protein-like
  misc_feature (115)..(435): NCBI GI NO: 15224251 NR Description: putative protein kinase; protein id: At2g18890.1
MPGALSKSSSNDSSECADRSSPRAVLDISVSGSMDSDDSVSVEQSAESNQNVQWRNLISSLILRRKKSMGSAVTFPQRPKSKGLRGYLERMRSGKNQMDCSAIAPEILPQIGKWRPSWRSFDYNELCAATDSFGSEKMIGKGGHAEVYKGQLADGQFVAVKRLTKGGNKEDRVSDFLSELGIIAHVNHPNAAQLLGFSVEGGLHLVLQFSPHGSLASVLHGTKEPLKWKVRFKIALGIAEGLLYLHEGCHRRIIHRDIKASNILLTEDYQPQISDFGLAKWLPDKLTHHVVYPIEGTFGYMAPEYFMHGIINEKTDVFAYGVLLLELVTGRKAVDSSRQSLVIWAKPLLDANNIQELVDPSLGNEYDPEEMVYTLAVASLCIHHSSTSRPSMKSVVCFLKGDRESLELVRRPKIVKPLMFDSGDSEDYTRSSYLSDLNRHKQLALEQ

SEQ ID NO: 40016 - protein, 414 aa, Zea mays subsp. mays
  peptide (1)..(414): Ceres Seq. ID no. 12424082
  misc_feature (1)..(413): NCBI GI NO: 26452369 NR Description: unknown protein [Arabidopsis thaliana]
  misc_feature (1)..(413): NCBI GI NO: 30698132 NR Description: protein kinase, putative [Arabidopsis thaliana]
  misc_feature (1)..(413): NCBI GI NO: 15810235 NR Description: putative Pto kinase interactor
  misc_feature (1)..(413): NCBI GI NO: 18416299 NR Description: Pto kinase interactor - like protein
  misc_feature (1)..(413): NCBI GI NO: 11358733 NR Description: Pto kinase interactor-like protein
  misc_feature (1)..(412): NCBI GI NO: 30687061 NR Description: protein kinase family [Arabidopsis thaliana]
  misc_feature (1)..(381): NCBI GI NO: 15239245 NR Description: serine/threonine protein kinase-like
  misc_feature (1)..(412): NCBI GI NO: 22330852 NR Description: putative serine/threonine protein kinase
  misc_feature (82)..(398): NCBI GI NO: 40253745 NR Description: SERK1 protein-like
  misc_feature (82)..(402): NCBI GI NO: 15224251 NR Description: putative protein kinase; protein id: At2g18890.1
MDSDDSVSVEQSAESNQNVQWRNLISSLILRRKKSMGSAVTFPQRPKSKGLRGYLERMRSGKNQMDCSAIAPEILPQIGKWRPSWRSFDYNELCAATDSFGSEKMIGKGGHAEVYKGQLADGQFVAVKRLTKGGNKEDRVSDFLSELGIIAHVNHPNAAQLLGFSVEGGLHLVLQFSPHGSLASVLHGTKEPLKWKVRFKIALGIAEGLLYLHEGCHRRIIHRDIKASNILLTEDYQPQISDFGLAKWLPDKLTHHVVYPIEGTFGYMAPEYFMHGIINEKTDVFAYGVLLLELVTGRKAVDSSRQSLVIWAKPLLDANNIQELVDPSLGNEYDPEEMVYTLAVASLCIHHSSTSRPSMKSVVCFLKGDRESLELVRRPKIVKPLMFDSGDSEDYTRSSYLSDLNRHKQLALEQ

SEQ ID NO: 40017 - DNA, 988 bp, Zea mays subsp. mays
  misc_feature (1)..(988): Ceres Seq. ID no. 12360539
gcacgagaccattacctagaacatcctaatcgaaaacaaggactacccttacgccgtggacgggctggtcatctggtgggcgatcgagcggtgggtcaaggagtacctggacgtctactaccccaacgacggcgagctccagcgcgacgtggagctgcaggcgtggtggaaggaggtgcgcgaggaggcgcacggcgacctcaaggaccgagactggtggcccaggatggacgccgtccagcggctggccagggcgtgcacgaccgtcatctgggtagcgtccgcgctgcacgcggccgtcaacttcgggcagtacccgtacgccgggtacctgccgaaccggccgaccgtgagccggcggccgatgccggagccgggcagcgacgactacaagaagctggaggcggggcagaaggaggcggacgcggtgttcatccgcaccatcaccagccagttccagaccatcctgggcatctcgctcatcgagatcctctccaagcactcctccgacgaggtgtacctcggccagcgcgacgagcctgagcgctggacgtcggacgccagggcgctggacgcgttcagaaggttcggaagccggctggtggagatcgagaagcggatcaggacgatgaacgacagcccgacgttgaagaaccggaaggggccggtggagatgccgtacatgctgctgtaccccaacacgtcggatgtcaccggcgagaagggcgaggggctcactgccatgggcattcccaacagcatctccatatgagcctcctcactgcctgagcggatggtttgtagatgttctgttacgctgtgtgtaatgtgtcgtttattcgttggttttgtcagtctcagggtagggaatggagatgttgattggatccatgatctgtagggttgagagaggagtcacgtctggagaatgttgtcaatgtgtgtttctttcttgttaagaataaaagttcgtcagctcatttatctc

SEQ ID NO: 40018 - protein, 181 aa, Zea mays subsp. mays
  peptide (1)..(181): Ceres Seq. ID no. 12360540
  misc_feature (1)..(158): Pfam Name: Pfam Description:  Lipoxygenase
  misc_feature (1)..(181): NCBI GI NO: 19033554 NR Description: putative lipoxygenase
  misc_feature (1)..(181): NCBI GI NO: 7433147 NR Description: probable lipoxygenase (EC 1.13.11.12) - barley
  misc_feature (1)..(181): NCBI GI NO: 19033550 NR Description: putative lipoxygenase
  misc_feature (1)..(181): NCBI GI NO: 8515851 NR Description: lipoxygenase [Zea mays]
  misc_feature (1)..(181): NCBI GI NO: 38636549 NR Description: 9-lipoxigenase
  misc_feature (1)..(181): NCBI GI NO: 19033549 NR Description: putative lipoxygenase
  misc_feature (1)..(181): NCBI GI NO: 4887227 NR Description: lipoxygenase [Zea mays]
  misc_feature (1)..(181): NCBI GI NO: 12620877 NR Description: lipoxygenase [Zea mays]
  misc_feature (1)..(181): NCBI GI NO: 18481649 NR Description: lipoxygenase [Zea mays]
  misc_feature (1)..(181): NCBI GI NO: 31126788 NR Description: lipoxygenase L-2; lipoxygenase
MDAVQRLARACTTVIWVASALHAAVNFGQYPYAGYLPNRPTVSRRPMPEPGSDDYKKLEAGQKEADAVFIRTITSQFQTILGISLIEILSKHSSDEVYLGQRDEPERWTSDARALDAFRRFGSRLVEIEKRIRTMNDSPTLKNRKGPVEMPYMLLYPNTSDVTGEKGEGLTAMGIPNSISI

SEQ ID NO: 40019 - protein, 180 aa, Zea mays subsp. mays
  peptide (1)..(180): Ceres Seq. ID no. 12360541
ARDHYLEHPNRKQGLPLRRGRAGHLVGDRAVGQGVPGRLLPQRRRAPARRGAAGVVEGGARGGARRPQGPRLVAQDGRRPAAGQGVHDRHLGSVRAARGRQLRAVPVRRVPAEPADREPAADAGAGQRRLQEAGGGAEGGGRGVHPHHHQPVPDHPGHLAHRDPLQALLRRGVPRPARRA

SEQ ID NO: 40020 - protein, 135 aa, Zea mays subsp. mays
  peptide (1)..(135): Ceres Seq. ID no. 12360542
  misc_feature (1)..(112): Pfam Name: Pfam Description:  Lipoxygenase
  misc_feature (1)..(135): NCBI GI NO: 19033554 NR Description: putative lipoxygenase
  misc_feature (1)..(135): NCBI GI NO: 7433147 NR Description: probable lipoxygenase (EC 1.13.11.12) - barley
  misc_feature (1)..(135): NCBI GI NO: 19033550 NR Description: putative lipoxygenase
  misc_feature (1)..(135): NCBI GI NO: 8515851 NR Description: lipoxygenase [Zea mays]
  misc_feature (1)..(135): NCBI GI NO: 38636549 NR Description: 9-lipoxigenase
  misc_feature (1)..(135): NCBI GI NO: 19033549 NR Description: putative lipoxygenase
  misc_feature (1)..(135): NCBI GI NO: 4887227 NR Description: lipoxygenase [Zea mays]
  misc_feature (1)..(135): NCBI GI NO: 12620877 NR Description: lipoxygenase [Zea mays]
  misc_feature (1)..(135): NCBI GI NO: 18481649 NR Description: lipoxygenase [Zea mays]
  misc_feature (1)..(135): NCBI GI NO: 31126788 NR Description: lipoxygenase L-2; lipoxygenase
MPEPGSDDYKKLEAGQKEADAVFIRTITSQFQTILGISLIEILSKHSSDEVYLGQRDEPERWTSDARALDAFRRFGSRLVEIEKRIRTMNDSPTLKNRKGPVEMPYMLLYPNTSDVTGEKGEGLTAMGIPNSISI

SEQ ID NO: 40021 - DNA, 1362 bp, Zea mays subsp. mays
  misc_feature (1)..(1362): Ceres Seq. ID no. 13493020
agttcaccgtccctccctgtccttgccatggccatccccaccgcccccgccctcctcttcccctccgttctccctaactcattcccccgccggacaccctggcgacacctcgtccggcggcaaccgcgtcacctccgcgcgggccgcccgcgcctgcaggcgccggcgccggctcctcccccggtggcggaggtcgcggcggagcgggacgacacgcctccgctcaggctgctcgagccgccgcaggaggacgaccccttcccgcccgagatggagcccgcggaccctgatttctaccggataggatatgcgcggatgatgcgcgcctatgggatcgagttcctcgaaggccccgacgggatgggcgtctacgcttcccgggacgtggagccacttcgcagagctagagtgattatggagattccgttggagctgatgctgactataactcaaaagaaaccttggatgtttttccctgacattattccactaggccatcctatatttgatgttatcgagtcaacagatccagagacagattgggatctaagattagcatgtcttcttctatatgcatttgatatagaagacaacttttggcagttatattctgattttttgccaagtgttgatgaatgcactagtttgctgctggcaccaaaggaagatctaatggaactagaagatgaagatcttgcttcacaaatgttaaaacaccaggaacgagcaattgacttttggcaaaagcattgggacaaaccaattcctctaaagctgaaacgccttgcacgtgaccatgagagatttctctgggcactgagtatagtacagtctcgttctgtcaacttgaagttgagaatgggagccttcatccaagatgcaaatgtgctagctccttatgctgatatgttgaaccactcacccaatgctaattgcttcctgcattggcgttttaaagaccgtatgcttgaagttatgattaaggctggacaagctatcaagaaaggagacgagatgacgatagattatatgagtggcgtcaacagcaaatttatggaaagatatgggttctcatcaccaacgaatccttgggagctcataaatttctcgagtcctgcaacaattcacatggattccttcttatcggtcttcaatatcgctggcttgcatgatgagctgtaccacaattctgcattgacctcagtagtagaaaccgactttgtggacggagcagtcgtagcagcagccagagcattgccgacatggtcagatggtgatgttcctgcaattcctagtgtggagagaaaatctgctcaggcactgcaagaggagtgccgccaaatgttggattcattcccaact

SEQ ID NO: 40022 - protein, 454 aa, Zea mays subsp. mays
  peptide (1)..(454): Ceres Seq. ID no. 13493021
  misc_feature (47)..(453): NCBI GI NO: 28393566 NR Description: unknown protein [Arabidopsis thaliana]
  misc_feature (47)..(306): NCBI GI NO: 30684996 NR Description: expressed protein [Arabidopsis thaliana]
  misc_feature (47)..(251): NCBI GI NO: 7485732 NR Description: hypothetical protein F18F4
  misc_feature (303)..(453): NCBI GI NO: 7485733 NR Description: hypothetical protein F18F4
  misc_feature (303)..(453): NCBI GI NO: 30685001 NR Description: expressed protein [Arabidopsis thaliana]
  misc_feature (169)..(306): NCBI GI NO: 7485732 NR Description: hypothetical protein F18F4
SSPSLPVLAMAIPTAPALLFPSVLPNSFPRRTPWRHLVRRQPRHLRAGRPRLQAPAPAPPPVAEVAAERDDTPPLRLLEPPQEDDPFPPEMEPADPDFYRIGYARMMRAYGIEFLEGPDGMGVYASRDVEPLRRARVIMEIPLELMLTITQKKPWMFFPDIIPLGHPIFDVIESTDPETDWDLRLACLLLYAFDIEDNFWQLYSDFLPSVDECTSLLLAPKEDLMELEDEDLASQMLKHQERAIDFWQKHWDKPIPLKLKRLARDHERFLWALSIVQSRSVNLKLRMGAFIQDANVLAPYADMLNHSPNANCFLHWRFKDRMLEVMIKAGQAIKKGDEMTIDYMSGVNSKFMERYGFSSPTNPWELINFSSPATIHMDSFLSVFNIAGLHDELYHNSALTSVVETDFVDGAVVAAARALPTWSDGDVPAIPSVERKSAQALQEECRQMLDSFPT

SEQ ID NO: 40023 - protein, 445 aa, Zea mays subsp. mays
  peptide (1)..(445): Ceres Seq. ID no. 13493022
  misc_feature (38)..(444): NCBI GI NO: 28393566 NR Description: unknown protein [Arabidopsis thaliana]
  misc_feature (38)..(297): NCBI GI NO: 30684996 NR Description: expressed protein [Arabidopsis thaliana]
  misc_feature (38)..(242): NCBI GI NO: 7485732 NR Description: hypothetical protein F18F4
  misc_feature (294)..(444): NCBI GI NO: 7485733 NR Description: hypothetical protein F18F4
  misc_feature (294)..(444): NCBI GI NO: 30685001 NR Description: expressed protein [Arabidopsis thaliana]
  misc_feature (160)..(297): NCBI GI NO: 7485732 NR Description: hypothetical protein F18F4
MAIPTAPALLFPSVLPNSFPRRTPWRHLVRRQPRHLRAGRPRLQAPAPAPPPVAEVAAERDDTPPLRLLEPPQEDDPFPPEMEPADPDFYRIGYARMMRAYGIEFLEGPDGMGVYASRDVEPLRRARVIMEIPLELMLTITQKKPWMFFPDIIPLGHPIFDVIESTDPETDWDLRLACLLLYAFDIEDNFWQLYSDFLPSVDECTSLLLAPKEDLMELEDEDLASQMLKHQERAIDFWQKHWDKPIPLKLKRLARDHERFLWALSIVQSRSVNLKLRMGAFIQDANVLAPYADMLNHSPNANCFLHWRFKDRMLEVMIKAGQAIKKGDEMTIDYMSGVNSKFMERYGFSSPTNPWELINFSSPATIHMDSFLSVFNIAGLHDELYHNSALTSVVETDFVDGAVVAAARALPTWSDGDVPAIPSVERKSAQALQEECRQMLDSFPT

SEQ ID NO: 40024 - protein, 364 aa, Zea mays subsp. mays
  peptide (1)..(364): Ceres Seq. ID no. 13493023
  misc_feature (1)..(363): NCBI GI NO: 28393566 NR Description: unknown protein [Arabidopsis thaliana]
  misc_feature (1)..(216): NCBI GI NO: 30684996 NR Description: expressed protein [Arabidopsis thaliana]
  misc_feature (1)..(161): NCBI GI NO: 7485732 NR Description: hypothetical protein F18F4
  misc_feature (213)..(363): NCBI GI NO: 7485733 NR Description: hypothetical protein F18F4
  misc_feature (213)..(363): NCBI GI NO: 30685001 NR Description: expressed protein [Arabidopsis thaliana]
  misc_feature (79)..(216): NCBI GI NO: 7485732 NR Description: hypothetical protein F18F4
MEPADPDFYRIGYARMMRAYGIEFLEGPDGMGVYASRDVEPLRRARVIMEIPLELMLTITQKKPWMFFPDIIPLGHPIFDVIESTDPETDWDLRLACLLLYAFDIEDNFWQLYSDFLPSVDECTSLLLAPKEDLMELEDEDLASQMLKHQERAIDFWQKHWDKPIPLKLKRLARDHERFLWALSIVQSRSVNLKLRMGAFIQDANVLAPYADMLNHSPNANCFLHWRFKDRMLEVMIKAGQAIKKGDEMTIDYMSGVNSKFMERYGFSSPTNPWELINFSSPATIHMDSFLSVFNIAGLHDELYHNSALTSVVETDFVDGAVVAAARALPTWSDGDVPAIPSVERKSAQALQEECRQMLDSFPT

SEQ ID NO: 40025 - DNA, 1936 bp, Zea mays subsp. mays
  misc_feature (1)..(1936): Ceres Seq. ID no. 12435348
gcacgagaccattacctagaacatcctaatcgaaaaagggaaagcattctccaatatccacctcctcctcgcccccctctctctctctaaaagaactgaaaagataagggggaaatcctcaagtgctcgttacataaaccctaacctcgttggattcgcagcaaaagcccaccaattggaagccctccgatgttccagctgcatgctggagctgagccgtgctcggtttgacgaaattttgcatcccttctgtgcttggaccacccgattgaggctgtttctccgagggggcgtgccagcggtttcgcggcccaggtcctcacctgtgctatccggcgccggatccgggtttgttccggtgagaggtcgggcttttggtggggtctgtacagcttggagctcaatttgccggcctgagttggagtcgcgactgcggtggcggtgattgaggtagtcgcgtcgatttggcacgcgtttcctgccatttgggtgagccagcctttcctggcaatcttggcgggcgtttcgtcttgctgcgtggcagaaaggtgtgacctttgtgccgtgcgatgcatcccaaggcacgaatccacgccgacccagtgcgcgaggtcgaccactttgactgcctgccggattcgctcgtcctgctgatcctgaacaaggtcgaggacgtgcgatcgctcggccggtgctacgccgtgtccaagcggctttgtgggcttgtcccccttgtccatgatgtgtatgtcaagattgaccgcgtcgtggcggtcgacggcgacgctgaggacgcgctcaacctgtcatcgccgaagcctcggaacatcttctcgcacttcctgaagctgatgctcttcaccatcatcaagcctttccacaacatgcgcaaccctaatggtactgggaggtcattgttcccgcagctctcgcaccactcgccagcgcaggtgctcaggaacttcacgcacatcaggaatcttcggatcgagctcccctctggggatgtgggtactgaggagggagttctcctgaaatggcgggcagagtatgggagcacacttcagagttgtgtgatcctggggggtacccgggttgaccgcaagcctgttggtggagagcatgagcagtctttggaggataatggaagcatgccagagtctttctataccaacggtgggctgaaacttcgtgtcgtctggacaatcagctctctaattgcggcatcaacgaggcactatcttctccgctcaatcatcaatgaccatcccacacttctgagcttggtactgacagatgccgatggccaaggcacattgtgcatgggggcagagcagctgaaggaattcagagagaaccagttgtcggcatcagcatgttccaacaggactcaggtcccagcctgcaacatgaagctcaagtatgctccatatcttgaactgcctggtggtatggcgttgcaaggcgccactttggtggctatcaaaccctcacctgacggaagcaatggaagccaccctaaccgtaaagaagctgacgcatttgtctttggagcatttgatgggccatttaaggctgctgtgaaggctttgatgaagaggcgcacttaccttctggagatgaatggcttctagaaatcttgtgttcgcggtggtatcgagcttgttggtgctatgcatggcacatttagctaagcttttcacctgtgtaatatccaagaaggcaccatctctagttgctgcttttagtctgctgttttagctctttgtacagtgttaacatttggttatataaaaatcgtatcaagttctctagtgtaatagtgaatctctccatagttcaccatcctggcccctggtgtaatatccaagaaatcatatcaggtacataacattcattttgggattgtgaattgaaagagactgatctgatgccg

SEQ ID NO: 40026 - protein, 354 aa, Zea mays subsp. mays
  peptide (1)..(354): Ceres Seq. ID no. 12435349
  misc_feature (18)..(64): Pfam Name: Pfam Description:  F-box domain
  misc_feature (4)..(354): NCBI GI NO: 34909194 NR Description: P0425G02.20
  misc_feature (120)..(354): NCBI GI NO: 15236865 NR Description: hypothetical protein; protein id: At4g18380.1
  misc_feature (1)..(129): NCBI GI NO: 15236865 NR Description: hypothetical protein; protein id: At4g18380.1
  misc_feature (120)..(354): NCBI GI NO: 15237391 NR Description: putative protein; protein id: At5g46170
  misc_feature (3)..(115): NCBI GI NO: 15237391 NR Description: putative protein; protein id: At5g46170
  misc_feature (88)..(354): NCBI GI NO: 18397400 NR Description: expressed protein; protein id: At1g30200
  misc_feature (3)..(115): NCBI GI NO: 18397400 NR Description: expressed protein; protein id: At1g30200
  misc_feature (120)..(354): NCBI GI NO: 34909910 NR Description: P0665A11.15
  misc_feature (16)..(102): NCBI GI NO: 34909910 NR Description: P0665A11.15
  misc_feature (15)..(354): NCBI GI NO: 18411823 NR Description: expressed protein; protein id: At1g78100
MHPKARIHADPVREVDHFDCLPDSLVLLILNKVEDVRSLGRCYAVSKRLCGLVPLVHDVYVKIDRVVAVDGDAEDALNLSSPKPRNIFSHFLKLMLFTIIKPFHNMRNPNGTGRSLFPQLSHHSPAQVLRNFTHIRNLRIELPSGDVGTEEGVLLKWRAEYGSTLQSCVILGGTRVDRKPVGGEHEQSLEDNGSMPESFYTNGGLKLRVVWTISSLIAASTRHYLLRSIINDHPTLLSLVLTDADGQGTLCMGAEQLKEFRENQLSASACSNRTQVPACNMKLKYAPYLELPGGMALQGATLVAIKPSPDGSNGSHPNRKEADAFVFGAFDGPFKAAVKALMKRRTYLLEMNGF

SEQ ID NO: 40027 - protein, 260 aa, Zea mays subsp. mays
  peptide (1)..(260): Ceres Seq. ID no. 12435350
  misc_feature (1)..(260): NCBI GI NO: 34909194 NR Description: P0425G02.20
  misc_feature (26)..(260): NCBI GI NO: 15236865 NR Description: hypothetical protein; protein id: At4g18380.1
  misc_feature (1)..(35): NCBI GI NO: 15236865 NR Description: hypothetical protein; protein id: At4g18380.1
  misc_feature (26)..(260): NCBI GI NO: 15237391 NR Description: putative protein; protein id: At5g46170
  misc_feature (1)..(21): NCBI GI NO: 15237391 NR Description: putative protein; protein id: At5g46170
  misc_feature (1)..(260): NCBI GI NO: 18397400 NR Description: expressed protein; protein id: At1g30200
  misc_feature (1)..(21): NCBI GI NO: 18397400 NR Description: expressed protein; protein id: At1g30200
  misc_feature (26)..(260): NCBI GI NO: 34909910 NR Description: P0665A11.15
  misc_feature (1)..(260): NCBI GI NO: 18411823 NR Description: expressed protein; protein id: At1g78100
  misc_feature (26)..(260): NCBI GI NO: 15219845 NR Description: hypothetical protein; protein id: At1g22220.1
MLFTIIKPFHNMRNPNGTGRSLFPQLSHHSPAQVLRNFTHIRNLRIELPSGDVGTEEGVLLKWRAEYGSTLQSCVILGGTRVDRKPVGGEHEQSLEDNGSMPESFYTNGGLKLRVVWTISSLIAASTRHYLLRSIINDHPTLLSLVLTDADGQGTLCMGAEQLKEFRENQLSASACSNRTQVPACNMKLKYAPYLELPGGMALQGATLVAIKPSPDGSNGSHPNRKEADAFVFGAFDGPFKAAVKALMKRRTYLLEMNGF

SEQ ID NO: 40028 - protein, 249 aa, Zea mays subsp. mays
  peptide (1)..(249): Ceres Seq. ID no. 12435351
  misc_feature (1)..(249): NCBI GI NO: 34909194 NR Description: P0425G02.20
  misc_feature (15)..(249): NCBI GI NO: 15236865 NR Description: hypothetical protein; protein id: At4g18380.1
  misc_feature (1)..(24): NCBI GI NO: 15236865 NR Description: hypothetical protein; protein id: At4g18380.1
  misc_feature (15)..(249): NCBI GI NO: 15237391 NR Description: putative protein; protein id: At5g46170
  misc_feature (1)..(249): NCBI GI NO: 18397400 NR Description: expressed protein; protein id: At1g30200
  misc_feature (15)..(249): NCBI GI NO: 34909910 NR Description: P0665A11.15
  misc_feature (1)..(249): NCBI GI NO: 18411823 NR Description: expressed protein; protein id: At1g78100
  misc_feature (15)..(249): NCBI GI NO: 15219845 NR Description: hypothetical protein; protein id: At1g22220.1
MRNPNGTGRSLFPQLSHHSPAQVLRNFTHIRNLRIELPSGDVGTEEGVLLKWRAEYGSTLQSCVILGGTRVDRKPVGGEHEQSLEDNGSMPESFYTNGGLKLRVVWTISSLIAASTRHYLLRSIINDHPTLLSLVLTDADGQGTLCMGAEQLKEFRENQLSASACSNRTQVPACNMKLKYAPYLELPGGMALQGATLVAIKPSPDGSNGSHPNRKEADAFVFGAFDGPFKAAVKALMKRRTYLLEMNGF

SEQ ID NO: 40029 - DNA, 2245 bp, Zea mays subsp. mays
  misc_feature (1)..(2245): Ceres Seq. ID no. 12375229
gcacgagaccattacctagaacatcctaatcgaaaaaaaaccgaagcctccccggttatcccccggcctccacctgaccactaccaccacccgggacgtcttccatggcctcctcatagaataagctctatctcaccgcaacaactcctcattacaatccttcaagagagcagcactacactacactacattagagagaggtcgagcgcccctcctccgatccgccggcccgccgagagctagctgctgatcggtcgaggagagtcatggcgacgtcgacgatgcgcgttgccgccggcgtgctgctggtcgtgtcggcgctggcgaccttggcccgggccgaggacccctacctgttcttcgagtggaaggtgacgtacgggaccaggtccctgctgggagtgccccagaaggtcatcctcatcaacggcgagttccctggccccaggatcaactgctcctccaacaacaacatcgtcgtcaacgtcttcaaccagctcgaccatccgctccttttcacctggaacgggatgcagcacaggaagaactcgtggatggacgggatgccaggcacgcagtgccccatcgcgcccaacaccaacttcacgtacaagtggcagcccaaggaccagatcggcagcttcttctacttcccgtccatcggcatgcagcgggcggcgggcgggtacggcgccatcagcgtggtgagccgcctcctcatcccggtccccttcgaccagccgccgccggagagcgaccacgcggtgctcatcggcgactggtacaccaaggaccacgaggtgctggcgcgccagctcgacgccggcaagagcgtgggccgccccgcgggcgtgctcatcaacggcaagggaggcaaggacctggaggccgccgcgcccatgctcaccttcgaggcgggcaagacgtaccgtctccgcgtgtgcaacaccgggatcaaggcgtcgctcaacttccgcatccagggccactacatgaagctcgtggagctggagggctcccacaccctgcaggacgtgtacgactcgctggacgtgcacgtcggcccactgcctctccgtgctggtcgacgccgaccaggcgcccggcgactactacatggtggcctccacgcggttcatccacgacgccaagtccgcctccgccgtcatccgctacgccggctccagcggcgccccgccggcgcccaacatgaccgagccaccggccggctgggcctggtccatcaaccaggccaggtcgttccgctggaacctgacggccagcgccgcgcgccccaacccgcagggctcctaccactacggccagatcaacatcacccgcaccatcaaggtcatggtctcccgcggccacatcgacggcaagctccgctacggcttcaacggcatctcccacagggataccgagacccccctcaagctcgccgagtacttcaacgtcaccgacggggtgttcagctacaaccagatgggcgacgtgccacccgctgttaacgggccactccatgtcatccccaacgtcatcaccgccgagttccggaccttcatcgagatcgtcttcgagaaccccgagaagagcatagactccctccacctcgacggctacgccttcttcggcgtcgggatggggcccgggacgtggtcgccggagatgaggaagacgtacaacctactggacacggtgagccggcacacgatccaggtgtacccgcggtcatggacggcgatcatgctgacattcgacaacgcgggcatgtggagcgtccggtccaacgtctgggagcggtactacctcggggagcagttctacatcagcgtcatctcgccggcgcggtcgctgcgcgacgagtacaacatgcccgacaacgccctccgctgcggcaaggtcgtggggctgccgctgccgccatcctacgcccccgcgcgctaaagacgacgaaggcgccgttttcacctcgtgttctgaccatccagtctaactaacccattcctgtgctgctcggcgaaataaaatcatcaaaaagaacaaagacgaaggaagcctagggaagggagaaggacgttgggtgggggtgagccaaatgagaacgcacggatatatctattcatgtaatcttgagatgccctctcaaatcactgtaatggggtttaaaaaacaatcattgtaatgggagttatatatacttttatcttaacatttatttacaccagcaagtcctggtgtatgc

SEQ ID NO: 40030 - protein, 414 aa, Zea mays subsp. mays
  peptide (1)..(414): Ceres Seq. ID no. 12375230
  misc_feature (6)..(266): NCBI GI NO: 15231228 NR Description: pectinesterase
  misc_feature (25)..(266): NCBI GI NO: 128592 NR Description: POLLEN-SPECIFIC PROTEIN NTP303 PRECURSOR
  misc_feature (6)..(266): NCBI GI NO: 99809 NR Description: pollen-specific protein Bp10
  misc_feature (6)..(266): NCBI GI NO: 114268 NR Description: L-ascorbate oxidase homolog precursor (Ascorbase)
  misc_feature (6)..(266): NCBI GI NO: 99808 NR Description: pollen-specific protein Bp10
  misc_feature (6)..(266): NCBI GI NO: 15222747 NR Description: pectinesterase
  misc_feature (12)..(266): NCBI GI NO: 15231231 NR Description: pectinesterase
  misc_feature (7)..(266): NCBI GI NO: 99807 NR Description: pollen-specific protein Bp10
  misc_feature (7)..(266): NCBI GI NO: 18405425 NR Description: pectinesterase
  misc_feature (1)..(266): NCBI GI NO: 19387132 NR Description: 1-ascorbate oxidase [Petunia x hybrida]
MATSTMRVAAGVLLVVSALATLARAEDPYLFFEWKVTYGTRSLLGVPQKVILINGEFPGPRINCSSNNNIVVNVFNQLDHPLLFTWNGMQHRKNSWMDGMPGTQCPIAPNTNFTYKWQPKDQIGSFFYFPSIGMQRAAGGYGAISVVSRLLIPVPFDQPPPESDHAVLIGDWYTKDHEVLARQLDAGKSVGRPAGVLINGKGGKDLEAAAPMLTFEAGKTYRLRVCNTGIKASLNFRIQGHYMKLVELEGSHTLQDVYDSLDVHVGPLPLRAGRRRPGARRLLHGGLHAVHPRRQVRLRRHPLRRLQRRPAGAQHDRATGRLGLVHQPGQVVPLEPDGQRRAPQPAGLLPLRPDQHHPHHQGHGLPRPHRRQAPLRLQRHLPQGYRDPPQARRVLQRHRRGVQLQPDGRRATRC

SEQ ID NO: 40031 - protein, 409 aa, Zea mays subsp. mays
  peptide (1)..(409): Ceres Seq. ID no. 12375231
  misc_feature (1)..(261): NCBI GI NO: 15231228 NR Description: pectinesterase
  misc_feature (20)..(261): NCBI GI NO: 128592 NR Description: POLLEN-SPECIFIC PROTEIN NTP303 PRECURSOR
  misc_feature (1)..(261): NCBI GI NO: 99809 NR Description: pollen-specific protein Bp10
  misc_feature (1)..(261): NCBI GI NO: 114268 NR Description: L-ascorbate oxidase homolog precursor (Ascorbase)
  misc_feature (1)..(261): NCBI GI NO: 99808 NR Description: pollen-specific protein Bp10
  misc_feature (1)..(261): NCBI GI NO: 15222747 NR Description: pectinesterase
  misc_feature (7)..(261): NCBI GI NO: 15231231 NR Description: pectinesterase
  misc_feature (2)..(261): NCBI GI NO: 99807 NR Description: pollen-specific protein Bp10
  misc_feature (2)..(261): NCBI GI NO: 18405425 NR Description: pectinesterase
  misc_feature (1)..(261): NCBI GI NO: 19387132 NR Description: 1-ascorbate oxidase [Petunia x hybrida]
MRVAAGVLLVVSALATLARAEDPYLFFEWKVTYGTRSLLGVPQKVILINGEFPGPRINCSSNNNIVVNVFNQLDHPLLFTWNGMQHRKNSWMDGMPGTQCPIAPNTNFTYKWQPKDQIGSFFYFPSIGMQRAAGGYGAISVVSRLLIPVPFDQPPPESDHAVLIGDWYTKDHEVLARQLDAGKSVGRPAGVLINGKGGKDLEAAAPMLTFEAGKTYRLRVCNTGIKASLNFRIQGHYMKLVELEGSHTLQDVYDSLDVHVGPLPLRAGRRRPGARRLLHGGLHAVHPRRQVRLRRHPLRRLQRRPAGAQHDRATGRLGLVHQPGQVVPLEPDGQRRAPQPAGLLPLRPDQHHPHHQGHGLPRPHRRQAPLRLQRHLPQGYRDPPQARRVLQRHRRGVQLQPDGRRATRC

SEQ ID NO: 40032 - protein, 326 aa, Zea mays subsp. mays
  peptide (1)..(326): Ceres Seq. ID no. 12375232
  misc_feature (1)..(178): NCBI GI NO: 15231228 NR Description: pectinesterase
  misc_feature (1)..(178): NCBI GI NO: 128592 NR Description: POLLEN-SPECIFIC PROTEIN NTP303 PRECURSOR
  misc_feature (1)..(178): NCBI GI NO: 99809 NR Description: pollen-specific protein Bp10
  misc_feature (1)..(178): NCBI GI NO: 114268 NR Description: L-ascorbate oxidase homolog precursor (Ascorbase)
  misc_feature (1)..(178): NCBI GI NO: 99808 NR Description: pollen-specific protein Bp10
  misc_feature (1)..(178): NCBI GI NO: 15222747 NR Description: pectinesterase
  misc_feature (1)..(178): NCBI GI NO: 15231231 NR Description: pectinesterase
  misc_feature (1)..(178): NCBI GI NO: 99807 NR Description: pollen-specific protein Bp10
  misc_feature (1)..(178): NCBI GI NO: 18405425 NR Description: pectinesterase
  misc_feature (1)..(178): NCBI GI NO: 19387132 NR Description: 1-ascorbate oxidase [Petunia x hybrida]
MQHRKNSWMDGMPGTQCPIAPNTNFTYKWQPKDQIGSFFYFPSIGMQRAAGGYGAISVVSRLLIPVPFDQPPPESDHAVLIGDWYTKDHEVLARQLDAGKSVGRPAGVLINGKGGKDLEAAAPMLTFEAGKTYRLRVCNTGIKASLNFRIQGHYMKLVELEGSHTLQDVYDSLDVHVGPLPLRAGRRRPGARRLLHGGLHAVHPRRQVRLRRHPLRRLQRRPAGAQHDRATGRLGLVHQPGQVVPLEPDGQRRAPQPAGLLPLRPDQHHPHHQGHGLPRPHRRQAPLRLQRHLPQGYRDPPQARRVLQRHRRGVQLQPDGRRATRC

SEQ ID NO: 40033 - DNA, 2279 bp, Zea mays subsp. mays
  misc_feature (1)..(2279): Ceres Seq. ID no. 12450444
ctcccgccccgcggctcgtctccctctcacggcctcacctcacaacctcacggtcctcacctcactccaccacgttcgccgcctcgctgccgcgtcgggccagtgcgtgcgggcgggcgtgagtgactggctctcctcggcgcgcggacccaggggcggcggcgatggggaagaatatgcgcatcaagacggcgcccaaggcgaaccgtgtccccctcctcggcgacggggagacgtcaagggcgctctcggacctggaagagggcagcgacgtccagccagcgaacgtcggcttctgtcgggtcatcaaacttgcgaagcatgacgccggaaagctggtcctcgccaccgcggcgctgctcgtcgcctccctcagtaaccttctcgttcccaaatatggtggcaagataattgacattgtgtcaagagatgttcggcgcccagaagataaggcgcaagccctggaggatgtcaagggcacaattttgtacattgtgacaatcgtcttagtcggttcagtttgcacggctcttcgggcatggctattcaattctgctagtgagagagtagtcgctcgactaaggaaagacttgttcagccatctcataaaccaggaaatagcgttttttgatgtgactagaacaggagagctcttaagcaggctttctgaagatacacaaataataaagaatgctgctacaaccaacctatcagaggcactgcgcaatgtaactactacagctattggtcttggtttcatgttttcaacttcatggaagttaacattgctggcacttgtaattgtcccggttatatcagttgctgtgcgtagatttggacgttttcttcgtgagctttcacatcaaacacaagctgctgcagctgtagcttcatccatagctgaggaatctttcggtgccatccgcacagtaagatcctttgctcaggaatatcatgagatttcacgctatggtgaaaaagtagaggagacacttaaacttggtctcaaacaagctaaagttgttggcttgttttctggagggcttaatgctgcatcaaccatgtctgtggttattgttgttatttatggcgccaacttaaccatcaatggttacatgacaactggctctcttacatcattcatcttatacagccttacagttggttcgtcagtatctgccttgtcaggactatacacaactgtaatgaaagcctctggtgcaagccgtagggtttttcaacttttggaccgtgtttcgtcaatgacaaactctggggacaaatgtccaataaatgaaaaggatggggaagttgagcttgatgatgtctggtttgcatatccttctcgcccatctcatatgattcttaagggaataactctgaagctagcaccaggttcaaaggttgcacttgttgggccaagtggtggtggtaaaaccacaatagcaaatttgattgagcggttttatgaccctctaaagggaaggatcttgcttaatggagtaccgctggcagaaatttcacatcaatatcttcacagcaaggtaagcattgtcagccaggagcctacgctcttcaactgcaccatcgaagagaatattgcttatggactagagggcacaacgaactttgctgacgttgagagtgcagctgaaatggcgaatgcacacaacttcatatgcggctttcccgaccaatataagactgtcgtcggcgagcgggggatcaggttatccggcgggcagaagcagaggatcgccattgcgagagctttgcttatgaacccacgagtgcttctcctggacgaagctaccagtgccctggatgctgaaagcgaatatcttgtacaggatgcaatggactccttgatgaaagggaggactgtccttgtgatagcccacaggctctcgaccgtcaagagcgccgacaccgtcgccgtcatctccgacggcctaatcgtggagagcggcacgcacgacgaactcctggaccgcgacggcatatacacggccttggtgaagaggcagctgcaggggccgaagtttgaggccaccagcagcatcagcgaggcctccgaaattgaagcggaacccagcagtaatgggcaatagcggccccgattattaggaagaccacagttgatttgaatccacacaagtgtatgtaaccctgatgttgacgtatgccactgcaaatcacgcgaaaccattggatatcacatgatgctacggttgttgtacgagtaatttcccacttggttaatcctacacatatggtcc

SEQ ID NO: 40034 - protein, 648 aa, Zea mays subsp. mays
  peptide (1)..(648): Ceres Seq. ID no. 12450445
  misc_feature (58)..(337): Pfam Name: Pfam Description:  ABC transporter transmembrane region
  misc_feature (1)..(648): NCBI GI NO: 12061244 NR Description: 36I5.4 [Oryza sativa (japonica cultivar-group)]
  misc_feature (1)..(648): NCBI GI NO: 12278525 NR Description: putative ABC transporter
  misc_feature (1)..(648): NCBI GI NO: 18496654 NR Description: putative ABC transporter [Triticum monococcum]
  misc_feature (1)..(639): NCBI GI NO: 12278526 NR Description: putative ABC transporter
  misc_feature (11)..(638): NCBI GI NO: 18496655 NR Description: putative ABC transporter [Triticum monococcum]
  misc_feature (24)..(623): NCBI GI NO: 22327455 NR Description: ABC transporter family protein
  misc_feature (24)..(623): NCBI GI NO: 19335724 NR Description: transporter associated with antigen processing-like
  misc_feature (24)..(623): NCBI GI NO: 10177549 NR Description: ABC transporter-like protein
  misc_feature (31)..(622): NCBI GI NO: 18496814 NR Description: ABC transporter AbcB1 [Dictyostelium discoideum]
  misc_feature (1)..(621): NCBI GI NO: 9506367 NR Description: ATP-binding cassette, sub-family B, member 10
MGKNMRIKTAPKANRVPLLGDGETSRALSDLEEGSDVQPANVGFCRVIKLAKHDAGKLVLATAALLVASLSNLLVPKYGGKIIDIVSRDVRRPEDKAQALEDVKGTILYIVTIVLVGSVCTALRAWLFNSASERVVARLRKDLFSHLINQEIAFFDVTRTGELLSRLSEDTQIIKNAATTNLSEALRNVTTTAIGLGFMFSTSWKLTLLALVIVPVISVAVRRFGRFLRELSHQTQAAAAVASSIAEESFGAIRTVRSFAQEYHEISRYGEKVEETLKLGLKQAKVVGLFSGGLNAASTMSVVIVVIYGANLTINGYMTTGSLTSFILYSLTVGSSVSALSGLYTTVMKASGASRRVFQLLDRVSSMTNSGDKCPINEKDGEVELDDVWFAYPSRPSHMILKGITLKLAPGSKVALVGPSGGGKTTIANLIERFYDPLKGRILLNGVPLAEISHQYLHSKVSIVSQEPTLFNCTIEENIAYGLEGTTNFADVESAAEMANAHNFICGFPDQYKTVVGERGIRLSGGQKQRIAIARALLMNPRVLLLDEATSALDAESEYLVQDAMDSLMKGRTVLVIAHRLSTVKSADTVAVISDGLIVESGTHDELLDRDGIYTALVKRQLQGPKFEATSSISEASEIEAEPSSNGQ

SEQ ID NO: 40035 - protein, 644 aa, Zea mays subsp. mays
  peptide (1)..(644): Ceres Seq. ID no. 12450446
  misc_feature (54)..(333): Pfam Name: Pfam Description:  ABC transporter transmembrane region
  misc_feature (1)..(644): NCBI GI NO: 12061244 NR Description: 36I5.4 [Oryza sativa (japonica cultivar-group)]
  misc_feature (1)..(644): NCBI GI NO: 12278525 NR Description: putative ABC transporter
  misc_feature (1)..(644): NCBI GI NO: 18496654 NR Description: putative ABC transporter [Triticum monococcum]
  misc_feature (1)..(635): NCBI GI NO: 12278526 NR Description: putative ABC transporter
  misc_feature (7)..(634): NCBI GI NO: 18496655 NR Description: putative ABC transporter [Triticum monococcum]
  misc_feature (20)..(619): NCBI GI NO: 22327455 NR Description: ABC transporter family protein
  misc_feature (20)..(619): NCBI GI NO: 19335724 NR Description: transporter associated with antigen processing-like
  misc_feature (20)..(619): NCBI GI NO: 10177549 NR Description: ABC transporter-like protein
  misc_feature (27)..(618): NCBI GI NO: 18496814 NR Description: ABC transporter AbcB1 [Dictyostelium discoideum]
  misc_feature (1)..(617): NCBI GI NO: 9506367 NR Description: ATP-binding cassette, sub-family B, member 10
MRIKTAPKANRVPLLGDGETSRALSDLEEGSDVQPANVGFCRVIKLAKHDAGKLVLATAALLVASLSNLLVPKYGGKIIDIVSRDVRRPEDKAQALEDVKGTILYIVTIVLVGSVCTALRAWLFNSASERVVARLRKDLFSHLINQEIAFFDVTRTGELLSRLSEDTQIIKNAATTNLSEALRNVTTTAIGLGFMFSTSWKLTLLALVIVPVISVAVRRFGRFLRELSHQTQAAAAVASSIAEESFGAIRTVRSFAQEYHEISRYGEKVEETLKLGLKQAKVVGLFSGGLNAASTMSVVIVVIYGANLTINGYMTTGSLTSFILYSLTVGSSVSALSGLYTTVMKASGASRRVFQLLDRVSSMTNSGDKCPINEKDGEVELDDVWFAYPSRPSHMILKGITLKLAPGSKVALVGPSGGGKTTIANLIERFYDPLKGRILLNGVPLAEISHQYLHSKVSIVSQEPTLFNCTIEENIAYGLEGTTNFADVESAAEMANAHNFICGFPDQYKTVVGERGIRLSGGQKQRIAIARALLMNPRVLLLDEATSALDAESEYLVQDAMDSLMKGRTVLVIAHRLSTVKSADTVAVISDGLIVESGTHDELLDRDGIYTALVKRQLQGPKFEATSSISEASEIEAEPSSNGQ

SEQ ID NO: 40036 - protein, 450 aa, Zea mays subsp. mays
  peptide (1)..(450): Ceres Seq. ID no. 12450447
  misc_feature (1)..(139): Pfam Name: Pfam Description:  ABC transporter transmembrane region
  misc_feature (1)..(450): NCBI GI NO: 12061244 NR Description: 36I5.4 [Oryza sativa (japonica cultivar-group)]
  misc_feature (1)..(450): NCBI GI NO: 12278525 NR Description: putative ABC transporter
  misc_feature (1)..(450): NCBI GI NO: 18496654 NR Description: putative ABC transporter [Triticum monococcum]
  misc_feature (1)..(441): NCBI GI NO: 12278526 NR Description: putative ABC transporter
  misc_feature (1)..(440): NCBI GI NO: 18496655 NR Description: putative ABC transporter [Triticum monococcum]
  misc_feature (1)..(425): NCBI GI NO: 22327455 NR Description: ABC transporter family protein
  misc_feature (1)..(425): NCBI GI NO: 19335724 NR Description: transporter associated with antigen processing-like
  misc_feature (1)..(425): NCBI GI NO: 10177549 NR Description: ABC transporter-like protein
  misc_feature (1)..(424): NCBI GI NO: 18496814 NR Description: ABC transporter AbcB1 [Dictyostelium discoideum]
  misc_feature (1)..(423): NCBI GI NO: 9506367 NR Description: ATP-binding cassette, sub-family B, member 10
MFSTSWKLTLLALVIVPVISVAVRRFGRFLRELSHQTQAAAAVASSIAEESFGAIRTVRSFAQEYHEISRYGEKVEETLKLGLKQAKVVGLFSGGLNAASTMSVVIVVIYGANLTINGYMTTGSLTSFILYSLTVGSSVSALSGLYTTVMKASGASRRVFQLLDRVSSMTNSGDKCPINEKDGEVELDDVWFAYPSRPSHMILKGITLKLAPGSKVALVGPSGGGKTTIANLIERFYDPLKGRILLNGVPLAEISHQYLHSKVSIVSQEPTLFNCTIEENIAYGLEGTTNFADVESAAEMANAHNFICGFPDQYKTVVGERGIRLSGGQKQRIAIARALLMNPRVLLLDEATSALDAESEYLVQDAMDSLMKGRTVLVIAHRLSTVKSADTVAVISDGLIVESGTHDELLDRDGIYTALVKRQLQGPKFEATSSISEASEIEAEPSSNGQ

SEQ ID NO: 40037 - DNA, 1713 bp, Zea mays subsp. mays
  misc_feature (1)..(1713): Ceres Seq. ID no. 12375320
atagattttcttattcgccccttctctctccttctattttcagagagtcccctcgcctctgcctgcctgtcccatccccagtccaccaagcagcgcccgtcaccatctctccccatcccctttgccactctcggtcttctccctcctcagggcaggcaggggaagcagaagaaggaagcgagagcacggagcctgatttggtttgctttttgttgcccagactcggagggagttggtgtctctgtgtgtgtggagatggaccccaagttccccccacccccaccgctaaacaaaacggagcccaccaccgcgacgaccaccaccacctcgaccgcgcagcagcagcagcagctggatcctaaggactaccaccagcagcagccggcgcagcaccaggagcaccaccaccacctgcaaatccaaactcaccagccgccgcagcaggacgggggcggcggagggaaggagcagcagcagctgcaggtggtggcgcagcccggggagaggaggcagcaggcgctcgcgcccaagcggagctccaacaaggaccgacacaccaaggtcgacggcaggggccggcggatccggatgcccgcgctctgcgccgcgcggatcttccagctcacgcgggaactcggccacaagtccgacggcgagaccgtccagtggctgctgcagcaggccgagccggccatcgtcgccgccaccggcacgggcaccataccggcgtccgcgctcgcctccgtcgcgccctcgctcccgtcgcccacctccgggctcgccaggccgcaccaccacatgtgggcgccgtccgccggcttctcctcgccctccttcctgaactctgccgccgcgggcacgggcgatgccgccggtatcatgcagcggatggggatccccgcgggcttcgagctgccgggagcctccgccgccggagccaccctcggcgccggcggccacatcggttttgcgcccatgttcgctggacacgccgccgccatgccggggctcgagctcgggctatcgcaggacggccacatcggcgtgctcgccgcgcagtcgatcagccagttctaccaccaggtgggtgctgccgccgccggcggcggccagatgcagcacgcgcacgggcaccatcatcaccatcaccagcagcaggaggacggggaggacgaccgcgaggacggcgagtccgatgacgagtctgggcagtagtagtgtaaccgttcaaccttttgcgttgctgaatcttccctcaagttggaaggagagaaaagtgtatgcgtgcagccacgggatgcttctgctactcttggactgttgttggtcgagttctgatggatttttgtgtccatttttttctcgtgtggtatccaaactcaacggaggcctctcttgctgtgaagacttgcggattcgagatcatcctcagttcttcccacaatctcatggagtggatgatcgccacagccttctctccgacttccaggtgtatactagctgagaaaatgatggattggatcgatcacccttgagtgagtgccttatttgttattgcacagtgtgtagatattcaggtaattttgcagttagagaggtgttccttttattgtagtagtgatcaacgttttaaaacaatcaaggtattctcctccacaggctgtctatgcaacgcaagtatagtacaattctagttcatgaccacgcataccg

SEQ ID NO: 40038 - protein, 404 aa, Zea mays subsp. mays
  peptide (1)..(404): Ceres Seq. ID no. 12375321
  misc_feature (169)..(338): Pfam Name: Pfam Description:  TCP family transcription factor
  misc_feature (320)..(404): NCBI GI NO: 34912298 NR Description: P0451D05.12
  misc_feature (208)..(239): NCBI GI NO: 34912298 NR Description: P0451D05.12
  misc_feature (169)..(403): NCBI GI NO: 15232059 NR Description: unknown protein; protein id: At3g27010.1
  misc_feature (119)..(283): NCBI GI NO: 11357581 NR Description: hypothetical protein F1P2
  misc_feature (119)..(283): NCBI GI NO: 22331641 NR Description: putative protein; protein id: At3g47620
  misc_feature (150)..(267): NCBI GI NO: 20975251 NR Description: transcription factor PCF3
  misc_feature (160)..(277): NCBI GI NO: 18409345 NR Description: expressed protein; protein id: At1g69690
  misc_feature (176)..(276): NCBI GI NO: 5731257 NR Description: auxin-induced basic helix-loop-helix transcriptionfactor
  misc_feature (173)..(263): NCBI GI NO: 15217857 NR Description: auxin-induced basic helix-loop-helix transcriptionfactor
  misc_feature (175)..(258): NCBI GI NO: 15242216 NR Description: putative protein; protein id: At5g51910
IDFLIRPFSLLLFSESPLASACLSHPQSTKQRPSPSLPIPFATLGLLPPQGRQGKQKKEARARSLIWFAFCCPDSEGVGVSVCVEMDPKFPPPPPLNKTEPTTATTTTTSTAQQQQQLDPKDYHQQQPAQHQEHHHHLQIQTHQPPQQDGGGGGKEQQQLQVVAQPGERRQQALAPKRSSNKDRHTKVDGRGRRIRMPALCAARIFQLTRELGHKSDGETVQWLLQQAEPAIVAATGTGTIPASALASVAPSLPSPTSGLARPHHHMWAPSAGFSSPSFLNSAAAGTGDAAGIMQRMGIPAGFELPGASAAGATLGAGGHIGFAPMFAGHAAAMPGLELGLSQDGHIGVLAAQSISQFYHQVGAAAAGGGQMQHAHGHHHHHHQQQEDGEDDREDGESDDESGQ

SEQ ID NO: 40039 - protein, 319 aa, Zea mays subsp. mays
  peptide (1)..(319): Ceres Seq. ID no. 12375322
  misc_feature (84)..(253): Pfam Name: Pfam Description:  TCP family transcription factor
  misc_feature (235)..(319): NCBI GI NO: 34912298 NR Description: P0451D05.12
  misc_feature (123)..(154): NCBI GI NO: 34912298 NR Description: P0451D05.12
  misc_feature (84)..(318): NCBI GI NO: 15232059 NR Description: unknown protein; protein id: At3g27010.1
  misc_feature (34)..(198): NCBI GI NO: 11357581 NR Description: hypothetical protein F1P2
  misc_feature (34)..(198): NCBI GI NO: 22331641 NR Description: putative protein; protein id: At3g47620
  misc_feature (65)..(182): NCBI GI NO: 20975251 NR Description: transcription factor PCF3
  misc_feature (75)..(192): NCBI GI NO: 18409345 NR Description: expressed protein; protein id: At1g69690
  misc_feature (91)..(191): NCBI GI NO: 5731257 NR Description: auxin-induced basic helix-loop-helix transcriptionfactor
  misc_feature (88)..(178): NCBI GI NO: 15217857 NR Description: auxin-induced basic helix-loop-helix transcriptionfactor
  misc_feature (90)..(173): NCBI GI NO: 15242216 NR Description: putative protein; protein id: At5g51910
MDPKFPPPPPLNKTEPTTATTTTTSTAQQQQQLDPKDYHQQQPAQHQEHHHHLQIQTHQPPQQDGGGGGKEQQQLQVVAQPGERRQQALAPKRSSNKDRHTKVDGRGRRIRMPALCAARIFQLTRELGHKSDGETVQWLLQQAEPAIVAATGTGTIPASALASVAPSLPSPTSGLARPHHHMWAPSAGFSSPSFLNSAAAGTGDAAGIMQRMGIPAGFELPGASAAGATLGAGGHIGFAPMFAGHAAAMPGLELGLSQDGHIGVLAAQSISQFYHQVGAAAAGGGQMQHAHGHHHHHHQQQEDGEDDREDGESDDESGQ

SEQ ID NO: 40040 - protein, 212 aa, Zea mays subsp. mays
  peptide (1)..(212): Ceres Seq. ID no. 12375323
  misc_feature (1)..(132): NCBI GI NO: 13592175 NR Description: ppg3 [Leishmania major]
  misc_feature (1)..(118): NCBI GI NO: 13592175 NR Description: ppg3 [Leishmania major]
  misc_feature (1)..(131): NCBI GI NO: 11360318 NR Description: probable mucin DKFZp434C196.1 - human (fragment)
  misc_feature (1)..(123): NCBI GI NO: 11360318 NR Description: probable mucin DKFZp434C196.1 - human (fragment)
  misc_feature (1)..(132): NCBI GI NO: 13592175 NR Description: ppg3 [Leishmania major]
  misc_feature (1)..(123): NCBI GI NO: 188864 NR Description: mucin
  misc_feature (1)..(132): NCBI GI NO: 13592175 NR Description: ppg3 [Leishmania major]
  misc_feature (1)..(132): NCBI GI NO: 13592175 NR Description: ppg3 [Leishmania major]
  misc_feature (1)..(63): NCBI GI NO: 3044086 NR Description: unknown [Myxococcus xanthus]
  misc_feature (1)..(120): NCBI GI NO: 188864 NR Description: mucin
MPPVSCSGWGSPRASSCREPPPPEPPSAPAATSVLRPCSLDTPPPCRGSSSGYRRTATSACSPRSRSASSTTRWVLPPPAAARCSTRTGTIITITSSRRTGRTTARTASPMTSLGSSSVTVQPFALLNLPSSWKERKVYACSHGMLLLLLDCCWSSSDGFLCPFFSRVVSKLNGGLSCCEDLRIRDHPQFFPQSHGVDDRHSLLSDFQVYTS

SEQ ID NO: 40041 - DNA, 1859 bp, Zea mays subsp. mays; identical to SEQ ID NO: 38473
  misc_feature (1)..(1859): Ceres Seq. ID no. 13492557

SEQ ID NO: 40042 - protein, 371 aa, Zea mays subsp. mays; identical to SEQ ID NO: 38474
  peptide (1)..(371): Ceres Seq. ID no. 13492558
  misc_feature (28)..(354): Pfam Name: Pfam Description:  GDSL-like Lipase/Acylhydrolase
  misc_feature (3)..(369): NCBI GI NO: 34903958 NR Description: OSJNBa0038J17.24
  misc_feature (7)..(365): NCBI GI NO: 34903956 NR Description: OSJNBa0038J17.23
  misc_feature (27)..(367): NCBI GI NO: 34903994 NR Description: unnamed protein product
  misc_feature (6)..(367): NCBI GI NO: 34903996 NR Description: unnamed protein product
  misc_feature (24)..(362): NCBI GI NO: 15242538 NR Description: GDSL-motif lipase/hydrolase protein
  misc_feature (24)..(362): NCBI GI NO: 21553708 NR Description: GDSL-motif lipase/hydrolase-like protein
  misc_feature (103)..(352): NCBI GI NO: 15237586 NR Description: GDSL-motif lipase/hydrolase protein
  misc_feature (27)..(351): NCBI GI NO: 18413404 NR Description: GDSL-motif lipase/hydrolase protein
  misc_feature (27)..(351): NCBI GI NO: 7486718 NR Description: hypothetical protein F8M12
  misc_feature (27)..(351): NCBI GI NO: 7486138 NR Description: hypothetical protein F25I24

SEQ ID NO: 40043 - protein, 313 aa, Zea mays subsp. mays; identical to SEQ ID NO: 38475
  peptide (1)..(313): Ceres Seq. ID no. 13492559
  misc_feature (1)..(296): Pfam Name: Pfam Description:  GDSL-like Lipase/Acylhydrolase
  misc_feature (1)..(311): NCBI GI NO: 34903958 NR Description: OSJNBa0038J17.24
  misc_feature (1)..(307): NCBI GI NO: 34903956 NR Description: OSJNBa0038J17.23
  misc_feature (1)..(309): NCBI GI NO: 34903994 NR Description: unnamed protein product
  misc_feature (1)..(309): NCBI GI NO: 34903996 NR Description: unnamed protein product
  misc_feature (1)..(304): NCBI GI NO: 15242538 NR Description: GDSL-motif lipase/hydrolase protein
  misc_feature (1)..(304): NCBI GI NO: 21553708 NR Description: GDSL-motif lipase/hydrolase-like protein
  misc_feature (45)..(294): NCBI GI NO: 15237586 NR Description: GDSL-motif lipase/hydrolase protein
  misc_feature (1)..(293): NCBI GI NO: 18413404 NR Description: GDSL-motif lipase/hydrolase protein
  misc_feature (1)..(293): NCBI GI NO: 7486718 NR Description: hypothetical protein F8M12
  misc_feature (1)..(293): NCBI GI NO: 7486138 NR Description: hypothetical protein F25I24

SEQ ID NO: 40044 - protein, 230 aa, Zea mays subsp. mays; identical to SEQ ID NO: 38476
  peptide (1)..(230): Ceres Seq. ID no. 13492560
  misc_feature (1)..(213): Pfam Name: Pfam Description:  GDSL-like Lipase/Acylhydrolase
  misc_feature (1)..(228): NCBI GI NO: 34903958 NR Description: OSJNBa0038J17.24
  misc_feature (1)..(224): NCBI GI NO: 34903956 NR Description: OSJNBa0038J17.23
  misc_feature (1)..(226): NCBI GI NO: 34903994 NR Description: unnamed protein product
  misc_feature (1)..(226): NCBI GI NO: 34903996 NR Description: unnamed protein product
  misc_feature (1)..(221): NCBI GI NO: 15242538 NR Description: GDSL-motif lipase/hydrolase protein
  misc_feature (1)..(221): NCBI GI NO: 21553708 NR Description: GDSL-motif lipase/hydrolase-like protein
  misc_feature (1)..(211): NCBI GI NO: 15237586 NR Description: GDSL-motif lipase/hydrolase protein
  misc_feature (1)..(210): NCBI GI NO: 18413404 NR Description: GDSL-motif lipase/hydrolase protein
  misc_feature (1)..(210): NCBI GI NO: 7486718 NR Description: hypothetical protein F8M12
  misc_feature (1)..(210): NCBI GI NO: 7486138 NR Description: hypothetical protein F25I24

SEQ ID NO: 40045 - DNA, 2198 bp, Zea mays subsp. mays
  misc_feature (1)..(2198): Ceres Seq. ID no. 12387571
gcacgagaccattacctagaacatcctaatcgaaaagtcctaaaaccctagcgaaggcgagccttccacttccctcagcctgccgccgccaccgccgccgccgccgccatgtgcccagcagcggcgaccacgagctccgccaagccgtcgaagaagcggaaacagcccgtcatagcgccgccggagtcggactctgaggaggaatctgtctacgacactgcctccgacgatgacgaggaggaagaggagacgcaggagttagagagtgaggatgtagacgaggaggtggaggaggggagcgaggacggcgaggaaaatgaaattggtgacgatagcgaggtggaagaagaggaggtgaaggagaaaaaagaaaaggaggagacggtgaaggagaaaaaggaaaagaaggacatgaagcaagagggaaagaaggcgaagaagcaagaggaaaagaaggcgaagaaggacaagaaggaagaggaaaaaaaggtgatggaggacaagaaagaagaggaaaagaaggcgaagaagaagagcgaggggagtggaatcctgtctaacaagctcttctcggagctccccctctctgagctcactgccaaggccatcagagagatgaactacacccacctcacccagattcaagctagatcaataccacatctgttggaggggaatgatgtgatgggcgcagccaagactggctctgggaagactcttgcattccttataccagcgattgagatgctatatcacacacacttctcaccgaggaatgggactggagctattgtggtttgcccgacacgggaacttgctatccagacacacaatgttgccaaggagttaatgaaatatcactcacaaactctcggatatgtcattggtggtaataatcgaagaagtgaggctgatcagcttgcaaaggggatcaatttattagttgctaccccaggcaggcttttggaccatctacaaaataccaagagtttcatatacagaaggctaaagtgccttgtcattgatgaagccgatcgcatacttgagcaaaactttgaggaagacatgaaacaaatatttaaacgccttccccagaataggcagactgttcttttttctgctacacagactccagaggttgaaaaatttgctaaactgtcatttgagaaaaatgaagaaagtaaaaaaaaacctgtttatgttggagttgatgatgataagtcaaaggctactgttgaaggcctgcagcagggttattgtgtcatttctagcgataaaaggttcttggttctgtatgctttcctaagaaagaagcggaataagaagataatggtgttcttctcatcatgtaattcagtaaagttccacgctgaacttctgaatttccttgggatagagtgttctgatatccatggaaaacagaagcaacagaagcgaactactacattctttagcttttgcaaggcagaaaagggcatcttattgtgcactaatgtggctgcccgtggacttgatattcctgacgtggattatatcttgcaatatgaccctccagatgaaccaaaggattacattcacagagttggtcgtaccgcacgaggtgagaaaggcaaaggaagtgcattgctgttcttactaccagaagaactgaagtttctaatttacctgaaggcggccaaggttaccctgacggaatatgagttcaatcagaagaatgtgccaaatttgcaatcgcagcttgagaatattgttggtgagaattactttctgaaccagtctgccaaagaagcctacagatcctacgttttggcatatgactctcactctatgaaagacatttttaatgtccatcaacttgatctgcagaaagtagccgcgtcattcggtttcaagaatcccccgaaagtgaacctggacctggacagcagtgcggcgaagcatcggaagaagaggagagtagacggtgggaagaggcatggcatcagcgcttcgaacccgtacgggaggaaggacaaaggcggtggcggcgataaaagacagttggcgagattctagaaaggaggaagagcaggagcgtttcactattgttgtgttcgtaccagggctttgattgatgatgttacctggcttgggaaaaatcttgacaggccactaaggctggctataaattttgggttgtcttgatatatttggtgtgt

SEQ ID NO: 40046 - protein, 648 aa, Zea mays subsp. mays
  peptide (1)..(648): Ceres Seq. ID no. 12387572
  misc_feature (166)..(382): Pfam Name: Pfam Description:  DEAD/DEAH box helicase
  misc_feature (75)..(648): NCBI GI NO: 29150366 NR Description: putative RNA helicase
  misc_feature (1)..(89): NCBI GI NO: 29150366 NR Description: putative RNA helicase
  misc_feature (20)..(106): NCBI GI NO: 29150366 NR Description: putative RNA helicase
  misc_feature (66)..(126): NCBI GI NO: 29150366 NR Description: putative RNA helicase
  misc_feature (74)..(633): NCBI GI NO: 15229677 NR Description: DEAD/DEAH box RNA helicase protein, putative
  misc_feature (8)..(633): NCBI GI NO: 15239187 NR Description: DEAD/DEAH box RNA helicase protein, putative
  misc_feature (81)..(625): NCBI GI NO: 19115400 NR Description: probable ATP-dependent RNA helicase
  misc_feature (81)..(620): NCBI GI NO: 7446077 NR Description: DEAD box protein MrDb, Myc-regulated - human
  misc_feature (81)..(620): NCBI GI NO: 12654791 NR Description: DEAD/H
  misc_feature (62)..(636): NCBI GI NO: 40745958 NR Description: hypothetical protein AN1949.2
MCPAAATTSSAKPSKKRKQPVIAPPESDSEEESVYDTASDDDEEEEETQELESEDVDEEVEEGSEDGEENEIGDDSEVEEEEVKEKKEKEETVKEKKEKKDMKQEGKKAKKQEEKKAKKDKKEEEKKVMEDKKEEEKKAKKKSEGSGILSNKLFSELPLSELTAKAIREMNYTHLTQIQARSIPHLLEGNDVMGAAKTGSGKTLAFLIPAIEMLYHTHFSPRNGTGAIVVCPTRELAIQTHNVAKELMKYHSQTLGYVIGGNNRRSEADQLAKGINLLVATPGRLLDHLQNTKSFIYRRLKCLVIDEADRILEQNFEEDMKQIFKRLPQNRQTVLFSATQTPEVEKFAKLSFEKNEESKKKPVYVGVDDDKSKATVEGLQQGYCVISSDKRFLVLYAFLRKKRNKKIMVFFSSCNSVKFHAELLNFLGIECSDIHGKQKQQKRTTTFFSFCKAEKGILLCTNVAARGLDIPDVDYILQYDPPDEPKDYIHRVGRTARGEKGKGSALLFLLPEELKFLIYLKAAKVTLTEYEFNQKNVPNLQSQLENIVGENYFLNQSAKEAYRSYVLAYDSHSMKDIFNVHQLDLQKVAASFGFKNPPKVNLDLDSSAAKHRKKRRVDGGKRHGISASNPYGRKDKGGGGDKRQLARF

SEQ ID NO: 40047 - protein, 547 aa, Zea mays subsp. mays
  peptide (1)..(547): Ceres Seq. ID no. 12387573
  misc_feature (65)..(281): Pfam Name: Pfam Description:  DEAD/DEAH box helicase
  misc_feature (1)..(547): NCBI GI NO: 29150366 NR Description: putative RNA helicase
  misc_feature (1)..(25): NCBI GI NO: 29150366 NR Description: putative RNA helicase
  misc_feature (1)..(532): NCBI GI NO: 15229677 NR Description: DEAD/DEAH box RNA helicase protein, putative
  misc_feature (1)..(532): NCBI GI NO: 15239187 NR Description: DEAD/DEAH box RNA helicase protein, putative
  misc_feature (1)..(524): NCBI GI NO: 19115400 NR Description: probable ATP-dependent RNA helicase
  misc_feature (1)..(519): NCBI GI NO: 7446077 NR Description: DEAD box protein MrDb, Myc-regulated - human
  misc_feature (1)..(519): NCBI GI NO: 12654791 NR Description: DEAD/H
  misc_feature (1)..(535): NCBI GI NO: 40745958 NR Description: hypothetical protein AN1949.2
  misc_feature (1)..(519): NCBI GI NO: 26344732 NR Description: unnamed protein product [Mus musculus]
  misc_feature (1)..(518): NCBI GI NO: 39589822 NR Description: Hypothetical protein CBG12465
MKQEGKKAKKQEEKKAKKDKKEEEKKVMEDKKEEEKKAKKKSEGSGILSNKLFSELPLSELTAKAIREMNYTHLTQIQARSIPHLLEGNDVMGAAKTGSGKTLAFLIPAIEMLYHTHFSPRNGTGAIVVCPTRELAIQTHNVAKELMKYHSQTLGYVIGGNNRRSEADQLAKGINLLVATPGRLLDHLQNTKSFIYRRLKCLVIDEADRILEQNFEEDMKQIFKRLPQNRQTVLFSATQTPEVEKFAKLSFEKNEESKKKPVYVGVDDDKSKATVEGLQQGYCVISSDKRFLVLYAFLRKKRNKKIMVFFSSCNSVKFHAELLNFLGIECSDIHGKQKQQKRTTTFFSFCKAEKGILLCTNVAARGLDIPDVDYILQYDPPDEPKDYIHRVGRTARGEKGKGSALLFLLPEELKFLIYLKAAKVTLTEYEFNQKNVPNLQSQLENIVGENYFLNQSAKEAYRSYVLAYDSHSMKDIFNVHQLDLQKVAASFGFKNPPKVNLDLDSSAAKHRKKRRVDGGKRHGISASNPYGRKDKGGGGDKRQLARF

SEQ ID NO: 40048 - protein, 520 aa, Zea mays subsp. mays
  peptide (1)..(520): Ceres Seq. ID no. 12387574
  misc_feature (38)..(254): Pfam Name: Pfam Description:  DEAD/DEAH box helicase
  misc_feature (1)..(520): NCBI GI NO: 29150366 NR Description: putative RNA helicase
  misc_feature (1)..(505): NCBI GI NO: 15229677 NR Description: DEAD/DEAH box RNA helicase protein, putative
  misc_feature (1)..(505): NCBI GI NO: 15239187 NR Description: DEAD/DEAH box RNA helicase protein, putative
  misc_feature (1)..(497): NCBI GI NO: 19115400 NR Description: probable ATP-dependent RNA helicase
  misc_feature (1)..(492): NCBI GI NO: 7446077 NR Description: DEAD box protein MrDb, Myc-regulated - human
  misc_feature (1)..(492): NCBI GI NO: 12654791 NR Description: DEAD/H
  misc_feature (1)..(508): NCBI GI NO: 40745958 NR Description: hypothetical protein AN1949.2
  misc_feature (1)..(492): NCBI GI NO: 26344732 NR Description: unnamed protein product [Mus musculus]
  misc_feature (1)..(491): NCBI GI NO: 39589822 NR Description: Hypothetical protein CBG12465
  misc_feature (1)..(438): NCBI GI NO: 23483000 NR Description: probable ATP-dependent RNA helicase has1
MEDKKEEEKKAKKKSEGSGILSNKLFSELPLSELTAKAIREMNYTHLTQIQARSIPHLLEGNDVMGAAKTGSGKTLAFLIPAIEMLYHTHFSPRNGTGAIVVCPTRELAIQTHNVAKELMKYHSQTLGYVIGGNNRRSEADQLAKGINLLVATPGRLLDHLQNTKSFIYRRLKCLVIDEADRILEQNFEEDMKQIFKRLPQNRQTVLFSATQTPEVEKFAKLSFEKNEESKKKPVYVGVDDDKSKATVEGLQQGYCVISSDKRFLVLYAFLRKKRNKKIMVFFSSCNSVKFHAELLNFLGIECSDIHGKQKQQKRTTTFFSFCKAEKGILLCTNVAARGLDIPDVDYILQYDPPDEPKDYIHRVGRTARGEKGKGSALLFLLPEELKFLIYLKAAKVTLTEYEFNQKNVPNLQSQLENIVGENYFLNQSAKEAYRSYVLAYDSHSMKDIFNVHQLDLQKVAASFGFKNPPKVNLDLDSSAAKHRKKRRVDGGKRHGISASNPYGRKDKGGGGDKRQLARF

SEQ ID NO: 40049 - DNA, 2269 bp, Zea mays subsp. mays
  misc_feature (1)..(2269): Ceres Seq. ID no. 12361170
gcacgagaccattacctagaacatcctaatcgaaaaaccagaccaccgtcgctcgctcgcctgcacaacctctccatccaggccacagctcgagaccaacgaccgacgcctagacgcggctgggcggtcggcctcacctcgttcccccgcctcccttcttcctgctccgcgtctcgatctcgactcccccgccgcgtcgcgcgacccggccagatctcgcccaccctgcgccgcggccatggataacttgatcaccctcgtcaacaagctgcagagggcttgcacggctctcggagaccacggagaggagagcgccctcccgacgctctgggactcgctgccggctatcgccgtcgttggaggacagagctctggtaaatcatctgtgttggagagcgtggttgggaaggatttcctaccgaggggttcaggcattgtaacccggcggccgctggtgctgcagctccacagaattgatggtgacagggaatatgcagagttcattcatcttccgagaaagagatttacagattttgctgctgtgagaaaggagatagctgatgaaactgaccgagaaacaggccgttcaaagcaaatatcaactgtccctatccatttaagcatattttctccccatgttgtgaatcttactcttattgatcttcctgggcttactaaagtagcagttgatggccaaccggagagtattgtacatgacattgaaaacatggttcgctcatatattgaaaagccaaattgtatcattctggctgtgtccccagccaatcaggaccttgctacttctgatgcaatcaagatttcacgggaagttgatcccaaaggtgaaaggacctttggtgtgctcacaaaaattgatctgatggataagggtaccgatgctgttgatatactggaaggaagatcttatcgtctccaaacaccatgggttggtgttgttaatcgatcccaacaagatatcaacaagaatgtggacatgattgctgctaggcgtagagagcgagagtattttgcatctacaccagaatataagcacatggcttctaggatgggatctgaatatttaggaaagatgctttcaaagcatttggaacaagtgatcaaatcaaggattccggggatccaatctcttataacaaagacaattgcagagctggaaactgaacttaatcggcttggaaaacccattgctaatgatgctggggggaagctgtacacgatcatggaaatatgccgtatgtttgatggtatttacaaagagcatctggatggagtgcgccctggcggagagaaagtttaccatgtcttcgacaatcaatttcctgtagctattaaacgattgcagtttgataaacaactctctatggaaaatgtgaggaagcttataacagaggctgatggataccagcctcacttgatagctccagaacaaggatatagacgccttatagaatcttgtcttattagtatcagaggtcctgctgaggcggctgttgacgcggtccatgcaattctcaaggaccttgtccgcaaggctatcaatgaaacacatgaactgaagcagtttcccacccttcgtgtggaagtaggcaatgcagcttttgagtcattggatagaatgagggatgaaagcaagaaaaatacattaaagctagttgacatggaatgcagctacttgacagtagatttcttcaggaagcttcctcaggatgttgagaagggtggaaatccaagccactctatttttgatagatataatgactcttatcttagacgaattggacaaactgttctgtcatatgttaatatggtgtgttcgaccttgaggaactccatcccaaaatctattgtttattgtcaagtgcgagaggccaagcgctcgctgctcgatcacttcttcactgaacctggagcaagagagatgaagcagctttccaaacttcttgacgaagacccagcagtcatggaacgcagaactaaccttgcaaagaggctcgagctgtaccggagtgcccaatccgaaattgatgccgttgcatggtccaaatagtcctgatggccaagatatctgttcttaccccttgtctggcgattctctctcctattctggggcatatatagctgatttttcgtgttgtaggtcaggtcattttatatatcaccggagctgtacggtgtcatgttccttgtgcttgaggatctcggggggcacttgtatctcgaacaagttcgtacatcgcgctttcgttcc

SEQ ID NO: 40050 - protein, 609 aa, Zea mays subsp. mays
  peptide (1)..(609): Ceres Seq. ID no. 12361171
  misc_feature (221)..(507): Pfam Name: Pfam Description:  Dynamin central region
  misc_feature (1)..(609): NCBI GI NO: 2129826 NR Description: phragmoplastin 5 - soybean
  misc_feature (1)..(609): NCBI GI NO: 2129825 NR Description: phragmoplastin 12 - soybean
  misc_feature (1)..(609): NCBI GI NO: 5931765 NR Description: phragmoplastin [Nicotiana tabacum]
  misc_feature (1)..(609): NCBI GI NO: 30693985 NR Description: dynamin-related protein (pir||S59558)
  misc_feature (1)..(609): NCBI GI NO: 20453081 NR Description: AT5g42080/MJC20_19 [Arabidopsis thaliana]
  misc_feature (1)..(609): NCBI GI NO: 30695480 NR Description: dynamin-related protein [Arabidopsis thaliana]
  misc_feature (97)..(609): NCBI GI NO: 11357274 NR Description: dynamin-like protein - Arabidopsis thaliana
  misc_feature (1)..(105): NCBI GI NO: 11357274 NR Description: dynamin-like protein - Arabidopsis thaliana
  misc_feature (128)..(609): NCBI GI NO: 34911188 NR Description: putative dynamin-like protein
  misc_feature (1)..(151): NCBI GI NO: 34911188 NR Description: putative dynamin-like protein
MDNLITLVNKLQRACTALGDHGEESALPTLWDSLPAIAVVGGQSSGKSSVLESVVGKDFLPRGSGIVTRRPLVLQLHRIDGDREYAEFIHLPRKRFTDFAAVRKEIADETDRETGRSKQISTVPIHLSIFSPHVVNLTLIDLPGLTKVAVDGQPESIVHDIENMVRSYIEKPNCIILAVSPANQDLATSDAIKISREVDPKGERTFGVLTKIDLMDKGTDAVDILEGRSYRLQTPWVGVVNRSQQDINKNVDMIAARRREREYFASTPEYKHMASRMGSEYLGKMLSKHLEQVIKSRIPGIQSLITKTIAELETELNRLGKPIANDAGGKLYTIMEICRMFDGIYKEHLDGVRPGGEKVYHVFDNQFPVAIKRLQFDKQLSMENVRKLITEADGYQPHLIAPEQGYRRLIESCLISIRGPAEAAVDAVHAILKDLVRKAINETHELKQFPTLRVEVGNAAFESLDRMRDESKKNTLKLVDMECSYLTVDFFRKLPQDVEKGGNPSHSIFDRYNDSYLRRIGQTVLSYVNMVCSTLRNSIPKSIVYCQVREAKRSLLDHFFTEPGAREMKQLSKLLDEDPAVMERRTNLAKRLELYRSAQSEIDAVAWSK

SEQ ID NO: 40051 - protein, 446 aa, Zea mays subsp. mays
  peptide (1)..(446): Ceres Seq. ID no. 12361172
  misc_feature (58)..(344): Pfam Name: Pfam Description:  Dynamin central region
  misc_feature (1)..(446): NCBI GI NO: 2129826 NR Description: phragmoplastin 5 - soybean
  misc_feature (1)..(446): NCBI GI NO: 2129825 NR Description: phragmoplastin 12 - soybean
  misc_feature (1)..(446): NCBI GI NO: 5931765 NR Description: phragmoplastin [Nicotiana tabacum]
  misc_feature (1)..(446): NCBI GI NO: 30693985 NR Description: dynamin-related protein (pir||S59558)
  misc_feature (1)..(446): NCBI GI NO: 20453081 NR Description: AT5g42080/MJC20_19 [Arabidopsis thaliana]
  misc_feature (1)..(446): NCBI GI NO: 30695480 NR Description: dynamin-related protein [Arabidopsis thaliana]
  misc_feature (1)..(446): NCBI GI NO: 11357274 NR Description: dynamin-like protein - Arabidopsis thaliana
  misc_feature (1)..(446): NCBI GI NO: 34911188 NR Description: putative dynamin-like protein
  misc_feature (1)..(446): NCBI GI NO: 2267213 NR Description: dynamin-like GTP binding protein
  misc_feature (1)..(446): NCBI GI NO: 37536976 NR Description: putative phragmoplastin
MVRSYIEKPNCIILAVSPANQDLATSDAIKISREVDPKGERTFGVLTKIDLMDKGTDAVDILEGRSYRLQTPWVGVVNRSQQDINKNVDMIAARRREREYFASTPEYKHMASRMGSEYLGKMLSKHLEQVIKSRIPGIQSLITKTIAELETELNRLGKPIANDAGGKLYTIMEICRMFDGIYKEHLDGVRPGGEKVYHVFDNQFPVAIKRLQFDKQLSMENVRKLITEADGYQPHLIAPEQGYRRLIESCLISIRGPAEAAVDAVHAILKDLVRKAINETHELKQFPTLRVEVGNAAFESLDRMRDESKKNTLKLVDMECSYLTVDFFRKLPQDVEKGGNPSHSIFDRYNDSYLRRIGQTVLSYVNMVCSTLRNSIPKSIVYCQVREAKRSLLDHFFTEPGAREMKQLSKLLDEDPAVMERRTNLAKRLELYRSAQSEIDAVAWSK

SEQ ID NO: 40052 - protein, 395 aa, Zea mays subsp. mays
  peptide (1)..(395): Ceres Seq. ID no. 12361173
  misc_feature (7)..(293): Pfam Name: Pfam Description:  Dynamin central region
  misc_feature (1)..(395): NCBI GI NO: 2129826 NR Description: phragmoplastin 5 - soybean
  misc_feature (1)..(395): NCBI GI NO: 2129825 NR Description: phragmoplastin 12 - soybean
  misc_feature (1)..(395): NCBI GI NO: 5931765 NR Description: phragmoplastin [Nicotiana tabacum]
  misc_feature (1)..(395): NCBI GI NO: 30693985 NR Description: dynamin-related protein (pir||S59558)
  misc_feature (1)..(395): NCBI GI NO: 20453081 NR Description: AT5g42080/MJC20_19 [Arabidopsis thaliana]
  misc_feature (1)..(395): NCBI GI NO: 30695480 NR Description: dynamin-related protein [Arabidopsis thaliana]
  misc_feature (1)..(395): NCBI GI NO: 11357274 NR Description: dynamin-like protein - Arabidopsis thaliana
  misc_feature (1)..(395): NCBI GI NO: 34911188 NR Description: putative dynamin-like protein
  misc_feature (1)..(395): NCBI GI NO: 2267213 NR Description: dynamin-like GTP binding protein
  misc_feature (1)..(395): NCBI GI NO: 37536976 NR Description: putative phragmoplastin
MDKGTDAVDILEGRSYRLQTPWVGVVNRSQQDINKNVDMIAARRREREYFASTPEYKHMASRMGSEYLGKMLSKHLEQVIKSRIPGIQSLITKTIAELETELNRLGKPIANDAGGKLYTIMEICRMFDGIYKEHLDGVRPGGEKVYHVFDNQFPVAIKRLQFDKQLSMENVRKLITEADGYQPHLIAPEQGYRRLIESCLISIRGPAEAAVDAVHAILKDLVRKAINETHELKQFPTLRVEVGNAAFESLDRMRDESKKNTLKLVDMECSYLTVDFFRKLPQDVEKGGNPSHSIFDRYNDSYLRRIGQTVLSYVNMVCSTLRNSIPKSIVYCQVREAKRSLLDHFFTEPGAREMKQLSKLLDEDPAVMERRTNLAKRLELYRSAQSEIDAVAWSK

SEQ ID NO: 40053 - DNA, 1966 bp, Zea mays subsp. mays
  misc_feature (1)..(1966): Ceres Seq. ID no. 12391453
aacccaaccggatcctctggtggaacttccagggtgccctcgtcggcggcgcgcttctcctcctctacatcgtcgacgccgccgttggttgaaagctcagaggtcatgcctcactcggcgcggcctccggggaccggagccaacttcaaccgcgcgcgcgaccagcgcggcacccgccgcgtctttctgcgtcgcccgccgcctccgcttcggcgtcctcctcatgtcacagccaatggtcatcgaggcgagggaggcagcggcggcgggggagcgcgtcggagcgcgggagaggaggcgggcgggcggtacacgaggcgcggcggcgtggcggaccgtgaggtggcggtgagtgccagcgcggaccctgtgggacggaatgctgcgaccgtcgccactggtggtgaggctccaccgccgcgggaggaggatggcggcggacgaggtggtgttcttgtgagcaagcgcccgtctgctgcgcccgtgctcccaccgcccaagcggagggcggtctccgtcactcggcagttcccacccgcctccaggtggacctcggctgctcctgctccgctcgctggtgcagatgccgacggaggtttgcggacacgatacgaagggcaacgtgagaacagagcttctgatgcattcaagaagccggcagttgctcgtcccctcgcgggcctcaaggatggtgttggtgttggtgtgatgtcgagagcggtgtcccccaaagctgctggcacgagggttctcaaaaagccgtgtgccagggatggagctgctccaatgtcgaacacagatcgtcatgatgctggattggtgaagtgatgaagatgataaattcaaccatagctggactggagaaagggcacctgcctgtgatgtcagctgaaggttcaggaggtgtttatttcatgcgagatgcaacaggccagaagaatgttgctgtgtttaagcctattgatgaggaacccatggccaaaaacaacccaaggggcgttcctgtgtccacagacggcgaggggatgaagaggggaacaattgtaggggaaggtgcattcagggaggttgcagcttatattctcgaccatccagttagtgatagtaaatatggtcacagtgttgggttttctggtgtgcctcccaccacattggtccgaaccttacatagggggaagagcttcaagattggttcactgcagatgttcatggagaacaatggaagcactgaagatatgggtcctcgatcttttcctgtcaaggaggttcacaaaatagcagtactagatattaggttagctaatgctgatcgtcatgctgggaatattctagtgtgcaaggagggagaaggtggcaactacaagctgattccaattgatcatggttattgcttgccagagaagtttgaagatgttacatttgagtggctctactggccccaagcccgtgagccattcagtgatgaaaccattgaatacatcaaatcacttgatgctgaagaagacatcaagcttctcaagttccatgggtgggagctgcccccacgatgcgctcgtgttctgcgcatcagcaccatgcttttgaagaaaggtgcagctcgtggcttcacaccatatgacatagggcgcattctatgcagggaaactgtgaatagtgagtctgagattgaggacatcattcaggaagcagaggatgctgttctcccagggtccagtgaaaacatgttcttagaaactgtatctgaaatcatggaccgtcacctcgacaaggagtgagtttagaaattcagaataactgatctagttgttccagttccagctgtatccggtttgttgtttctattgttgacaagcactgatcaacagactaataatttgatttgtttgtacctctcaaatgtttctttcggttgtaatgctcgagtactttgcttagcacactttgtgaataatatatttgttcagtt

SEQ ID NO: 40054 - protein, 315 aa, Zea mays subsp. mays
  peptide (1)..(315): Ceres Seq. ID no. 12391454
  misc_feature (23)..(272): Pfam Name: Pfam Description:  Phosphatidylinositol 3- and 4-kinase
  misc_feature (1)..(314): NCBI GI NO: 34904388 NR Description: unnamed protein product
  misc_feature (1)..(313): NCBI GI NO: 18407090 NR Description: expressed protein; protein id: At2g46500
  misc_feature (2)..(314): NCBI GI NO: 15237921 NR Description: ubiquitin; protein id: At5g24240.1
  misc_feature (24)..(314): NCBI GI NO: 6633833 NR Description: F1N19.4 [Arabidopsis thaliana]
  misc_feature (30)..(314): NCBI GI NO: 15217655 NR Description: unknown protein; protein id: At1g64460.1
  misc_feature (7)..(298): NCBI GI NO: 15228965 NR Description: putative protein; protein id: At3g56600.1
  misc_feature (1)..(291): NCBI GI NO: 18395629 NR Description: expressed protein; protein id: At2g03890
  misc_feature (1)..(291): NCBI GI NO: 25363315 NR Description: hypothetical protein At2g03890
  misc_feature (1)..(288): NCBI GI NO: 18394020 NR Description: ubiquitin, putative; protein id: At1g13640
  misc_feature (1)..(288): NCBI GI NO: 25363319 NR Description: F21F23.8 protein - Arabidopsis thaliana
MKMINSTIAGLEKGHLPVMSAEGSGGVYFMRDATGQKNVAVFKPIDEEPMAKNNPRGVPVSTDGEGMKRGTIVGEGAFREVAAYILDHPVSDSKYGHSVGFSGVPPTTLVRTLHRGKSFKIGSLQMFMENNGSTEDMGPRSFPVKEVHKIAVLDIRLANADRHAGNILVCKEGEGGNYKLIPIDHGYCLPEKFEDVTFEWLYWPQAREPFSDETIEYIKSLDAEEDIKLLKFHGWELPPRCARVLRISTMLLKKGAARGFTPYDIGRILCRETVNSESEIEDIIQEAEDAVLPGSSENMFLETVSEIMDRHLDKE

SEQ ID NO: 40055 - protein, 313 aa, Zea mays subsp. mays
  peptide (1)..(313): Ceres Seq. ID no. 12391455
  misc_feature (21)..(270): Pfam Name: Pfam Description:  Phosphatidylinositol 3- and 4-kinase
  misc_feature (1)..(312): NCBI GI NO: 34904388 NR Description: unnamed protein product
  misc_feature (1)..(311): NCBI GI NO: 18407090 NR Description: expressed protein; protein id: At2g46500
  misc_feature (1)..(312): NCBI GI NO: 15237921 NR Description: ubiquitin; protein id: At5g24240.1
  misc_feature (22)..(312): NCBI GI NO: 6633833 NR Description: F1N19.4 [Arabidopsis thaliana]
  misc_feature (28)..(312): NCBI GI NO: 15217655 NR Description: unknown protein; protein id: At1g64460.1
  misc_feature (5)..(296): NCBI GI NO: 15228965 NR Description: putative protein; protein id: At3g56600.1
  misc_feature (1)..(289): NCBI GI NO: 18395629 NR Description: expressed protein; protein id: At2g03890
  misc_feature (1)..(289): NCBI GI NO: 25363315 NR Description: hypothetical protein At2g03890
  misc_feature (1)..(286): NCBI GI NO: 18394020 NR Description: ubiquitin, putative; protein id: At1g13640
  misc_feature (1)..(286): NCBI GI NO: 25363319 NR Description: F21F23.8 protein - Arabidopsis thaliana
MINSTIAGLEKGHLPVMSAEGSGGVYFMRDATGQKNVAVFKPIDEEPMAKNNPRGVPVSTDGEGMKRGTIVGEGAFREVAAYILDHPVSDSKYGHSVGFSGVPPTTLVRTLHRGKSFKIGSLQMFMENNGSTEDMGPRSFPVKEVHKIAVLDIRLANADRHAGNILVCKEGEGGNYKLIPIDHGYCLPEKFEDVTFEWLYWPQAREPFSDETIEYIKSLDAEEDIKLLKFHGWELPPRCARVLRISTMLLKKGAARGFTPYDIGRILCRETVNSESEIEDIIQEAEDAVLPGSSENMFLETVSEIMDRHLDKE

SEQ ID NO: 40056 - protein, 297 aa, Zea mays subsp. mays
  peptide (1)..(297): Ceres Seq. ID no. 12391456
  misc_feature (5)..(254): Pfam Name: Pfam Description:  Phosphatidylinositol 3- and 4-kinase
  misc_feature (1)..(296): NCBI GI NO: 34904388 NR Description: unnamed protein product
  misc_feature (1)..(295): NCBI GI NO: 18407090 NR Description: expressed protein; protein id: At2g46500
  misc_feature (1)..(296): NCBI GI NO: 15237921 NR Description: ubiquitin; protein id: At5g24240.1
  misc_feature (6)..(296): NCBI GI NO: 6633833 NR Description: F1N19.4 [Arabidopsis thaliana]
  misc_feature (12)..(296): NCBI GI NO: 15217655 NR Description: unknown protein; protein id: At1g64460.1
  misc_feature (1)..(280): NCBI GI NO: 15228965 NR Description: putative protein; protein id: At3g56600.1
  misc_feature (1)..(273): NCBI GI NO: 18395629 NR Description: expressed protein; protein id: At2g03890
  misc_feature (1)..(273): NCBI GI NO: 25363315 NR Description: hypothetical protein At2g03890
  misc_feature (1)..(270): NCBI GI NO: 18394020 NR Description: ubiquitin, putative; protein id: At1g13640
  misc_feature (1)..(270): NCBI GI NO: 25363319 NR Description: F21F23.8 protein - Arabidopsis thaliana
MSAEGSGGVYFMRDATGQKNVAVFKPIDEEPMAKNNPRGVPVSTDGEGMKRGTIVGEGAFREVAAYILDHPVSDSKYGHSVGFSGVPPTTLVRTLHRGKSFKIGSLQMFMENNGSTEDMGPRSFPVKEVHKIAVLDIRLANADRHAGNILVCKEGEGGNYKLIPIDHGYCLPEKFEDVTFEWLYWPQAREPFSDETIEYIKSLDAEEDIKLLKFHGWELPPRCARVLRISTMLLKKGAARGFTPYDIGRILCRETVNSESEIEDIIQEAEDAVLPGSSENMFLETVSEIMDRHLDKE

SEQ ID NO: 40057 - DNA, 938 bp, Zea mays subsp. mays
  misc_feature (1)..(938): Ceres Seq. ID no. 14305297
aatatcaatagaagtgacaactccatctctggtctcccagactcccacgcctataatctcattcccctccttcaaagccctctggcgatcgagattcttccccctccgtctccagatatggcaaacaaaaggattcagaaggaactcatggatctgcaaaaggacccaccgacatcatgcagtgcagggccagctggagaggatctattccactggcaggccacaatcatgggtcctagcgacagcccctatgcaggaggggttttctttgttaatatccattttcctcctgactacccgtttaagcctccaaaagtgaacttccaaacaaaagtttatcacccgaacatcaactctaacgggagcatctgccttgatatcctcaaggagcagtggagccctgcactgaccatatcaaaggtcctcctctccatcagctcgcttctgactgaccccaacccagacgaccccctcgtccccgagatcgcccacatgtacaagaaccagaggccgcgctacgaggaaaccgcacgggcctggacccagaagtacgcgatgggctagctgattctgtgttgccgaacaatactgtcactgccaagaagatcatcatcacgacgttgtaagaaattaagttgaaccggtttccccgtcgtgtgatggtattaagagcccagatggctgctgcgtcagttatactagcttcgcagaccaaagttcttctgtgtgtacagtacttttgaagctggatagtctgaatcctgtgccagaacctaaggtcttcgctttgttccctgaagagcgtttgtgaccatagaatctgcatctgtaaccttgccagctaagaaaacagacagtagctgcttgtatgatgtcgagatgctatagttccgatgggtggaaccgtgcagatgaaacagtccagtggtcttgcgttc

SEQ ID NO: 40058 - protein, 187 aa, Zea mays subsp. mays
  peptide (1)..(187): Ceres Seq. ID no. 14305298
  misc_feature (40)..(187): NCBI GI NO: 2668744 NR Description: ubiquitin conjugating enzyme [Zea mays]
  misc_feature (40)..(187): NCBI GI NO: 34909292 NR Description: ubiquitin conjugating enzyme
  misc_feature (40)..(187): NCBI GI NO: 32488376 NR Description: OSJNBa0043A12.6
  misc_feature (40)..(187): NCBI GI NO: 5762457 NR Description: ubiquitin-conjugating enzyme UBC2
  misc_feature (40)..(187): NCBI GI NO: 28569269 NR Description: ubiquitin-conjugating enzyme E2
  misc_feature (40)..(186): NCBI GI NO: 20152203 NR Description: ubiquitin-conjugating enzyme OsUBC5a
  misc_feature (48)..(186): NCBI GI NO: 18308140 NR Description: putative ubiquitin [Pinus pinaster]
  misc_feature (40)..(186): NCBI GI NO: 4100646 NR Description: putative ubiquitin conjugating enzyme
  misc_feature (40)..(187): NCBI GI NO: 464981 NR Description: Ubiquitin-conjugating enzyme E2-17 kDa
  misc_feature (40)..(187): NCBI GI NO: 28569267 NR Description: ubiquitin-conjugating enzyme E2
NINRSDNSISGLPDSHAYNLIPLLQSPLAIEILPPPSPDMANKRIQKELMDLQKDPPTSCSAGPAGEDLFHWQATIMGPSDSPYAGGVFFVNIHFPPDYPFKPPKVNFQTKVYHPNINSNGSICLDILKEQWSPALTISKVLLSISSLLTDPNPDDPLVPEIAHMYKNQRPRYEETARAWTQKYAMG

SEQ ID NO: 40059 - protein, 148 aa, Zea mays subsp. mays
  peptide (1)..(148): Ceres Seq. ID no. 14305299
  misc_feature (1)..(148): NCBI GI NO: 2668744 NR Description: ubiquitin conjugating enzyme [Zea mays]
  misc_feature (1)..(148): NCBI GI NO: 34909292 NR Description: ubiquitin conjugating enzyme
  misc_feature (1)..(148): NCBI GI NO: 32488376 NR Description: OSJNBa0043A12.6
  misc_feature (1)..(148): NCBI GI NO: 5762457 NR Description: ubiquitin-conjugating enzyme UBC2
  misc_feature (1)..(148): NCBI GI NO: 28569269 NR Description: ubiquitin-conjugating enzyme E2
  misc_feature (1)..(147): NCBI GI NO: 20152203 NR Description: ubiquitin-conjugating enzyme OsUBC5a
  misc_feature (9)..(147): NCBI GI NO: 18308140 NR Description: putative ubiquitin [Pinus pinaster]
  misc_feature (1)..(147): NCBI GI NO: 4100646 NR Description: putative ubiquitin conjugating enzyme
  misc_feature (1)..(148): NCBI GI NO: 464981 NR Description: Ubiquitin-conjugating enzyme E2-17 kDa
  misc_feature (1)..(148): NCBI GI NO: 28569267 NR Description: ubiquitin-conjugating enzyme E2
MANKRIQKELMDLQKDPPTSCSAGPAGEDLFHWQATIMGPSDSPYAGGVFFVNIHFPPDYPFKPPKVNFQTKVYHPNINSNGSICLDILKEQWSPALTISKVLLSISSLLTDPNPDDPLVPEIAHMYKNQRPRYEETARAWTQKYAMG

SEQ ID NO: 40060 - protein, 138 aa, Zea mays subsp. mays
  peptide (1)..(138): Ceres Seq. ID no. 14305300
  misc_feature (1)..(138): NCBI GI NO: 2668744 NR Description: ubiquitin conjugating enzyme [Zea mays]
  misc_feature (1)..(138): NCBI GI NO: 34909292 NR Description: ubiquitin conjugating enzyme
  misc_feature (1)..(138): NCBI GI NO: 32488376 NR Description: OSJNBa0043A12.6
  misc_feature (1)..(138): NCBI GI NO: 5762457 NR Description: ubiquitin-conjugating enzyme UBC2
  misc_feature (1)..(138): NCBI GI NO: 28569269 NR Description: ubiquitin-conjugating enzyme E2
  misc_feature (1)..(137): NCBI GI NO: 20152203 NR Description: ubiquitin-conjugating enzyme OsUBC5a
  misc_feature (1)..(137): NCBI GI NO: 18308140 NR Description: putative ubiquitin [Pinus pinaster]
  misc_feature (1)..(137): NCBI GI NO: 4100646 NR Description: putative ubiquitin conjugating enzyme
  misc_feature (1)..(138): NCBI GI NO: 464981 NR Description: Ubiquitin-conjugating enzyme E2-17 kDa
  misc_feature (1)..(138): NCBI GI NO: 28569267 NR Description: ubiquitin-conjugating enzyme E2
MDLQKDPPTSCSAGPAGEDLFHWQATIMGPSDSPYAGGVFFVNIHFPPDYPFKPPKVNFQTKVYHPNINSNGSICLDILKEQWSPALTISKVLLSISSLLTDPNPDDPLVPEIAHMYKNQRPRYEETARAWTQKYAMG

SEQ ID NO: 40061 - DNA, 1805 bp, Zea mays subsp. mays
  misc_feature (1)..(1805): Ceres Seq. ID no. 12435271
  misc_feature (1799)..(1799): n is a, c, t, g, unknown, or other
aggaaattaagcttacagccccacaccgacaccgccggccaccgccatcgcctcgctgccgatggcggccgccgccgccgcccggatcctccgcttggccccgcgccggatccaggttcccaagacctccccgctcgccgcactctcgttcccactccctcgaacggcgccgatcgccgctggccttggggaggcggcagcgcttctgcgccgtggcgcaggcccccgcccccgcccccgcagccgcggcgacaggggcggcgggagaggccgtgggggagttcaggaagcggctgcgggtggcggacgtgaagggcggggaggacgagggcgccgcgtgggtgggcaaggagctcgccgtgccgggtgggtgcgcacctgccgcgcccagaggaccataaccttcgtcgaggtcaatgatggctcttgcttatccaatatgcaatgtgtattgactcctgaaacagaaggctatgaccagatagactctgtcactactggagcatctgtactagttgagggagttgttgcaagcagccaaggcggtaagcaaaaagtggagttgaaggtttcaaagatcaccgtgattggtaagagtgaccccacatcttttcctatacagaagaaacgggcatcaagagaattccttaggaccgtagcccatctccgtcctcggacaaacacttttggtgcagttgcaagagtgagaaatactctggcatacgcaactcataaattctttcaagacaatggatttgtttgggtttcgagcccaattattactgcctcagattgtgaaggagctggggagcagttttacgtgactactttgcgctgaaggtggttctctactcaaagatattcctgctaccaaggatggaagggttgattggtcacaggatttcttctgcaaaccagcatttctgacagtgtctggacagcttaatggtgaaacatatgcttcagctctatctgatatttacacatttggtccaacgtttagggctgaaaattcaaacacttcaaggcatctggctgaattttggatgattgaacctgagcttgcctttgcggatctgaacgatgacatggcttgtgcaactgcatatctccagtatgtagtaaagtatattctggagaactgcaaagaggatatggatttcttcaatacttggattgaaaaaggcatcatagatcggttaaatgatgtagtagagaagaacttcgttcacctgtcttacactgatgctgttgagctacttcttgggtccaagaaggaattcgagttcccggtaaagtggggtttggatcttcaaagcgagcatgagcgatatatcacagaagttgcctttggtgggcgccctgtaataattagagattacccaaaggagatcaaagctttctatatgagagaaaatgatgatgggaagacagttgctgcaatggatctgttggttcctcgggttggtgaacttattggaggaagccagagggaagagcgtcttgattaccttgaagcccggttggacgagcaaaatctgaataaggagagctactggtggtatttggacctacgacgatatggatcagttccacacgctggtttcggtctcggatttgagcggcttgtacagtttgctactggaatggacaacatcagagacaccatcccatttcctcgagttcctggctctgccgagttttagcgccctggaagtgttgtcgtatacgtatactttagaaacattctttcctaggatgtaatgtgaggaaaggcatacgttgtactgtacaactgnttcatc

SEQ ID NO: 40062 - protein, 258 aa, Zea mays subsp. mays
  peptide (1)..(258): Ceres Seq. ID no. 12435272
  misc_feature (192)..(257): Pfam Name: D, K and N Pfam Description: tRNA synthetases class II
  misc_feature (1)..(257): NCBI GI NO: 22775674 NR Description: putative asparaginyl-tRNA synthetase
  misc_feature (80)..(257): NCBI GI NO: 2664210 NR Description: asparaginyl-tRNA synthetase [Arabidopsis thaliana]
  misc_feature (80)..(257): NCBI GI NO: 15236037 NR Description: asparagine--tRNA ligase; protein id: At4g17300
  misc_feature (80)..(257): NCBI GI NO: 20139977 NR Description: Asparaginyl-tRNA synthetase
  misc_feature (1)..(140): NCBI GI NO: 22775674 NR Description: putative asparaginyl-tRNA synthetase
  misc_feature (102)..(257): NCBI GI NO: 23040758 NR Description: hypothetical protein
  misc_feature (102)..(257): NCBI GI NO: 16332045 NR Description: asparaginyl-tRNA synthetase
  misc_feature (102)..(257): NCBI GI NO: 20141643 NR Description: Asparaginyl-tRNA synthetase
  misc_feature (102)..(257): NCBI GI NO: 23125364 NR Description: hypothetical protein [Nostoc punctiforme]
  misc_feature (102)..(257): NCBI GI NO: 17231150 NR Description: asparaginyl-tRNA synthetase [Nostoc sp. PCC 7120]
MAAAAAARILRLAPRRIQVPKTSPLAALSFPLPRTAPIAAGLGEAAALLRRGAGPRPRPRSRGDRGGGRGRGGVQEAAAGGGREGRGGRGRRVGGQGARRAGWVRTCRAQRTITFVEVNDGSCLSNMQCVLTPETEGYDQIDSVTTGASVLVEGVVASSQGGKQKVELKVSKITVIGKSDPTSFPIQKKRASREFLRTVAHLRPRTNTFGAVARVRNTLAYATHKFFQDNGFVWVSSPIITASDCEGAGEQFYVTTLR

SEQ ID NO: 40063 - protein, 219 aa, Zea mays subsp. mays
  peptide (1)..(219): Ceres Seq. ID no. 12435273
  misc_feature (1)..(215): Pfam Name: D, K and N Pfam Description: tRNA synthetases class II
  misc_feature (1)..(219): NCBI GI NO: 22775674 NR Description: putative asparaginyl-tRNA synthetase
  misc_feature (1)..(219): NCBI GI NO: 2664210 NR Description: asparaginyl-tRNA synthetase [Arabidopsis thaliana]
  misc_feature (1)..(219): NCBI GI NO: 15236037 NR Description: asparagine--tRNA ligase; protein id: At4g17300
  misc_feature (1)..(219): NCBI GI NO: 20139977 NR Description: Asparaginyl-tRNA synthetase
  misc_feature (1)..(219): NCBI GI NO: 23040758 NR Description: hypothetical protein
  misc_feature (1)..(219): NCBI GI NO: 16332045 NR Description: asparaginyl-tRNA synthetase
  misc_feature (1)..(219): NCBI GI NO: 20141643 NR Description: Asparaginyl-tRNA synthetase
  misc_feature (1)..(219): NCBI GI NO: 23125364 NR Description: hypothetical protein [Nostoc punctiforme]
  misc_feature (1)..(219): NCBI GI NO: 17231150 NR Description: asparaginyl-tRNA synthetase [Nostoc sp. PCC 7120]
  misc_feature (1)..(219): NCBI GI NO: 23020175 NR Description: hypothetical protein
MIEPELAFADLNDDMACATAYLQYVVKYILENCKEDMDFFNTWIEKGIIDRLNDVVEKNFVHLSYTDAVELLLGSKKEFEFPVKWGLDLQSEHERYITEVAFGGRPVIIRDYPKEIKAFYMRENDDGKTVAAMDLLVPRVGELIGGSQREERLDYLEARLDEQNLNKESYWWYLDLRRYGSVPHAGFGLGFERLVQFATGMDNIRDTIPFPRVPGSAEF

SEQ ID NO: 40064 - protein, 205 aa, Zea mays subsp. mays
  peptide (1)..(205): Ceres Seq. ID no. 12435274
  misc_feature (1)..(201): Pfam Name: D, K and N Pfam Description: tRNA synthetases class II
  misc_feature (1)..(205): NCBI GI NO: 22775674 NR Description: putative asparaginyl-tRNA synthetase
  misc_feature (1)..(205): NCBI GI NO: 2664210 NR Description: asparaginyl-tRNA synthetase [Arabidopsis thaliana]
  misc_feature (1)..(205): NCBI GI NO: 15236037 NR Description: asparagine--tRNA ligase; protein id: At4g17300
  misc_feature (1)..(205): NCBI GI NO: 20139977 NR Description: Asparaginyl-tRNA synthetase
  misc_feature (1)..(205): NCBI GI NO: 23040758 NR Description: hypothetical protein
  misc_feature (1)..(205): NCBI GI NO: 16332045 NR Description: asparaginyl-tRNA synthetase
  misc_feature (1)..(205): NCBI GI NO: 23125364 NR Description: hypothetical protein [Nostoc punctiforme]
  misc_feature (1)..(205): NCBI GI NO: 20141643 NR Description: Asparaginyl-tRNA synthetase
  misc_feature (1)..(205): NCBI GI NO: 17231150 NR Description: asparaginyl-tRNA synthetase [Nostoc sp. PCC 7120]
  misc_feature (1)..(205): NCBI GI NO: 23020175 NR Description: hypothetical protein
MACATAYLQYVVKYILENCKEDMDFFNTWIEKGIIDRLNDVVEKNFVHLSYTDAVELLLGSKKEFEFPVKWGLDLQSEHERYITEVAFGGRPVIIRDYPKEIKAFYMRENDDGKTVAAMDLLVPRVGELIGGSQREERLDYLEARLDEQNLNKESYWWYLDLRRYGSVPHAGFGLGFERLVQFATGMDNIRDTIPFPRVPGSAEF

SEQ ID NO: 40065 - DNA, 1006 bp, Zea mays subsp. mays
  misc_feature (1)..(1006): Ceres Seq. ID no. 12363531
  misc_feature (452)..(452): n is a, c, t, g, unknown, or other
  misc_feature (455)..(455): n is a, c, t, g, unknown, or other
  misc_feature (632)..(632): n is a, c, t, g, unknown, or other
  misc_feature (314)..(314): n is a, c, t, g, unknown, or other
  misc_feature (341)..(341): n is a, c, t, g, unknown, or other
  misc_feature (331)..(331): n is a, c, t, g, unknown, or other
  misc_feature (453)..(453): n is a, c, t, g, unknown, or other
  misc_feature (352)..(352): n is a, c, t, g, unknown, or other
  misc_feature (344)..(344): n is a, c, t, g, unknown, or other
  misc_feature (487)..(487): n is a, c, t, g, unknown, or other
  misc_feature (650)..(650): n is a, c, t, g, unknown, or other
  misc_feature (339)..(339): n is a, c, t, g, unknown, or other
  misc_feature (484)..(484): n is a, c, t, g, unknown, or other
  misc_feature (390)..(390): n is a, c, t, g, unknown, or other
  misc_feature (332)..(332): n is a, c, t, g, unknown, or other
  misc_feature (317)..(317): n is a, c, t, g, unknown, or other
  misc_feature (462)..(462): n is a, c, t, g, unknown, or other
  misc_feature (335)..(335): n is a, c, t, g, unknown, or other
  misc_feature (490)..(490): n is a, c, t, g, unknown, or other
  misc_feature (311)..(311): n is a, c, t, g, unknown, or other
  misc_feature (285)..(285): n is a, c, t, g, unknown, or other
atgatgacgacgatgatgaacagaactcaccccgagtcatcgatccctggcaacgcgctaaccaagctagtagctagcaagcatcggccatgtccaagccaaggttggacgggaaggtggccatcgtgacgggcggcgcgagcgggatcggcgaggcggcggcgcggctgttcgcctcgagcggcgccacggtggtgatcgcggacgtgcaggacgcgctgggggaggcggtggcggcgtcggtggggccccggtgcgcgtacgcgcggtgcgacgtgacggacnaggcgcaggtggaggcgacggtggcncgngcngtgtcggcgcacgnncgnctgnangtnatgctgancaacgccggcgtgctgctcccgacggggtcggtgatgnacatggacctggcggagctggaccgcgtgatggccgtcaacttccggggcgccgcggcgtgnntnaagcacncggcgcgcgcgatggcgtccgncgncgncggcgccatcgtgtgcacggccagcgtggcgtcgctgcagggcgggttcggcccggcgtcgtacacggcgtccaagcacgcgttgctgggcctggtgcgcgccgcggcgggggagctgggacggcacggcgtgcgcgtcaantgcgtgtcccccggcggngtcgccacgcccctcagctgcgcgctcatgggcgtggggccccgcgagctggaggccatgacggtgccgcacaacgtcctgcaggggaaggtgctgcgcgccgaggacgtcgccgaggccgcgctgttcctcgcgtccgaccaggccgccttcatcagcggacacaacctcgttgtcgacggcgccaccaccgccgtcaaccccgccgtgctgcacaccgtcgggctgtgaacgacgagcgctcgctgcgacagtagatacatatatactccacaccttcaatgccatgtttcatctttttcttttctttgtttgtttgcattggttgccatcaagaaaactgcttttgttagctc

SEQ ID NO: 40066 - protein, 263 aa, Zea mays subsp. mays
  peptide (1)..(263): Ceres Seq. ID no. 12363532
  misc_feature (1)..(263): NCBI GI NO: 40714675 NR Description: putative hydroxysteroiddehydrogenase
  misc_feature (2)..(253): NCBI GI NO: 15983819 NR Description: 3-beta-hydroxysteroiddehydrogenase
  misc_feature (1)..(251): NCBI GI NO: 34899218 NR Description: alcohol dehydrogenase-like protein~contains ESTAU165528
  misc_feature (1)..(251): NCBI GI NO: 34899216 NR Description: alcohol dehydrogenase-like protein
  misc_feature (1)..(192): NCBI GI NO: 33146885 NR Description: putative short-chain alcohol dehydrogenase
  misc_feature (203)..(251): NCBI GI NO: 33146885 NR Description: putative short-chain alcohol dehydrogenase
  misc_feature (1)..(192): NCBI GI NO: 1877480 NR Description: short-chain alcohol dehydrogenase
  misc_feature (214)..(251): NCBI GI NO: 1877480 NR Description: short-chain alcohol dehydrogenase
  misc_feature (1)..(251): NCBI GI NO: 33354197 NR Description: putative sex determination protein tasselseed 2
  misc_feature (1)..(253): NCBI GI NO: 15228656 NR Description: short-chain alcohol dehydrogenase, putative
  misc_feature (66)..(66): Xaa is any aa, unknown or other
  misc_feature (74)..(74): Xaa is any aa, unknown or other
  misc_feature (75)..(75): Xaa is any aa, unknown or other
  misc_feature (76)..(76): Xaa is any aa, unknown or other
  misc_feature (81)..(81): Xaa is any aa, unknown or other
  misc_feature (82)..(82): Xaa is any aa, unknown or other
  misc_feature (84)..(84): Xaa is any aa, unknown or other
  misc_feature (85)..(85): Xaa is any aa, unknown or other
  misc_feature (88)..(88): Xaa is any aa, unknown or other
  misc_feature (101)..(101): Xaa is any aa, unknown or other
  misc_feature (121)..(121): Xaa is any aa, unknown or other
  misc_feature (122)..(122): Xaa is any aa, unknown or other
  misc_feature (125)..(125): Xaa is any aa, unknown or other
  misc_feature (132)..(132): Xaa is any aa, unknown or other
  misc_feature (133)..(133): Xaa is any aa, unknown or other
  misc_feature (134)..(134): Xaa is any aa, unknown or other
  misc_feature (181)..(181): Xaa is any aa, unknown or other
  misc_feature (187)..(187): Xaa is any aa, unknown or other
MSKPRLDGKVAIVTGGASGIGEAAARLFASSGATVVIADVQDALGEAVAASVGPRCAYARCDVTDXAQVEATVXXXVSAHXXLXXMLXNAGVLLPTGSVMXMDLAELDRVMAVNFRGAAAXXKHXARAMASXXXGAIVCTASVASLQGGFGPASYTASKHALLGLVRAAAGELGRHGVRVXCVSPGXVATPLSCALMGVGPRELEAMTVPHNVLQGKVLRAEDVAEAALFLASDQAAFISGHNLVVDGATTAVNPAVLHTVGL

SEQ ID NO: 40067 - protein, 178 aa, Zea mays subsp. mays
  peptide (1)..(178): Ceres Seq. ID no. 12363533
  misc_feature (1)..(178): NCBI GI NO: 40714675 NR Description: putative hydroxysteroiddehydrogenase
  misc_feature (1)..(168): NCBI GI NO: 15983819 NR Description: 3-beta-hydroxysteroiddehydrogenase
  misc_feature (1)..(166): NCBI GI NO: 34899218 NR Description: alcohol dehydrogenase-like protein~contains ESTAU165528
  misc_feature (1)..(166): NCBI GI NO: 34899216 NR Description: alcohol dehydrogenase-like protein
  misc_feature (1)..(107): NCBI GI NO: 33146885 NR Description: putative short-chain alcohol dehydrogenase
  misc_feature (118)..(166): NCBI GI NO: 33146885 NR Description: putative short-chain alcohol dehydrogenase
  misc_feature (1)..(107): NCBI GI NO: 1877480 NR Description: short-chain alcohol dehydrogenase
  misc_feature (129)..(166): NCBI GI NO: 1877480 NR Description: short-chain alcohol dehydrogenase
  misc_feature (1)..(166): NCBI GI NO: 33354197 NR Description: putative sex determination protein tasselseed 2
  misc_feature (1)..(168): NCBI GI NO: 15228656 NR Description: short-chain alcohol dehydrogenase, putative
  misc_feature (3)..(3): Xaa is any aa, unknown or other
  misc_feature (16)..(16): Xaa is any aa, unknown or other
  misc_feature (36)..(36): Xaa is any aa, unknown or other
  misc_feature (37)..(37): Xaa is any aa, unknown or other
  misc_feature (40)..(40): Xaa is any aa, unknown or other
  misc_feature (47)..(47): Xaa is any aa, unknown or other
  misc_feature (48)..(48): Xaa is any aa, unknown or other
  misc_feature (49)..(49): Xaa is any aa, unknown or other
  misc_feature (96)..(96): Xaa is any aa, unknown or other
  misc_feature (102)..(102): Xaa is any aa, unknown or other
MLXNAGVLLPTGSVMXMDLAELDRVMAVNFRGAAAXXKHXARAMASXXXGAIVCTASVASLQGGFGPASYTASKHALLGLVRAAAGELGRHGVRVXCVSPGXVATPLSCALMGVGPRELEAMTVPHNVLQGKVLRAEDVAEAALFLASDQAAFISGHNLVVDGATTAVNPAVLHTVGL

SEQ ID NO: 40068 - protein, 164 aa, Zea mays subsp. mays
  peptide (1)..(164): Ceres Seq. ID no. 12363534
  misc_feature (1)..(164): NCBI GI NO: 40714675 NR Description: putative hydroxysteroiddehydrogenase
  misc_feature (1)..(154): NCBI GI NO: 15983819 NR Description: 3-beta-hydroxysteroiddehydrogenase
  misc_feature (1)..(152): NCBI GI NO: 34899218 NR Description: alcohol dehydrogenase-like protein~contains ESTAU165528
  misc_feature (1)..(152): NCBI GI NO: 34899216 NR Description: alcohol dehydrogenase-like protein
  misc_feature (1)..(93): NCBI GI NO: 33146885 NR Description: putative short-chain alcohol dehydrogenase
  misc_feature (104)..(152): NCBI GI NO: 33146885 NR Description: putative short-chain alcohol dehydrogenase
  misc_feature (1)..(93): NCBI GI NO: 1877480 NR Description: short-chain alcohol dehydrogenase
  misc_feature (115)..(152): NCBI GI NO: 1877480 NR Description: short-chain alcohol dehydrogenase
  misc_feature (1)..(152): NCBI GI NO: 33354197 NR Description: putative sex determination protein tasselseed 2
  misc_feature (1)..(154): NCBI GI NO: 15228656 NR Description: short-chain alcohol dehydrogenase, putative
  misc_feature (2)..(2): Xaa is any aa, unknown or other
  misc_feature (22)..(22): Xaa is any aa, unknown or other
  misc_feature (23)..(23): Xaa is any aa, unknown or other
  misc_feature (26)..(26): Xaa is any aa, unknown or other
  misc_feature (33)..(33): Xaa is any aa, unknown or other
  misc_feature (34)..(34): Xaa is any aa, unknown or other
  misc_feature (35)..(35): Xaa is any aa, unknown or other
  misc_feature (82)..(82): Xaa is any aa, unknown or other
  misc_feature (88)..(88): Xaa is any aa, unknown or other
MXMDLAELDRVMAVNFRGAAAXXKHXARAMASXXXGAIVCTASVASLQGGFGPASYTASKHALLGLVRAAAGELGRHGVRVXCVSPGXVATPLSCALMGVGPRELEAMTVPHNVLQGKVLRAEDVAEAALFLASDQAAFISGHNLVVDGATTAVNPAVLHTVGL

SEQ ID NO: 40069 - DNA, 1215 bp, Zea mays subsp. mays; identical to SEQ ID NO: 30369
  misc_feature (1)..(1215): Ceres Seq. ID no. 13665996

SEQ ID NO: 40070 - protein, 235 aa, Zea mays subsp. mays; identical to SEQ ID NO: 30370
  peptide (1)..(235): Ceres Seq. ID no. 13665997
  misc_feature (88)..(142): Pfam Name: Pfam Description:  KH domain
  misc_feature (33)..(235): NCBI GI NO: 34907446 NR Description: P0434C04.5
  misc_feature (33)..(233): NCBI GI NO: 16930473 NR Description: At1g09660/F21M12_5 [Arabidopsis thaliana]
  misc_feature (33)..(233): NCBI GI NO: 22329449 NR Description: KH domain quaking protein, putative
  misc_feature (39)..(235): NCBI GI NO: 12322716 NR Description: unknown protein; 28504-31237
  misc_feature (39)..(235): NCBI GI NO: 30680583 NR Description: KH domain protein [Arabidopsis thaliana]
  misc_feature (39)..(235): NCBI GI NO: 40645104 NR Description: hypothetical protein [Nicotiana tabacum]
  misc_feature (39)..(234): NCBI GI NO: 15224909 NR Description: KH domain protein [Arabidopsis thaliana]
  misc_feature (43)..(232): NCBI GI NO: 34900448 NR Description: contains EST C27129
  misc_feature (33)..(233): NCBI GI NO: 15236738 NR Description: KH domain protein [Arabidopsis thaliana]
  misc_feature (33)..(233): NCBI GI NO: 20268733 NR Description: unknown protein [Arabidopsis thaliana]

SEQ ID NO: 40071 - protein, 175 aa, Zea mays subsp. mays; identical to SEQ ID NO: 30371
  peptide (1)..(175): Ceres Seq. ID no. 13665998
  misc_feature (28)..(82): Pfam Name: Pfam Description:  KH domain
  misc_feature (1)..(175): NCBI GI NO: 34907446 NR Description: P0434C04.5
  misc_feature (1)..(173): NCBI GI NO: 16930473 NR Description: At1g09660/F21M12_5 [Arabidopsis thaliana]
  misc_feature (1)..(173): NCBI GI NO: 22329449 NR Description: KH domain quaking protein, putative
  misc_feature (1)..(175): NCBI GI NO: 12322716 NR Description: unknown protein; 28504-31237
  misc_feature (1)..(175): NCBI GI NO: 30680583 NR Description: KH domain protein [Arabidopsis thaliana]
  misc_feature (1)..(175): NCBI GI NO: 40645104 NR Description: hypothetical protein [Nicotiana tabacum]
  misc_feature (1)..(174): NCBI GI NO: 15224909 NR Description: KH domain protein [Arabidopsis thaliana]
  misc_feature (1)..(172): NCBI GI NO: 34900448 NR Description: contains EST C27129
  misc_feature (1)..(173): NCBI GI NO: 15236738 NR Description: KH domain protein [Arabidopsis thaliana]
  misc_feature (1)..(173): NCBI GI NO: 20268733 NR Description: unknown protein [Arabidopsis thaliana]

SEQ ID NO: 40072 - protein, 167 aa, Zea mays subsp. mays; identical to SEQ ID NO: 30372
  peptide (1)..(167): Ceres Seq. ID no. 13665999
  misc_feature (20)..(74): Pfam Name: Pfam Description:  KH domain
  misc_feature (1)..(167): NCBI GI NO: 34907446 NR Description: P0434C04.5
  misc_feature (1)..(165): NCBI GI NO: 16930473 NR Description: At1g09660/F21M12_5 [Arabidopsis thaliana]
  misc_feature (1)..(165): NCBI GI NO: 22329449 NR Description: KH domain quaking protein, putative
  misc_feature (1)..(167): NCBI GI NO: 12322716 NR Description: unknown protein; 28504-31237
  misc_feature (1)..(167): NCBI GI NO: 30680583 NR Description: KH domain protein [Arabidopsis thaliana]
  misc_feature (1)..(167): NCBI GI NO: 40645104 NR Description: hypothetical protein [Nicotiana tabacum]
  misc_feature (1)..(166): NCBI GI NO: 15224909 NR Description: KH domain protein [Arabidopsis thaliana]
  misc_feature (1)..(164): NCBI GI NO: 34900448 NR Description: contains EST C27129
  misc_feature (1)..(165): NCBI GI NO: 15236738 NR Description: KH domain protein [Arabidopsis thaliana]
  misc_feature (1)..(165): NCBI GI NO: 20268733 NR Description: unknown protein [Arabidopsis thaliana]

SEQ ID NO: 40073 - DNA, 972 bp, Zea mays subsp. mays; identical to SEQ ID NO: 33047
  misc_feature (1)..(972): Ceres Seq. ID no. 12341008

SEQ ID NO: 40074 - protein, 176 aa, Zea mays subsp. mays; identical to SEQ ID NO: 33048
  peptide (1)..(176): Ceres Seq. ID no. 12341009
  misc_feature (1)..(170): NCBI GI NO: 40882701 NR Description: putative ripening regulated protein
  misc_feature (1)..(172): NCBI GI NO: 12231292 NR Description: ripening regulated protein DDTFR8
  misc_feature (1)..(173): NCBI GI NO: 11934654 NR Description: p23 [Brassica napus]
  misc_feature (1)..(132): NCBI GI NO: 38637531 NR Description: putative p23 co-chaperone
  misc_feature (1)..(132): NCBI GI NO: 11229591 NR Description: p23 co-chaperone [Arabidopsis thaliana]
  misc_feature (1)..(132): NCBI GI NO: 30679149 NR Description: glycine-rich protein [Arabidopsis thaliana]
  misc_feature (3)..(132): NCBI GI NO: 7487014 NR Description: hypothetical protein T14P8
  misc_feature (1)..(138): NCBI GI NO: 22330824 NR Description: similar to p23 {Brassica napus}
  misc_feature (1)..(162): NCBI GI NO: 17556837 NR Description: Telomerase-binding protein p23 like (19.4 kD)
  misc_feature (5)..(163): NCBI GI NO: 32398747 NR Description: p23 co-chaperone, probable

SEQ ID NO: 40075 - DNA, 976 bp, Zea mays subsp. mays
  misc_feature (1)..(976): Ceres Seq. ID no. 12358492
agaaaggatgggctctgacaaatcctgacctaattgaccagtgcgcaagagaggattttgttgagagagttaaaactcagcaagatgaaggctgcaatgtccatggttttttagatgtcagtaaagttgctggaaattttcactttgccccaggcaaaggtttttatgaatcgaacatagatgtgcctgagctgtcattacttgaaggtggtttcaatattacccacaaaataaacaaactgtcctttgggacagaatttcctggtgttgtcaatccacttgatggtgctcagtggacacagccagcttcagatgggacataccagtatttcataaaagttgtccctacaatatacactgatataagaggacacaatattcattcgaaccagttctcggtaacggaacattttagggatggaaatgttcgtccgaaaccccaacctggagtttttttcttctatgatttctcacctataaaggtgatattcacagaagaaaatagatccctactccactacctgacaaacctttgtgctatagtgggaggtgtgttcactgtctcgggtatcatcgactcgtttatataccacggacagaaggcactcaagaagaaaatggagctaggtaaatacagatgatcaacatcgaccttgtactggccccatcgtttccaagttttgtggcatgtaaggaggggatatgcctgctaaatacgacaagatgccacttacattgctgaggttgcaatttgcaaggccatcagactgatgttattgcacgtgagctgatcagataacatgtaaaaagacaatgaatagcctggtctggggggagtgctttgatgtccatcattgttcactgacattgaaatggcccgaaccggtgcggtggagtaatttgagttcggaggtggatatatcatagatcatagaatgtttcttatgaaagtttcttcaaggaaacagcttcactc

SEQ ID NO: 40076 - protein, 212 aa, Zea mays subsp. mays
  peptide (1)..(212): Ceres Seq. ID no. 12358493
  misc_feature (1)..(211): NCBI GI NO: 38347102 NR Description: OSJNBa0006M15.17
  misc_feature (1)..(211): NCBI GI NO: 30693281 NR Description: expressed protein [Arabidopsis thaliana]
  misc_feature (1)..(188): NCBI GI NO: 6598578 NR Description: F5J5.4 [Arabidopsis thaliana]
  misc_feature (184)..(211): NCBI GI NO: 6598578 NR Description: F5J5.4 [Arabidopsis thaliana]
  misc_feature (1)..(211): NCBI GI NO: 18395087 NR Description: expressed protein; protein id: At1g22200
  misc_feature (1)..(210): NCBI GI NO: 7706278 NR Description: serologically defined breast cancer antigen 84
  misc_feature (1)..(210): NCBI GI NO: 13384938 NR Description: serologically defined breast cancer antigen 84
  misc_feature (1)..(210): NCBI GI NO: 28278376 NR Description: Similar to serologically defined breast cancerantigen 84
  misc_feature (1)..(210): NCBI GI NO: 7959731 NR Description: PRO0989 [Homo sapiens]
  misc_feature (1)..(210): NCBI GI NO: 34860248 NR Description: similar to serologically defined breast cancerantigen 84
KGWALTNPDLIDQCAREDFVERVKTQQDEGCNVHGFLDVSKVAGNFHFAPGKGFYESNIDVPELSLLEGGFNITHKINKLSFGTEFPGVVNPLDGAQWTQPASDGTYQYFIKVVPTIYTDIRGHNIHSNQFSVTEHFRDGNVRPKPQPGVFFFYDFSPIKVIFTEENRSLLHYLTNLCAIVGGVFTVSGIIDSFIYHGQKALKKKMELGKYR

SEQ ID NO: 40077 - DNA, 1698 bp, Zea mays subsp. mays
  misc_feature (1)..(1698): Ceres Seq. ID no. 12361474
gcacgagaccattacctagaacatcctaatcgaaaaagccagtggctcagcggctgcgcccgtgcctgtcacgtcttgtcctcaatctctctctctctctctcaatcctcacctctccggctctctttctcctccccagtccccaacggtgaggcccccgccgcgcagcccatcgacgcattgccgctgcaagcgcggacaccgagggctagaagcggcggcggtgccagggttcggcgctcggtcggcaatggcgaggcggcttatgctggcgctccctgtgctcctcttcttattgctcgtcgggcaatgccacggcggcaagattggcgtctgctacggccgcaacgccgacgaccttccggcgccagacaaggtggcgcagctaatccagcagcagtccatcaagtacgtgcgcatctacgacaccaacatcgacgtcatcaaggcattcgccaacaccggcgtcgagctcatggtcggcgtccccaactccgacctcctcgccttcgcgcagtaccagtccaacgtcgacacatggctcaagaacagcatcctcccatactacccggacaccatgatcacctacatcaccgtcggcgccgaggtcaccgagagccccgccaacgtctccgccctcgtcgtgccagccatgcgcaatgtgcacaccgcgctcaagaaggccggcctgcacaagaagatcaccatctccagcacccactcgctcgggatactgtcccggtcgttcccgccgtctgctggggcgttcaacagcagctacgcctacttcttgaagcctatgctccagttccttgtggagaatcaggcaccgttcatggtggatttgtacccctactatgcgtaccagaactcacggagcaatgtgtccctcaactacgcgctgttctcgccagagtcccaggatgtgattgacccaaacactggactggtttacactaacatgttcgacgcccaggtcgattccatcttctttgcgctcatggctctgaacttcaagactttgaagatcatgatcactgagtcagggtggccaaacaaaggggcggtcaaggagactggagccacaccagacaatgctcagacctacaataccaatttgatacgccatgttgttaatgacagcggcacaccggcgaaaccaggggaagagattgatgtctacatattttcattgttcaatgagaacaggaaacctggcatcgagtcggagaggaactggggactgttttttcctgataagagctctatctacagccttgattggacgggccgaggcaatgtggatgttatgactggagcaaacattacaagtgctaatggtacctggtgtattgcttcaactaatgcatcagaaactgatctgcagaatgccctcaactgggcatgtggtccaggcaacgtagattgttctgccatacagccaagccaaccctgctaccagccggacactttaacttcccatgcttcatatgcattcaatagctactaccagcaaaatggagccaacgttgtggcctgtgactttggaggtgcggggatacgaacgacaaaagatccaagtaagagtcccatccttttttactgttatgataatcatgatgctatgcatggtttcatgataacatccatttgcatatattcaggttgtggattatgtctttagttgatgttggagtt

SEQ ID NO: 40078 - protein, 477 aa, Zea mays subsp. mays
  peptide (1)..(477): Ceres Seq. ID no. 12361475
  misc_feature (26)..(345): Pfam Name: Pfam Description:  Glycosyl hydrolases family 17
  misc_feature (7)..(457): NCBI GI NO: 34909360 NR Description: P0638D12.12
  misc_feature (1)..(450): NCBI GI NO: 15241268 NR Description: glycosyl hydrolase family 17; protein id:At5g56590
  misc_feature (1)..(361): NCBI GI NO: 30688297 NR Description: glycosyl hydrolase family 17
  misc_feature (1)..(361): NCBI GI NO: 30688300 NR Description: glycosyl hydrolase family 17
  misc_feature (25)..(361): NCBI GI NO: 25407609 NR Description: beta-1, 3-glucanase-like protein
  misc_feature (26)..(269): NCBI GI NO: 7488645 NR Description: beta-1,3-glucanase (EC 3
  misc_feature (9)..(443): NCBI GI NO: 11071974 NR Description: elicitor inducible beta-1,3-glucanase Nt-SubE76
  misc_feature (11)..(443): NCBI GI NO: 15236882 NR Description: glycosyl hydrolase family 17; protein id:At4g26830
  misc_feature (7)..(349): NCBI GI NO: 25316444 NR Description: probable beta-1,3-glucanase
  misc_feature (354)..(452): NCBI GI NO: 25316444 NR Description: probable beta-1,3-glucanase
MARRLMLALPVLLFLLLVGQCHGGKIGVCYGRNADDLPAPDKVAQLIQQQSIKYVRIYDTNIDVIKAFANTGVELMVGVPNSDLLAFAQYQSNVDTWLKNSILPYYPDTMITYITVGAEVTESPANVSALVVPAMRNVHTALKKAGLHKKITISSTHSLGILSRSFPPSAGAFNSSYAYFLKPMLQFLVENQAPFMVDLYPYYAYQNSRSNVSLNYALFSPESQDVIDPNTGLVYTNMFDAQVDSIFFALMALNFKTLKIMITESGWPNKGAVKETGATPDNAQTYNTNLIRHVVNDSGTPAKPGEEIDVYIFSLFNENRKPGIESERNWGLFFPDKSSIYSLDWTGRGNVDVMTGANITSANGTWCIASTNASETDLQNALNWACGPGNVDCSAIQPSQPCYQPDTLTSHASYAFNSYYQQNGANVVACDFGGAGIRTTKDPSKSPILFYCYDNHDAMHGFMITSICIYSGCGLCL

SEQ ID NO: 40079 - protein, 472 aa, Zea mays subsp. mays
  peptide (1)..(472): Ceres Seq. ID no. 12361476
  misc_feature (21)..(340): Pfam Name: Pfam Description:  Glycosyl hydrolases family 17
  misc_feature (2)..(452): NCBI GI NO: 34909360 NR Description: P0638D12.12
  misc_feature (1)..(445): NCBI GI NO: 15241268 NR Description: glycosyl hydrolase family 17; protein id:At5g56590
  misc_feature (1)..(356): NCBI GI NO: 30688297 NR Description: glycosyl hydrolase family 17
  misc_feature (1)..(356): NCBI GI NO: 30688300 NR Description: glycosyl hydrolase family 17
  misc_feature (20)..(356): NCBI GI NO: 25407609 NR Description: beta-1, 3-glucanase-like protein
  misc_feature (21)..(264): NCBI GI NO: 7488645 NR Description: beta-1,3-glucanase (EC 3
  misc_feature (4)..(438): NCBI GI NO: 11071974 NR Description: elicitor inducible beta-1,3-glucanase Nt-SubE76
  misc_feature (6)..(438): NCBI GI NO: 15236882 NR Description: glycosyl hydrolase family 17; protein id:At4g26830
  misc_feature (2)..(344): NCBI GI NO: 25316444 NR Description: probable beta-1,3-glucanase
  misc_feature (349)..(447): NCBI GI NO: 25316444 NR Description: probable beta-1,3-glucanase
MLALPVLLFLLLVGQCHGGKIGVCYGRNADDLPAPDKVAQLIQQQSIKYVRIYDTNIDVIKAFANTGVELMVGVPNSDLLAFAQYQSNVDTWLKNSILPYYPDTMITYITVGAEVTESPANVSALVVPAMRNVHTALKKAGLHKKITISSTHSLGILSRSFPPSAGAFNSSYAYFLKPMLQFLVENQAPFMVDLYPYYAYQNSRSNVSLNYALFSPESQDVIDPNTGLVYTNMFDAQVDSIFFALMALNFKTLKIMITESGWPNKGAVKETGATPDNAQTYNTNLIRHVVNDSGTPAKPGEEIDVYIFSLFNENRKPGIESERNWGLFFPDKSSIYSLDWTGRGNVDVMTGANITSANGTWCIASTNASETDLQNALNWACGPGNVDCSAIQPSQPCYQPDTLTSHASYAFNSYYQQNGANVVACDFGGAGIRTTKDPSKSPILFYCYDNHDAMHGFMITSICIYSGCGLCL

SEQ ID NO: 40080 - protein, 402 aa, Zea mays subsp. mays
  peptide (1)..(402): Ceres Seq. ID no. 12361477
  misc_feature (1)..(270): Pfam Name: Pfam Description:  Glycosyl hydrolases family 17
  misc_feature (1)..(382): NCBI GI NO: 34909360 NR Description: P0638D12.12
  misc_feature (1)..(375): NCBI GI NO: 15241268 NR Description: glycosyl hydrolase family 17; protein id:At5g56590
  misc_feature (1)..(286): NCBI GI NO: 30688297 NR Description: glycosyl hydrolase family 17
  misc_feature (1)..(286): NCBI GI NO: 30688300 NR Description: glycosyl hydrolase family 17
  misc_feature (1)..(286): NCBI GI NO: 25407609 NR Description: beta-1, 3-glucanase-like protein
  misc_feature (1)..(194): NCBI GI NO: 7488645 NR Description: beta-1,3-glucanase (EC 3
  misc_feature (1)..(368): NCBI GI NO: 11071974 NR Description: elicitor inducible beta-1,3-glucanase Nt-SubE76
  misc_feature (1)..(368): NCBI GI NO: 15236882 NR Description: glycosyl hydrolase family 17; protein id:At4g26830
  misc_feature (1)..(274): NCBI GI NO: 25316444 NR Description: probable beta-1,3-glucanase
  misc_feature (279)..(377): NCBI GI NO: 25316444 NR Description: probable beta-1,3-glucanase
MVGVPNSDLLAFAQYQSNVDTWLKNSILPYYPDTMITYITVGAEVTESPANVSALVVPAMRNVHTALKKAGLHKKITISSTHSLGILSRSFPPSAGAFNSSYAYFLKPMLQFLVENQAPFMVDLYPYYAYQNSRSNVSLNYALFSPESQDVIDPNTGLVYTNMFDAQVDSIFFALMALNFKTLKIMITESGWPNKGAVKETGATPDNAQTYNTNLIRHVVNDSGTPAKPGEEIDVYIFSLFNENRKPGIESERNWGLFFPDKSSIYSLDWTGRGNVDVMTGANITSANGTWCIASTNASETDLQNALNWACGPGNVDCSAIQPSQPCYQPDTLTSHASYAFNSYYQQNGANVVACDFGGAGIRTTKDPSKSPILFYCYDNHDAMHGFMITSICIYSGCGLCL

SEQ ID NO: 40081 - DNA, 2333 bp, Zea mays subsp. mays
  misc_feature (1)..(2333): Ceres Seq. ID no. 12375264
gcacgagaccattacctagaacatcctaatcgaaaaggcttttgctgcgtctttcctttgacgtcagcgagcgaagaactacttctttccctccctctctcatcattctcagatctcccgctccctccttcccttcatctctctgaatcctgctgcccacctcgccgtcctcgcattccgccgctcgctctcgcgatccggcagcttcctcttcgccgtcgttcttgcctcacctcgtccgctatcctgtaagctgctgctgggtcacccgtggctggactcgaccccgccggcgccgcctccgggggctgggttcgccggatgtttatcggctcctgatccatccggatcccggatccgccgcaaaggcaccgcctttgtaggttctccgggcccatgcaggagggtttggcgattcggcggtgaggcagggctctggtttagttcttgcgttggactagcccggagatgcttcgtggaacggggcacggcggcggggatgcgcggaggcgggcactgcgctcgtcgcggcggcgtctgcccgggtggatctggtggcttctcgggatcttcctccttgtcgggctcatgctcttcgtccttcaccacaaccaaaaggagcagttccggccgcccgtcgtggataatggttcagagatggaggaagtccctcgtgagaaagtgaatttctcagaagagcttttgagcagcacatcatttgctcgccaattagcggatcagatgactttagcaaaggcgtatgtcatccttgcaaaagagcatgataatcttcagcttgcatgggagcttagttcgcagataaggaattgtcaaagattgctctctgaaggggcagttagtgggagagcaatcactaaagatgaagcccatcctataataagccggctagcactgttaatatacaaggctcaggactctcactatgatatcagcacaacaatagtgacattgaagaaccatgccctggcactagaggagcgtgcaaaggcagcaattgttcagagtgctgagtttggccagttagcagcagaatccttcccgaagaatctgcactgtctaactgtgaaactgacagaggagtggcttcggaacccgaagcataggagtcgctcagaggagaaccggaattccacacgattggtggataataatctgtatcatttctgtatattctctgataatgtgctggccacttcagttgttgtcaattctacagtctccaatgcaaatcaccctcaacagcttgtgtttcatgtggtcactgacagaatccattttggcgcaatgtcaacattgttcctcataaatgacttcaaaggttgtactgttgaagtccgatgcatagatgagttctcgtggttgaatgcttcttcatctcctcttgtcaggcaactatctgaggttgaaactcagggttactattactcagctggttccaagaatcctgaaagagaaataaaattccataatccaaagtttgtttctctactgaaccatttacggttctacattcctcagatacttcccaacttggagaaggtggtgtttcttgatgacgatgttgtggtgcaaaaggatttgactcagctgttctccatagagctgcatggcaatgtcattggagcagtggaaacttgtttagagtcgtttcatcggtatcacaagtatctaaatttttcgcatcctactatcagctccaagattgatccacatacttgtggatgggcttttggaatgaacatttttgacttgatagcttggaggaaggcaaacgccacatcattgtatcattattggcaagagcaaaattctgacctattgctctggagaacaggaactcttcctgcaggccttttgacattttatggcctgatggagcccctagaccgcagatggcatgtcttgggtctcgggtatgatgtagacatagatgatcgtctgattgagagtgctgctgttgtgcactataatggaaacatgaaaccctggctgaagctggctattcgccgttacaagtatatatgggaacggtatgtgaatatctcacacccgtatgttagagagtgtatgttgcattagaaagtctgcaaatctctgtatgttcttgcatggcactgaagctgcatgcttcagtttcttcacatgaggctgcttttgagcaccttatgtgccggaaagttccagaggtagaatatatactcaagggacagcatcaaagaagtcaactgttaagttttctttttgggttgggagaagattcattttgggatgaaaataattcctttgcagagtttacatacaatttggactgg

SEQ ID NO: 40082 - protein, 543 aa, Zea mays subsp. mays
  peptide (1)..(543): Ceres Seq. ID no. 12375265
  misc_feature (18)..(541): NCBI GI NO: 15293067 NR Description: unknown protein [Arabidopsis thaliana]
  misc_feature (9)..(543): NCBI GI NO: 18399484 NR Description: Expressed protein; protein id: At2g20810
  misc_feature (56)..(543): NCBI GI NO: 32492171 NR Description: OSJNBb0034I13.1
  misc_feature (72)..(523): NCBI GI NO: 25411994 NR Description: hypothetical protein At2g20810
  misc_feature (86)..(542): NCBI GI NO: 7271113 NR Description: 68 kDa protein [Cicer arietinum]
  misc_feature (80)..(543): NCBI GI NO: 15233046 NR Description: putative protein; protein id: At3g61130
  misc_feature (47)..(543): NCBI GI NO: 10177914 NR Description: emb|CAB71043
  misc_feature (47)..(543): NCBI GI NO: 18422837 NR Description: putative protein; protein id: At5g47780
  misc_feature (62)..(543): NCBI GI NO: 38423965 NR Description: putative glycosyltransferase
  misc_feature (80)..(540): NCBI GI NO: 7485958 NR Description: hypothetical protein F22I13
MLRGTGHGGGDARRRALRSSRRRLPGWIWWLLGIFLLVGLMLFVLHHNQKEQFRPPVVDNGSEMEEVPREKVNFSEELLSSTSFARQLADQMTLAKAYVILAKEHDNLQLAWELSSQIRNCQRLLSEGAVSGRAITKDEAHPIISRLALLIYKAQDSHYDISTTIVTLKNHALALEERAKAAIVQSAEFGQLAAESFPKNLHCLTVKLTEEWLRNPKHRSRSEENRNSTRLVDNNLYHFCIFSDNVLATSVVVNSTVSNANHPQQLVFHVVTDRIHFGAMSTLFLINDFKGCTVEVRCIDEFSWLNASSSPLVRQLSEVETQGYYYSAGSKNPEREIKFHNPKFVSLLNHLRFYIPQILPNLEKVVFLDDDVVVQKDLTQLFSIELHGNVIGAVETCLESFHRYHKYLNFSHPTISSKIDPHTCGWAFGMNIFDLIAWRKANATSLYHYWQEQNSDLLLWRTGTLPAGLLTFYGLMEPLDRRWHVLGLGYDVDIDDRLIESAAVVHYNGNMKPWLKLAIRRYKYIWERYVNISHPYVRECMLH

SEQ ID NO: 40083 - protein, 503 aa, Zea mays subsp. mays
  peptide (1)..(503): Ceres Seq. ID no. 12375266
  misc_feature (1)..(501): NCBI GI NO: 15293067 NR Description: unknown protein [Arabidopsis thaliana]
  misc_feature (1)..(503): NCBI GI NO: 18399484 NR Description: Expressed protein; protein id: At2g20810
  misc_feature (16)..(503): NCBI GI NO: 32492171 NR Description: OSJNBb0034I13.1
  misc_feature (32)..(483): NCBI GI NO: 25411994 NR Description: hypothetical protein At2g20810
  misc_feature (46)..(502): NCBI GI NO: 7271113 NR Description: 68 kDa protein [Cicer arietinum]
  misc_feature (40)..(503): NCBI GI NO: 15233046 NR Description: putative protein; protein id: At3g61130
  misc_feature (7)..(503): NCBI GI NO: 10177914 NR Description: emb|CAB71043
  misc_feature (7)..(503): NCBI GI NO: 18422837 NR Description: putative protein; protein id: At5g47780
  misc_feature (22)..(503): NCBI GI NO: 38423965 NR Description: putative glycosyltransferase
  misc_feature (40)..(500): NCBI GI NO: 7485958 NR Description: hypothetical protein F22I13
MLFVLHHNQKEQFRPPVVDNGSEMEEVPREKVNFSEELLSSTSFARQLADQMTLAKAYVILAKEHDNLQLAWELSSQIRNCQRLLSEGAVSGRAITKDEAHPIISRLALLIYKAQDSHYDISTTIVTLKNHALALEERAKAAIVQSAEFGQLAAESFPKNLHCLTVKLTEEWLRNPKHRSRSEENRNSTRLVDNNLYHFCIFSDNVLATSVVVNSTVSNANHPQQLVFHVVTDRIHFGAMSTLFLINDFKGCTVEVRCIDEFSWLNASSSPLVRQLSEVETQGYYYSAGSKNPEREIKFHNPKFVSLLNHLRFYIPQILPNLEKVVFLDDDVVVQKDLTQLFSIELHGNVIGAVETCLESFHRYHKYLNFSHPTISSKIDPHTCGWAFGMNIFDLIAWRKANATSLYHYWQEQNSDLLLWRTGTLPAGLLTFYGLMEPLDRRWHVLGLGYDVDIDDRLIESAAVVHYNGNMKPWLKLAIRRYKYIWERYVNISHPYVRECMLH

SEQ ID NO: 40084 - protein, 480 aa, Zea mays subsp. mays
  peptide (1)..(480): Ceres Seq. ID no. 12375267
  misc_feature (1)..(478): NCBI GI NO: 15293067 NR Description: unknown protein [Arabidopsis thaliana]
  misc_feature (1)..(480): NCBI GI NO: 18399484 NR Description: Expressed protein; protein id: At2g20810
  misc_feature (1)..(480): NCBI GI NO: 32492171 NR Description: OSJNBb0034I13.1
  misc_feature (9)..(460): NCBI GI NO: 25411994 NR Description: hypothetical protein At2g20810
  misc_feature (23)..(479): NCBI GI NO: 7271113 NR Description: 68 kDa protein [Cicer arietinum]
  misc_feature (17)..(480): NCBI GI NO: 15233046 NR Description: putative protein; protein id: At3g61130
  misc_feature (1)..(480): NCBI GI NO: 10177914 NR Description: emb|CAB71043
  misc_feature (1)..(480): NCBI GI NO: 18422837 NR Description: putative protein; protein id: At5g47780
  misc_feature (1)..(480): NCBI GI NO: 38423965 NR Description: putative glycosyltransferase
  misc_feature (17)..(477): NCBI GI NO: 7485958 NR Description: hypothetical protein F22I13
MEEVPREKVNFSEELLSSTSFARQLADQMTLAKAYVILAKEHDNLQLAWELSSQIRNCQRLLSEGAVSGRAITKDEAHPIISRLALLIYKAQDSHYDISTTIVTLKNHALALEERAKAAIVQSAEFGQLAAESFPKNLHCLTVKLTEEWLRNPKHRSRSEENRNSTRLVDNNLYHFCIFSDNVLATSVVVNSTVSNANHPQQLVFHVVTDRIHFGAMSTLFLINDFKGCTVEVRCIDEFSWLNASSSPLVRQLSEVETQGYYYSAGSKNPEREIKFHNPKFVSLLNHLRFYIPQILPNLEKVVFLDDDVVVQKDLTQLFSIELHGNVIGAVETCLESFHRYHKYLNFSHPTISSKIDPHTCGWAFGMNIFDLIAWRKANATSLYHYWQEQNSDLLLWRTGTLPAGLLTFYGLMEPLDRRWHVLGLGYDVDIDDRLIESAAVVHYNGNMKPWLKLAIRRYKYIWERYVNISHPYVRECMLH

SEQ ID NO: 40085 - DNA, 891 bp, Zea mays subsp. mays
  misc_feature (1)..(891): Ceres Seq. ID no. 12435263
aacccacccccacacccacgagcccggcggcgtgctctctgctgtctgctctgcacccaggaccttcggccacaggagctcagccctatccctcgacggtgctcgcggccggcgcgcggcggctcgacccttccccatctccagctccacgccgtctccaccgcctggaatccagggcctccgacgccaccccacctccaccgcctggaatcgaggaccgtcggcgccgccgacctccgtcccctgcctgctgcctcgactcaactgtgtcagggtatttgcaaacagtgacaaaggttctgccttgcttgctgtggagccatggctgcaaagatacgcgtggtgatgaagtcttttatgagccaaagcaaccaggtcgcagggcttctgccattcacaaagaaggtcggactacctgaatcgcgagccttgtacaccgtgctgcggtcgccgcatatcgataagaagtccagggaacagttctcgatgcatgtcaagaaacagtttgtggaactgacagccaaaccgcacgagctccacaagaagttcttctggctaaaacgcctgcgcatacctggggcccagtacgaggtacagatttctttcaagacacgcctggatatggcgagcctaaggtcccaggctccttgatggctcacgatgatcgttcttatcgtcccgcgaaagtttgaagtgctgagactggtactcagaacttgtatccatcaacatttcatatgaagacatgcttattttgatgactttcgaaaaatgtagctgctaactatttccagtgcagttttgagtgcttatggcttgattcacacaaatgtagctgctacgttcagaaataaaaaaattatggaaatacagcatgatatcgcttgattc

SEQ ID NO: 40086 - protein, 138 aa, Zea mays subsp. mays
  peptide (1)..(138): Ceres Seq. ID no. 12435264
PTPTPTSPAACSLLSALHPGPSATGAQPYPSTVLAAGARRLDPSPSPAPRRLHRLESRASDATPPPPPGIEDRRRRRPPSPACCLDSTVSGYLQTVTKVLPCLLWSHGCKDTRGDEVFYEPKQPGRRASAIHKEGRTT

SEQ ID NO: 40087 - protein, 114 aa, Zea mays subsp. mays
  peptide (1)..(114): Ceres Seq. ID no. 12435265
THPHTHEPGGVLSAVCSAPRTFGHRSSALSLDGARGRRAAARPFPISSSTPSPPPGIQGLRRHPTSTAWNRGPSAPPTSVPCLLPRLNCVRVFANSDKGSALLAVEPWLQRYAW

SEQ ID NO: 40088 - protein, 109 aa, Zea mays subsp. mays
  peptide (1)..(109): Ceres Seq. ID no. 12435266
  misc_feature (4)..(93): Pfam Name: Pfam Description:  Ribosomal protein S10p/S20e
  misc_feature (1)..(109): NCBI GI NO: 11177526 NR Description: ribosomal protein S10 [Zea mays]
  misc_feature (1)..(109): NCBI GI NO: 11528351 NR Description: ribosomal protein S10 [Zea mays]
  misc_feature (1)..(106): NCBI GI NO: 9229951 NR Description: mitochondrial ribosomal protein S10
  misc_feature (1)..(106): NCBI GI NO: 9229953 NR Description: mitochondrial ribosomal protein S10
  misc_feature (1)..(105): NCBI GI NO: 2119076 NR Description: ribosomal protein S10 - potato mitochondrion
  misc_feature (1)..(105): NCBI GI NO: 1362069 NR Description: ribosomal protein S10 - garden pea mitochondrion
  misc_feature (1)..(105): NCBI GI NO: 1710792 NR Description: MITOCHONDRIAL RIBOSOMAL PROTEIN S10
  misc_feature (1)..(105): NCBI GI NO: 11177522 NR Description: ribosomal protein S10 [Oxalis regnellii]
  misc_feature (1)..(105): NCBI GI NO: 2673855 NR Description: ribosomal protein S10 [Pisum sativum]
  misc_feature (4)..(104): NCBI GI NO: 2119078 NR Description: ribosomal protein S10 precursor
MAAKIRVVMKSFMSQSNQVAGLLPFTKKVGLPESRALYTVLRSPHIDKKSREQFSMHVKKQFVELTAKPHELHKKFFWLKRLRIPGAQYEVQISFKTRLDMASLRSQAP

SEQ ID NO: 40089 - DNA, 2169 bp, Zea mays subsp. mays
  misc_feature (1)..(2169): Ceres Seq. ID no. 12361134
gcacgagaccattacctagaacatcctaatcgaaaaagctcgacgcatcttcgccgccgctcaaccttccccccacgccccaacctatccactcgaaaccttctttcccccgggagacgattcgtcagggagaggaaagaggcaagaggggccatggacgctgccaagttggtgacgccgatcgctgtgtctcacattctggcgcacccgtcggcgggctccgacggcgcagtgaccgatctcgtcgttcaggtcctcgacctgaagtccgtcggcacgggcagccggttcagtttcacagcaactgacgggaaggataagatcaaggcgatgcttcccaccaacttcgggtcggaggtccgctctggcaacctgaagaacctcggcctcatccgcatcatcgactacacttgcaacgtcgtcaaaggcaaagatgacaaagtcttggttgtcatcaaatgcgagcttgtgtgccaagcgcttgacgccgagatcaacggcgaggccaaaaaagaggagcctccaattgtgctgaagcctaaggacgaatgcgtgggcgtgactcccccactcgctatgaagcccaagcaggaggtgaagtctgcgtcccagatcgtgaatgagcagcgtggaaatactgctcctgtcaagcccctttccatgacaaagagggtccatcctttgatcactctgaacccctaccagggtaactgggtcattaaggtgcgggtcacgagcaaaggcaacctgagaacctacaggaatgctcgcggagaaggctgtgtcttcaatgtagagctcaccgatgaggatggcacccagatccaagccaccatgtttaatgacgctgcaaagaagttctatccgatttttgagctgggaaatgtctattatgtctcaaaaggatctcttagaattgccaacaagcagttcaagactgtccaaaatgactacgagatgtcactaaacgagaatgctattgttgaagaagcagagggggagacttgcattccgcaagtgcaatacaaccttgtcaagattgatcagctaggatcatatgtcggtggcagggagcttgtagatattgttggtgtggttcagagcgtatctcccacactcagtgtcaggagaaagattgacaacgagacaataccgaagcgtgacattgttgtggcggatgactctggcaaaactgttagtatctctctttggaatgatcttgctactacgactgggcaagagcttttggacatggctgacagttcgcctgttgttgcgataaagagcctaaaagtgtctgactttcaaggcgtgtctctttctactgtaggcaaaagtactcttgcgattaatcctgatctacacgaggctcagaatctcaagtcatggtatgactctgaaggcaaagatacttcgctggcaccaattggtgcagaaatgggtgccgcacgggccggtggcttcaagtccacgtattctgatagagtttttctgtctcacattactagtgatcctgccatgggccaggaaaagcctgttttctttagtttgtatgccaccataagccacatcaagcctgaccagaacatgtggtaccgtgcttgcaagacctgcaacaagaaggtgactgaaacttttggatctggatactggtgcgagggatgccaaaagaatgactcggaatgctcactgagatacatcatggtcgtcaaggtctccgatcctactggcgaggcatgggtctctgtgttcaacgagcatgcagagaagatcattggctgcagcgccgacgagcttgatcggatcaggaaagaggagggggacgacagttatgctctgaagctcaaggaagccacctgggttcctcacctgttccgcgtcagcgtcacacagcatgaatacaataacgagaaaaggcagagaatcactgtgaggagtgaagcgccggtcgagcacgcagctgaatccaagtacctgcttgaacagatagcgaagcttactgcttgctagtagaagatgcaacctttctggtggttcgttaagggctgccctccgagatgttccctctgggttttagcacttctgtaagatatatgtagaggtttggttaccttgatgtcaagcaacagatgctaggacagttcaagcatgatgcatgaagcgtttgcc

SEQ ID NO: 40090 - protein, 669 aa, Zea mays subsp. mays
  peptide (1)..(669): Ceres Seq. ID no. 12361135
  misc_feature (238)..(322): Pfam Name: Pfam Description:  OB-fold nucleic acid binding domain
  misc_feature (53)..(669): NCBI GI NO: 7440032 NR Description: probable replication protein A1 - rice
  misc_feature (53)..(669): NCBI GI NO: 31580977 NR Description: replication protein A 70b
  misc_feature (58)..(665): NCBI GI NO: 15241489 NR Description: replication factor A - like protein
  misc_feature (58)..(664): NCBI GI NO: 15239494 NR Description: RNA helicase; protein id: At5g61000.1
  misc_feature (212)..(665): NCBI GI NO: 15225129 NR Description: putative replication protein A1
  misc_feature (75)..(159): NCBI GI NO: 15225129 NR Description: putative replication protein A1
  misc_feature (212)..(666): NCBI GI NO: 15242405 NR Description: replication protein A1-like; protein id:At5g45400
  misc_feature (79)..(159): NCBI GI NO: 15242405 NR Description: replication protein A1-like; protein id:At5g45400
  misc_feature (81)..(663): NCBI GI NO: 32404590 NR Description: hypothetical protein [Neurospora crassa]
  misc_feature (82)..(666): NCBI GI NO: 7488291 NR Description: replication protein A1 homolog T18B16
ARDHYLEHPNRKSSTHLRRRSTFPPRPNLSTRNLLSPGRRFVRERKEARGAMDAAKLVTPIAVSHILAHPSAGSDGAVTDLVVQVLDLKSVGTGSRFSFTATDGKDKIKAMLPTNFGSEVRSGNLKNLGLIRIIDYTCNVVKGKDDKVLVVIKCELVCQALDAEINGEAKKEEPPIVLKPKDECVGVTPPLAMKPKQEVKSASQIVNEQRGNTAPVKPLSMTKRVHPLITLNPYQGNWVIKVRVTSKGNLRTYRNARGEGCVFNVELTDEDGTQIQATMFNDAAKKFYPIFELGNVYYVSKGSLRIANKQFKTVQNDYEMSLNENAIVEEAEGETCIPQVQYNLVKIDQLGSYVGGRELVDIVGVVQSVSPTLSVRRKIDNETIPKRDIVVADDSGKTVSISLWNDLATTTGQELLDMADSSPVVAIKSLKVSDFQGVSLSTVGKSTLAINPDLHEAQNLKSWYDSEGKDTSLAPIGAEMGAARAGGFKSTYSDRVFLSHITSDPAMGQEKPVFFSLYATISHIKPDQNMWYRACKTCNKKVTETFGSGYWCEGCQKNDSECSLRYIMVVKVSDPTGEAWVSVFNEHAEKIIGCSADELDRIRKEEGDDSYALKLKEATWVPHLFRVSVTQHEYNNEKRQRITVRSEAPVEHAAESKYLLEQIAKLTAC

SEQ ID NO: 40091 - protein, 618 aa, Zea mays subsp. mays
  peptide (1)..(618): Ceres Seq. ID no. 12361136
  misc_feature (187)..(271): Pfam Name: Pfam Description:  OB-fold nucleic acid binding domain
  misc_feature (2)..(618): NCBI GI NO: 7440032 NR Description: probable replication protein A1 - rice
  misc_feature (2)..(618): NCBI GI NO: 31580977 NR Description: replication protein A 70b
  misc_feature (7)..(614): NCBI GI NO: 15241489 NR Description: replication factor A - like protein
  misc_feature (7)..(613): NCBI GI NO: 15239494 NR Description: RNA helicase; protein id: At5g61000.1
  misc_feature (161)..(614): NCBI GI NO: 15225129 NR Description: putative replication protein A1
  misc_feature (24)..(108): NCBI GI NO: 15225129 NR Description: putative replication protein A1
  misc_feature (161)..(615): NCBI GI NO: 15242405 NR Description: replication protein A1-like; protein id:At5g45400
  misc_feature (28)..(108): NCBI GI NO: 15242405 NR Description: replication protein A1-like; protein id:At5g45400
  misc_feature (30)..(612): NCBI GI NO: 32404590 NR Description: hypothetical protein [Neurospora crassa]
  misc_feature (31)..(615): NCBI GI NO: 7488291 NR Description: replication protein A1 homolog T18B16
MDAAKLVTPIAVSHILAHPSAGSDGAVTDLVVQVLDLKSVGTGSRFSFTATDGKDKIKAMLPTNFGSEVRSGNLKNLGLIRIIDYTCNVVKGKDDKVLVVIKCELVCQALDAEINGEAKKEEPPIVLKPKDECVGVTPPLAMKPKQEVKSASQIVNEQRGNTAPVKPLSMTKRVHPLITLNPYQGNWVIKVRVTSKGNLRTYRNARGEGCVFNVELTDEDGTQIQATMFNDAAKKFYPIFELGNVYYVSKGSLRIANKQFKTVQNDYEMSLNENAIVEEAEGETCIPQVQYNLVKIDQLGSYVGGRELVDIVGVVQSVSPTLSVRRKIDNETIPKRDIVVADDSGKTVSISLWNDLATTTGQELLDMADSSPVVAIKSLKVSDFQGVSLSTVGKSTLAINPDLHEAQNLKSWYDSEGKDTSLAPIGAEMGAARAGGFKSTYSDRVFLSHITSDPAMGQEKPVFFSLYATISHIKPDQNMWYRACKTCNKKVTETFGSGYWCEGCQKNDSECSLRYIMVVKVSDPTGEAWVSVFNEHAEKIIGCSADELDRIRKEEGDDSYALKLKEATWVPHLFRVSVTQHEYNNEKRQRITVRSEAPVEHAAESKYLLEQIAKLTAC

SEQ ID NO: 40092 - protein, 559 aa, Zea mays subsp. mays
  peptide (1)..(559): Ceres Seq. ID no. 12361137
  misc_feature (128)..(212): Pfam Name: Pfam Description:  OB-fold nucleic acid binding domain
  misc_feature (1)..(559): NCBI GI NO: 7440032 NR Description: probable replication protein A1 - rice
  misc_feature (1)..(559): NCBI GI NO: 31580977 NR Description: replication protein A 70b
  misc_feature (1)..(555): NCBI GI NO: 15241489 NR Description: replication factor A - like protein
  misc_feature (1)..(554): NCBI GI NO: 15239494 NR Description: RNA helicase; protein id: At5g61000.1
  misc_feature (102)..(555): NCBI GI NO: 15225129 NR Description: putative replication protein A1
  misc_feature (1)..(49): NCBI GI NO: 15225129 NR Description: putative replication protein A1
  misc_feature (102)..(556): NCBI GI NO: 15242405 NR Description: replication protein A1-like; protein id:At5g45400
  misc_feature (1)..(49): NCBI GI NO: 15242405 NR Description: replication protein A1-like; protein id:At5g45400
  misc_feature (1)..(553): NCBI GI NO: 32404590 NR Description: hypothetical protein [Neurospora crassa]
  misc_feature (1)..(556): NCBI GI NO: 7488291 NR Description: replication protein A1 homolog T18B16
MLPTNFGSEVRSGNLKNLGLIRIIDYTCNVVKGKDDKVLVVIKCELVCQALDAEINGEAKKEEPPIVLKPKDECVGVTPPLAMKPKQEVKSASQIVNEQRGNTAPVKPLSMTKRVHPLITLNPYQGNWVIKVRVTSKGNLRTYRNARGEGCVFNVELTDEDGTQIQATMFNDAAKKFYPIFELGNVYYVSKGSLRIANKQFKTVQNDYEMSLNENAIVEEAEGETCIPQVQYNLVKIDQLGSYVGGRELVDIVGVVQSVSPTLSVRRKIDNETIPKRDIVVADDSGKTVSISLWNDLATTTGQELLDMADSSPVVAIKSLKVSDFQGVSLSTVGKSTLAINPDLHEAQNLKSWYDSEGKDTSLAPIGAEMGAARAGGFKSTYSDRVFLSHITSDPAMGQEKPVFFSLYATISHIKPDQNMWYRACKTCNKKVTETFGSGYWCEGCQKNDSECSLRYIMVVKVSDPTGEAWVSVFNEHAEKIIGCSADELDRIRKEEGDDSYALKLKEATWVPHLFRVSVTQHEYNNEKRQRITVRSEAPVEHAAESKYLLEQIAKLTAC

SEQ ID NO: 40093 - DNA, 795 bp, Zea mays subsp. mays
  misc_feature (1)..(795): Ceres Seq. ID no. 12359553
acgcgctcttcggcggcaactactgttggatcgtagggcgaaggaaggaaggaaggggagccatgggaaacgcgtcgtccatgctgacccagtacgacatcgaggaggtgcaggagcactgcagctacctcttctcgcagcaggagatcgtgtcgctgtacgagcgcttctgccagttggaccgcagcgccaagggcttcatctccgaggacgagttcctctccatccccgagttctccctcaacccgctctccaagaggttgctccgtatggttgatggattgaacttcaaggattttgttgcgtttctttctaccttcagtgcaaaggccagccttcgtcagaagatcgagtttatattcaaggtttatgacatcgatggcaagggaaaaattaccttcaaggatctgctagaggttttacgggacctaacagggtcattcatgtccgaggaacaaagagagcaagtggtaactgaagttctggaagaagcagggtacacgagggattacgcattctcgcttgaagattttatccagatcatcgaccatcctggccttaagatggaggtggaagtgccaatcgactagtgaaatgtggaaaacaagcttccggttttgtctgcagaacatggttagtgtcatgtagcagggcaatgaccgttcactttcgtcatcttatttgtttccggtccacttgcctaaacttttgtaatctttgttggcttggccttttcgaatatatccaaaacaaaaaaaaatgtcctgcgatgagattttcgtcggttctatgctg

SEQ ID NO: 40094 - protein, 195 aa, Zea mays subsp. mays
  peptide (1)..(195): Ceres Seq. ID no. 12359554
  misc_feature (51)..(79): Pfam Name: Pfam Description:  EF hand
  misc_feature (21)..(195): NCBI GI NO: 16550928 NR Description: calcineurin-like protein [Eucalyptus grandis]
  misc_feature (21)..(195): NCBI GI NO: 18401887 NR Description: expressed protein; protein id: At3g18430
  misc_feature (21)..(195): NCBI GI NO: 21592761 NR Description: calcineurin-like protein [Arabidopsis thaliana]
  misc_feature (21)..(192): NCBI GI NO: 1168750 NR Description: Calcineurin B subunit
  misc_feature (21)..(192): NCBI GI NO: 13445166 NR Description: calcineurin B [Dictyostelium discoideum]
  misc_feature (44)..(190): NCBI GI NO: 3929338 NR Description: Calcineurin B subunit
  misc_feature (21)..(183): NCBI GI NO: 2645886 NR Description: calcineurin subunit B [Neurospora crassa]
  misc_feature (94)..(192): NCBI GI NO: 17566934 NR Description: Calcium binding protein P22 like family member
  misc_feature (21)..(106): NCBI GI NO: 17566934 NR Description: Calcium binding protein P22 like family member
  misc_feature (94)..(192): NCBI GI NO: 39593284 NR Description: Hypothetical protein CBG09544
ALFGGNYCWIVGRRKEGRGAMGNASSMLTQYDIEEVQEHCSYLFSQQEIVSLYERFCQLDRSAKGFISEDEFLSIPEFSLNPLSKRLLRMVDGLNFKDFVAFLSTFSAKASLRQKIEFIFKVYDIDGKGKITFKDLLEVLRDLTGSFMSEEQREQVVTEVLEEAGYTRDYAFSLEDFIQIIDHPGLKMEVEVPID

SEQ ID NO: 40095 - protein, 175 aa, Zea mays subsp. mays
  peptide (1)..(175): Ceres Seq. ID no. 12359555
  misc_feature (31)..(59): Pfam Name: Pfam Description:  EF hand
  misc_feature (1)..(175): NCBI GI NO: 16550928 NR Description: calcineurin-like protein [Eucalyptus grandis]
  misc_feature (1)..(175): NCBI GI NO: 18401887 NR Description: expressed protein; protein id: At3g18430
  misc_feature (1)..(175): NCBI GI NO: 21592761 NR Description: calcineurin-like protein [Arabidopsis thaliana]
  misc_feature (1)..(172): NCBI GI NO: 1168750 NR Description: Calcineurin B subunit
  misc_feature (1)..(172): NCBI GI NO: 13445166 NR Description: calcineurin B [Dictyostelium discoideum]
  misc_feature (24)..(170): NCBI GI NO: 3929338 NR Description: Calcineurin B subunit
  misc_feature (1)..(163): NCBI GI NO: 2645886 NR Description: calcineurin subunit B [Neurospora crassa]
  misc_feature (74)..(172): NCBI GI NO: 17566934 NR Description: Calcium binding protein P22 like family member
  misc_feature (1)..(86): NCBI GI NO: 17566934 NR Description: Calcium binding protein P22 like family member
  misc_feature (74)..(172): NCBI GI NO: 39593284 NR Description: Hypothetical protein CBG09544
MGNASSMLTQYDIEEVQEHCSYLFSQQEIVSLYERFCQLDRSAKGFISEDEFLSIPEFSLNPLSKRLLRMVDGLNFKDFVAFLSTFSAKASLRQKIEFIFKVYDIDGKGKITFKDLLEVLRDLTGSFMSEEQREQVVTEVLEEAGYTRDYAFSLEDFIQIIDHPGLKMEVEVPID

SEQ ID NO: 40096 - protein, 169 aa, Zea mays subsp. mays
  peptide (1)..(169): Ceres Seq. ID no. 12359556
  misc_feature (25)..(53): Pfam Name: Pfam Description:  EF hand
  misc_feature (1)..(169): NCBI GI NO: 16550928 NR Description: calcineurin-like protein [Eucalyptus grandis]
  misc_feature (1)..(169): NCBI GI NO: 18401887 NR Description: expressed protein; protein id: At3g18430
  misc_feature (1)..(169): NCBI GI NO: 21592761 NR Description: calcineurin-like protein [Arabidopsis thaliana]
  misc_feature (1)..(166): NCBI GI NO: 1168750 NR Description: Calcineurin B subunit
  misc_feature (1)..(166): NCBI GI NO: 13445166 NR Description: calcineurin B [Dictyostelium discoideum]
  misc_feature (18)..(164): NCBI GI NO: 3929338 NR Description: Calcineurin B subunit
  misc_feature (1)..(157): NCBI GI NO: 2645886 NR Description: calcineurin subunit B [Neurospora crassa]
  misc_feature (68)..(166): NCBI GI NO: 17566934 NR Description: Calcium binding protein P22 like family member
  misc_feature (1)..(80): NCBI GI NO: 17566934 NR Description: Calcium binding protein P22 like family member
  misc_feature (68)..(166): NCBI GI NO: 39593284 NR Description: Hypothetical protein CBG09544
MLTQYDIEEVQEHCSYLFSQQEIVSLYERFCQLDRSAKGFISEDEFLSIPEFSLNPLSKRLLRMVDGLNFKDFVAFLSTFSAKASLRQKIEFIFKVYDIDGKGKITFKDLLEVLRDLTGSFMSEEQREQVVTEVLEEAGYTRDYAFSLEDFIQIIDHPGLKMEVEVPID

SEQ ID NO: 40097 - DNA, 3056 bp, Zea mays subsp. mays
  misc_feature (1)..(3056): Ceres Seq. ID no. 12377950
gcacgagaccattacctagaacatcctaatccaaaaatccaattttctctctctctcccgcctcctgttcagtttcccactcgccggaaccgccgcctctccaatccccgctaaccctcgctccgttttatcgcccccctctgcttccaaatcgaatcgcgtcctctccattctgccgtctcctctcctactcctcccccctgccgccgcaagatccaccagggctctcgaccgcaatggagccgcagctgacgcccggcgcggtggcggcggtctccgcccacgccgacggcaacggcacgctgcagccggtgctgcaggtggtggacgtgcggatggtcaacaacgccaagaacccctccgccgagcgcttccggatggtgctctccgacggcgaacacaccatgcagtccatgctcgccaccgccgagaacgcgcgcgtccgggacggctccatccagaagggctccatcgtccacctcctggagtgcacctgcagcaccatccagtctcgcaggatcattatcgttatcaaacttgatgttctgcaaagtgagtgtgccataattggaaaccccaggccctatgaaatgagaaaccaacctaatgagcagggcaccaacataccggccaatgctgctcaagctaatactggaacgtattccagtggccctggtttgctgggatcacctgctgcttcaaggccagcacaagttgctaataatgtaccatacagtggatcctatggtggttatcatggtacggtggtccctccgattgcccctgcagtagaatctgttcccaatgtggcatcgggtgtcacttatggtacaacttcagcgcataatacaatgaatgcgggcatgacacagtcaaacttgcagcagcgttcactgaactctcacccgaaccaaaggtttgcagttccttccatggctggtggcagtggtgctcctgggaatacatatggacaacctgcacagtcgttttatcagcaaccgcctccagggcatatgaatagaactcctgtgtctaagaacgatgcatatcgtcttgtcccattggctcaattgaacccttatctagataaatggacaatcaaggtcagggtaactgcaaagactgatctcaggttctacaacaatgctagaggtgctggaaaagtcttttcctttgatctccttgatgaacagcgtggagaaatccgtgcaacatgcttcaatacgcaggctgatcagttttttaacctcattgaggttgataaggtgtacctgatatctaaagggtcgttgaaaccagcacagaagaagtttaactccttgaatcacgagtatgagataagtctggattccagaacatctattgaagtttgtgctgatgatgatagcaacatccctaggcagcagtataatttccggaagataagtgaaattgagaacattgagaaagatgctattttggacttgattggaattgtcacatcagttggcccttctgtcacgtttatccgaaaggatggcgtggaaacccagagaagaacacttgaactgaaagacatgtctggtcgaagtgtacaacttaccttatgggggaagttgtgtgttgctgaaggcaaccagctgcagtcgctgtgcgattctggtttgaatcctgttctagctttgaaaggtgcccgcgttactgactacagtggtagatctgtgtcctcagctggctcaactcagttaaaaatagacccagaaattcctgaggctgagagtctgcggcgctggtacgcaactggaggaaagacagctgcttgtgtttctctgtcagtggtaagtatgggtggtacttgtgtccggaaatcaatcgctcagatcaaggatgaaaatctggggcagttagagaagccagactttatcactgttaaagctgcaatttcacatctgatagcagataatttttgttatcctgcttgcaccattgacgtgaatggtaggatgtgcaacaaaaaggtaacagataatggtgatgggacatggcgttgtgacaaatgcgaccagagcttaccaaattgtgagtacagatacgtgctgaatggccagatccaggaccacagtggggtcaccaattttactgcattcgaagatgctgctaaggtgatgattggccacagtggccacgagctcaacaacattagtgtagaagactcggaacgatttgcagagatcttgcaggcggctcgttggcagcagtttctgttcacgctgaaagtcaaggaggagatctataatgatgcgccgcaagtcaagtgcaacattactaaagcagagaagctggatccggcaatagagagttcttaccttctaggggtaatcaatggcctgttgcaggatgacactggctcaccttctggggcgcaaggtgccatggcctacaatgctggtatcagcaacactggcgctggacgaagtgtgccaacctccaacagtgcctacaccaccaatttgagtggtccaaggtatggcgagtctgcaaaccagctcgcgcagcaggaaagcacgtacaccggggtgaccactccagtgtcggcggcacggaatgtgcagcagacctgcgtgtcctgcgggtcaagtgggcacaacgtgcagaactgccctgcaggaacatacaggcagcaggcggctgcaagcgcagcaagctcctacggtacttcgcagcctcgcaatggactgtgcttcaaatgcaatcagcctggacactttgccaactcttgtccactactggctcctgctccccagcagcagcagcagtatcggagcggcggcgctccctcaggcggttatggtaggcagcagccctatgttggggctaccaactactgaaagtcattatctctgtcgagtcagtcgtgatgttggttttgcttagatgcctgtcctgaatggcatcgctgcgtccatgtgaagtagatgcaaaccattcctttttatgtttgtgtgtgaagttagaactatgtatcagtactttatgttttcgtcttataaatcctcgttgccgtgtcagttctgttg

SEQ ID NO: 40098 - protein, 876 aa, Zea mays subsp. mays
  peptide (1)..(876): Ceres Seq. ID no. 12377951
  misc_feature (286)..(376): Pfam Name: Pfam Description:  OB-fold nucleic acid binding domain
  misc_feature (237)..(826): NCBI GI NO: 7488291 NR Description: replication protein A1 homolog T18B16
  misc_feature (1)..(170): NCBI GI NO: 7488291 NR Description: replication protein A1 homolog T18B16
  misc_feature (183)..(708): NCBI GI NO: 15225129 NR Description: putative replication protein A1
  misc_feature (1)..(131): NCBI GI NO: 15225129 NR Description: putative replication protein A1
  misc_feature (209)..(709): NCBI GI NO: 13536993 NR Description: replication protein A 70kDa
  misc_feature (4)..(214): NCBI GI NO: 13536993 NR Description: replication protein A 70kDa
  misc_feature (112)..(824): NCBI GI NO: 15242405 NR Description: replication protein A1-like; protein id:At5g45400
  misc_feature (370)..(826): NCBI GI NO: 18415246 NR Description: replication A protein-like; protein id: At4g19130
  misc_feature (219)..(708): NCBI GI NO: 19111884 NR Description: replication factor-a protein 1
  misc_feature (1)..(158): NCBI GI NO: 19111884 NR Description: replication factor-a protein 1
MEPQLTPGAVAAVSAHADGNGTLQPVLQVVDVRMVNNAKNPSAERFRMVLSDGEHTMQSMLATAENARVRDGSIQKGSIVHLLECTCSTIQSRRIIIVIKLDVLQSECAIIGNPRPYEMRNQPNEQGTNIPANAAQANTGTYSSGPGLLGSPAASRPAQVANNVPYSGSYGGYHGTVVPPIAPAVESVPNVASGVTYGTTSAHNTMNAGMTQSNLQQRSLNSHPNQRFAVPSMAGGSGAPGNTYGQPAQSFYQQPPPGHMNRTPVSKNDAYRLVPLAQLNPYLDKWTIKVRVTAKTDLRFYNNARGAGKVFSFDLLDEQRGEIRATCFNTQADQFFNLIEVDKVYLISKGSLKPAQKKFNSLNHEYEISLDSRTSIEVCADDDSNIPRQQYNFRKISEIENIEKDAILDLIGIVTSVGPSVTFIRKDGVETQRRTLELKDMSGRSVQLTLWGKLCVAEGNQLQSLCDSGLNPVLALKGARVTDYSGRSVSSAGSTQLKIDPEIPEAESLRRWYATGGKTAACVSLSVVSMGGTCVRKSIAQIKDENLGQLEKPDFITVKAAISHLIADNFCYPACTIDVNGRMCNKKVTDNGDGTWRCDKCDQSLPNCEYRYVLNGQIQDHSGVTNFTAFEDAAKVMIGHSGHELNNISVEDSERFAEILQAARWQQFLFTLKVKEEIYNDAPQVKCNITKAEKLDPAIESSYLLGVINGLLQDDTGSPSGAQGAMAYNAGISNTGAGRSVPTSNSAYTTNLSGPRYGESANQLAQQESTYTGVTTPVSAARNVQQTCVSCGSSGHNVQNCPAGTYRQQAAASAASSYGTSQPRNGLCFKCNQPGHFANSCPLLAPAPQQQQQYRSGGAPSGGYGRQQPYVGATNY

SEQ ID NO: 40099 - protein, 843 aa, Zea mays subsp. mays
  peptide (1)..(843): Ceres Seq. ID no. 12377952
  misc_feature (253)..(343): Pfam Name: Pfam Description:  OB-fold nucleic acid binding domain
  misc_feature (204)..(793): NCBI GI NO: 7488291 NR Description: replication protein A1 homolog T18B16
  misc_feature (1)..(137): NCBI GI NO: 7488291 NR Description: replication protein A1 homolog T18B16
  misc_feature (150)..(675): NCBI GI NO: 15225129 NR Description: putative replication protein A1
  misc_feature (1)..(98): NCBI GI NO: 15225129 NR Description: putative replication protein A1
  misc_feature (176)..(676): NCBI GI NO: 13536993 NR Description: replication protein A 70kDa
  misc_feature (1)..(181): NCBI GI NO: 13536993 NR Description: replication protein A 70kDa
  misc_feature (79)..(791): NCBI GI NO: 15242405 NR Description: replication protein A1-like; protein id:At5g45400
  misc_feature (337)..(793): NCBI GI NO: 18415246 NR Description: replication A protein-like; protein id: At4g19130
  misc_feature (186)..(675): NCBI GI NO: 19111884 NR Description: replication factor-a protein 1
  misc_feature (1)..(125): NCBI GI NO: 19111884 NR Description: replication factor-a protein 1
MVNNAKNPSAERFRMVLSDGEHTMQSMLATAENARVRDGSIQKGSIVHLLECTCSTIQSRRIIIVIKLDVLQSECAIIGNPRPYEMRNQPNEQGTNIPANAAQANTGTYSSGPGLLGSPAASRPAQVANNVPYSGSYGGYHGTVVPPIAPAVESVPNVASGVTYGTTSAHNTMNAGMTQSNLQQRSLNSHPNQRFAVPSMAGGSGAPGNTYGQPAQSFYQQPPPGHMNRTPVSKNDAYRLVPLAQLNPYLDKWTIKVRVTAKTDLRFYNNARGAGKVFSFDLLDEQRGEIRATCFNTQADQFFNLIEVDKVYLISKGSLKPAQKKFNSLNHEYEISLDSRTSIEVCADDDSNIPRQQYNFRKISEIENIEKDAILDLIGIVTSVGPSVTFIRKDGVETQRRTLELKDMSGRSVQLTLWGKLCVAEGNQLQSLCDSGLNPVLALKGARVTDYSGRSVSSAGSTQLKIDPEIPEAESLRRWYATGGKTAACVSLSVVSMGGTCVRKSIAQIKDENLGQLEKPDFITVKAAISHLIADNFCYPACTIDVNGRMCNKKVTDNGDGTWRCDKCDQSLPNCEYRYVLNGQIQDHSGVTNFTAFEDAAKVMIGHSGHELNNISVEDSERFAEILQAARWQQFLFTLKVKEEIYNDAPQVKCNITKAEKLDPAIESSYLLGVINGLLQDDTGSPSGAQGAMAYNAGISNTGAGRSVPTSNSAYTTNLSGPRYGESANQLAQQESTYTGVTTPVSAARNVQQTCVSCGSSGHNVQNCPAGTYRQQAAASAASSYGTSQPRNGLCFKCNQPGHFANSCPLLAPAPQQQQQYRSGGAPSGGYGRQQPYVGATNY

SEQ ID NO: 40100 - protein, 829 aa, Zea mays subsp. mays
  peptide (1)..(829): Ceres Seq. ID no. 12377953
  misc_feature (239)..(329): Pfam Name: Pfam Description:  OB-fold nucleic acid binding domain
  misc_feature (190)..(779): NCBI GI NO: 7488291 NR Description: replication protein A1 homolog T18B16
  misc_feature (1)..(123): NCBI GI NO: 7488291 NR Description: replication protein A1 homolog T18B16
  misc_feature (136)..(661): NCBI GI NO: 15225129 NR Description: putative replication protein A1
  misc_feature (1)..(84): NCBI GI NO: 15225129 NR Description: putative replication protein A1
  misc_feature (162)..(662): NCBI GI NO: 13536993 NR Description: replication protein A 70kDa
  misc_feature (1)..(167): NCBI GI NO: 13536993 NR Description: replication protein A 70kDa
  misc_feature (65)..(777): NCBI GI NO: 15242405 NR Description: replication protein A1-like; protein id:At5g45400
  misc_feature (323)..(779): NCBI GI NO: 18415246 NR Description: replication A protein-like; protein id: At4g19130
  misc_feature (172)..(661): NCBI GI NO: 19111884 NR Description: replication factor-a protein 1
  misc_feature (1)..(111): NCBI GI NO: 19111884 NR Description: replication factor-a protein 1
MVLSDGEHTMQSMLATAENARVRDGSIQKGSIVHLLECTCSTIQSRRIIIVIKLDVLQSECAIIGNPRPYEMRNQPNEQGTNIPANAAQANTGTYSSGPGLLGSPAASRPAQVANNVPYSGSYGGYHGTVVPPIAPAVESVPNVASGVTYGTTSAHNTMNAGMTQSNLQQRSLNSHPNQRFAVPSMAGGSGAPGNTYGQPAQSFYQQPPPGHMNRTPVSKNDAYRLVPLAQLNPYLDKWTIKVRVTAKTDLRFYNNARGAGKVFSFDLLDEQRGEIRATCFNTQADQFFNLIEVDKVYLISKGSLKPAQKKFNSLNHEYEISLDSRTSIEVCADDDSNIPRQQYNFRKISEIENIEKDAILDLIGIVTSVGPSVTFIRKDGVETQRRTLELKDMSGRSVQLTLWGKLCVAEGNQLQSLCDSGLNPVLALKGARVTDYSGRSVSSAGSTQLKIDPEIPEAESLRRWYATGGKTAACVSLSVVSMGGTCVRKSIAQIKDENLGQLEKPDFITVKAAISHLIADNFCYPACTIDVNGRMCNKKVTDNGDGTWRCDKCDQSLPNCEYRYVLNGQIQDHSGVTNFTAFEDAAKVMIGHSGHELNNISVEDSERFAEILQAARWQQFLFTLKVKEEIYNDAPQVKCNITKAEKLDPAIESSYLLGVINGLLQDDTGSPSGAQGAMAYNAGISNTGAGRSVPTSNSAYTTNLSGPRYGESANQLAQQESTYTGVTTPVSAARNVQQTCVSCGSSGHNVQNCPAGTYRQQAAASAASSYGTSQPRNGLCFKCNQPGHFANSCPLLAPAPQQQQQYRSGGAPSGGYGRQQPYVGATNY

SEQ ID NO: 40101 - DNA, 701 bp, Zea mays subsp. mays
  misc_feature (1)..(701): Ceres Seq. ID no. 12358026
ctcttatcatggttagcaatcccgcaattcagttcatgctatatgagactcttctgaagaaattgaagaagagacgagcctctaatttcaagggagctgatggattgactgctcttgaaatttttcttcttggtgctgttgcgaaacttggtgcaaccgtcgttacgtatccccttctagttgttaaggcaagacttcaggcaaagcacatgattaacgatgacaagaggcatcgctacaaaggtacacttgatgcgttcacaaagatggtacgatatgagggtctgtcagggatgtacaaaggaatgggcacaaaaattgtgcaaagtgtttttgcttctgctttgctttttatgattaaggaggagctggtgaagggtgctcgactattggtaactggtaacactagtctggttaagaaactaccatcaaagtcatcaagatgaactacgggcatcgcaagcgttagtatatgttcccaaaaagccatttattatccgcataaacagtaaaacaaggtcgacaagctatagagctcgcctctgctttggagatgtcaactgtaggttacacaatagccagtatgattcacgtagggaccaaagactatgttggatagatatttgtatcattcatgtaaaatgtatgtggaagattgaaacagaagaaaataaataagtatgataatttgaacttcggcc

SEQ ID NO: 40102 - protein, 147 aa, Zea mays subsp. mays
  peptide (1)..(147): Ceres Seq. ID no. 12358027
  misc_feature (1)..(147): NCBI GI NO: 34901996 NR Description: unknown protein
  misc_feature (1)..(137): NCBI GI NO: 21593883 NR Description: putative peroxisomal membrane carrier protein
  misc_feature (1)..(136): NCBI GI NO: 15225602 NR Description: 36kDa-peroxisomal membrane protein
  misc_feature (1)..(124): NCBI GI NO: 28828484 NR Description: hypothetical protein [Dictyostelium discoideum]
  misc_feature (1)..(133): NCBI GI NO: 5453918 NR Description: solute carrier family 25
  misc_feature (1)..(133): NCBI GI NO: 10946712 NR Description: peroxisomal integral membrane protein
  misc_feature (1)..(133): NCBI GI NO: 27662946 NR Description: similar to solute carrier family 25
  misc_feature (1)..(133): NCBI GI NO: 5050969 NR Description: dJ362J20.1 (PEROXISOMAL INTEGRAL MEMBRANE PROTEIN)
  misc_feature (1)..(139): NCBI GI NO: 29789024 NR Description: solute carrier family 25
  misc_feature (1)..(134): NCBI GI NO: 24657533 NR Description: CG32250-PA [Drosophila melanogaster]
LIMVSNPAIQFMLYETLLKKLKKRRASNFKGADGLTALEIFLLGAVAKLGATVVTYPLLVVKARLQAKHMINDDKRHRYKGTLDAFTKMVRYEGLSGMYKGMGTKIVQSVFASALLFMIKEELVKGARLLVTGNTSLVKKLPSKSSR

SEQ ID NO: 40103 - protein, 145 aa, Zea mays subsp. mays
  peptide (1)..(145): Ceres Seq. ID no. 12358028
  misc_feature (1)..(145): NCBI GI NO: 34901996 NR Description: unknown protein
  misc_feature (1)..(135): NCBI GI NO: 21593883 NR Description: putative peroxisomal membrane carrier protein
  misc_feature (1)..(134): NCBI GI NO: 15225602 NR Description: 36kDa-peroxisomal membrane protein
  misc_feature (1)..(122): NCBI GI NO: 28828484 NR Description: hypothetical protein [Dictyostelium discoideum]
  misc_feature (1)..(131): NCBI GI NO: 5453918 NR Description: solute carrier family 25
  misc_feature (1)..(131): NCBI GI NO: 10946712 NR Description: peroxisomal integral membrane protein
  misc_feature (1)..(131): NCBI GI NO: 27662946 NR Description: similar to solute carrier family 25
  misc_feature (1)..(131): NCBI GI NO: 5050969 NR Description: dJ362J20.1 (PEROXISOMAL INTEGRAL MEMBRANE PROTEIN)
  misc_feature (1)..(137): NCBI GI NO: 29789024 NR Description: solute carrier family 25
  misc_feature (1)..(132): NCBI GI NO: 24657533 NR Description: CG32250-PA [Drosophila melanogaster]
MVSNPAIQFMLYETLLKKLKKRRASNFKGADGLTALEIFLLGAVAKLGATVVTYPLLVVKARLQAKHMINDDKRHRYKGTLDAFTKMVRYEGLSGMYKGMGTKIVQSVFASALLFMIKEELVKGARLLVTGNTSLVKKLPSKSSR

SEQ ID NO: 40104 - protein, 136 aa, Zea mays subsp. mays
  peptide (1)..(136): Ceres Seq. ID no. 12358029
  misc_feature (1)..(136): NCBI GI NO: 34901996 NR Description: unknown protein
  misc_feature (1)..(126): NCBI GI NO: 21593883 NR Description: putative peroxisomal membrane carrier protein
  misc_feature (1)..(125): NCBI GI NO: 15225602 NR Description: 36kDa-peroxisomal membrane protein
  misc_feature (1)..(113): NCBI GI NO: 28828484 NR Description: hypothetical protein [Dictyostelium discoideum]
  misc_feature (1)..(122): NCBI GI NO: 5453918 NR Description: solute carrier family 25
  misc_feature (1)..(122): NCBI GI NO: 27662946 NR Description: similar to solute carrier family 25
  misc_feature (1)..(122): NCBI GI NO: 10946712 NR Description: peroxisomal integral membrane protein
  misc_feature (1)..(122): NCBI GI NO: 5050969 NR Description: dJ362J20.1 (PEROXISOMAL INTEGRAL MEMBRANE PROTEIN)
  misc_feature (1)..(128): NCBI GI NO: 29789024 NR Description: solute carrier family 25
  misc_feature (1)..(123): NCBI GI NO: 24657533 NR Description: CG32250-PA [Drosophila melanogaster]
MLYETLLKKLKKRRASNFKGADGLTALEIFLLGAVAKLGATVVTYPLLVVKARLQAKHMINDDKRHRYKGTLDAFTKMVRYEGLSGMYKGMGTKIVQSVFASALLFMIKEELVKGARLLVTGNTSLVKKLPSKSSR

SEQ ID NO: 40105 - DNA, 2200 bp, Zea mays subsp. mays
  misc_feature (1)..(2200): Ceres Seq. ID no. 12362570
gcacgagaccattacctagaacatcctaatcgaaaaaccataccctagttcttccttcccgaaccctcgcgccgccaccgccgccgtctagcattttcctacacccaatctgatctgaccaagccctctgaacaccaccgcccatcctcctcctcctccgccgccgccgcccaagatgggcttcgacgtgggcctcgtcccctacaaccccgacgggtggggtccacctgaagttgccgccgcgccgccttccctcggtggtggctcctcgtctgtccccttcgctcccttctcccgctccgacaagctgggccgcatcgccgactggacgcgcaacccgccgggccccggggctttcgccgcagctcgcgacgccgtcttcgatttcgcggggctcgaggactccatcgggctcgcgtccgcggacgactcgtccttccgcctcgtcgatggcaaaccgccgccgcggcacccgcggtttggacctcgctggcgcttccagcagcggccccaactcccgcagcgccgcgacgaagaggtcgaggctcggcgtcgcgaggccgagaaggagcgcgcccgccgcgaccgccactggcagcagaaccgccgcacgcaccaccagttcaaccgcggcgggccctcctcgtcgtctgccaaaccgtccgttgacatccagcccgagtggtcggtgaaggagcagatccctttctcatccttctccaagctctccttcgccgtcgccgaccagcccgaggatctcctcgtctgtggcgcagtcgagtactacgaccggacctacgatcgcgtcacccccagggccgagcgtcgcctcgagcgcttcaagtcgcggaacttcttcaaggtcaccactaccgacgaccccgtcatccgccgtcttgctgagaatgacacggccacggtcttcgccaatgacaccatcctggccgcactcatgtgtgcgccccgtagcgtccagtcctgggatatcgtaattcagcgtgttggcaacaagttgttcttcgacaagcgtgatggctctcagcttgatcttctcaccgtcaacgaaaccgcccaggaggcactccctgaggccaaggaagacatcaactccgcgcattcgctggcggttgaagccacatacgtcaatcagaacttctcgcagcaggtgctgctccgcaatggtgagaaggtcacgttcgacgagcctaacccgtttgccactgaaggggaggaagctgcttccgttgcttaccgctaccgccgctggaagcttgatgaggagacaagcttggttgctcggtgcgaggttcatgccgtgagcgttgatctacgcggcgagcaccagttccttacactcaacgccctcaacgagttcgatcccaaggtcactggtgttgactggaggaagaagcttgagacccagcggggtgctgtgcttgccactgagctcaagaacaatgccaacaagcttgcacgctggactgcccaggcgctgcttgccggcgcagacatgatgaagttgggttatgtgtcacggctgcacccacgcgaccagtacaaccattccattctcagtgtgatcgggtacaagccaagggatttcgctgcacagatcaatctcaacaccgcaaatatgtgggggatcgtgaagtctattgtggatgtctgcatgaagcttggagaggggaagtatgtgcttgtgaaggacccagtgaaaccacaggtccggctttatgaagtgccaaatgatgcattcgagaatgactacgttgaggaaccactccctgaggaagagcaagtgcgtcccttctccgaggatgttgatgccagcgcgaaggaaatggatgctgccgcagaagcggaggctactggaacaactgcaggcgctgagaagagtggtgatgtcgctgctgtgtgaaggcggtggctacaacctgaagaggtctttttcggaccttgaataaggttaccttggctagctatctactacaatcatgggcatctggatacaggtttgatgtttctaccatcgaaggttatgctattattgttcgctgaatcttgagttgtgttccctttatgtgtccttatggctggacttaaatggaatcctcaaactatattgcactttccaagactcacatgttgtggattgccagttctgtttactgtgatttgagttgtggtgattgcatttgcc

SEQ ID NO: 40106 - protein, 580 aa, Zea mays subsp. mays
  peptide (1)..(580): Ceres Seq. ID no. 12362571
  misc_feature (21)..(540): Pfam Name: eIF-3 Pfam Description: Eukaryotic translation initiation factor 3 subunit 7
  misc_feature (21)..(563): NCBI GI NO: 15233469 NR Description: translation initiation factor eIF3 - like protein
  misc_feature (21)..(563): NCBI GI NO: 17528988 NR Description: putative translation initiation factor eIF3
  misc_feature (3)..(554): NCBI GI NO: 15241470 NR Description: eukaryotic translation initiation factor 3 subunit7
  misc_feature (157)..(563): NCBI GI NO: 12407755 NR Description: initiation factor 3d [Arabidopsis thaliana]
  misc_feature (3)..(548): NCBI GI NO: 31418925 NR Description: Unknown (protein for MGC:64097) [Danio rerio]
  misc_feature (1)..(574): NCBI GI NO: 31207329 NR Description: ENSANGP00000015368 [Anopheles gambiae]
  misc_feature (3)..(541): NCBI GI NO: 4503523 NR Description: eukaryotic translation initiation factor 3 subunit7
  misc_feature (3)..(541): NCBI GI NO: 34866902 NR Description: similar to eukaryotic translation initiation factor3 subunit 7
  misc_feature (3)..(542): NCBI GI NO: 27882463 NR Description: Similar to eukaryotic translation initiation factor3
  misc_feature (3)..(541): NCBI GI NO: 26337171 NR Description: unnamed protein product [Mus musculus]
MGFDVGLVPYNPDGWGPPEVAAAPPSLGGGSSSVPFAPFSRSDKLGRIADWTRNPPGPGAFAAARDAVFDFAGLEDSIGLASADDSSFRLVDGKPPPRHPRFGPRWRFQQRPQLPQRRDEEVEARRREAEKERARRDRHWQQNRRTHHQFNRGGPSSSSAKPSVDIQPEWSVKEQIPFSSFSKLSFAVADQPEDLLVCGAVEYYDRTYDRVTPRAERRLERFKSRNFFKVTTTDDPVIRRLAENDTATVFANDTILAALMCAPRSVQSWDIVIQRVGNKLFFDKRDGSQLDLLTVNETAQEALPEAKEDINSAHSLAVEATYVNQNFSQQVLLRNGEKVTFDEPNPFATEGEEAASVAYRYRRWKLDEETSLVARCEVHAVSVDLRGEHQFLTLNALNEFDPKVTGVDWRKKLETQRGAVLATELKNNANKLARWTAQALLAGADMMKLGYVSRLHPRDQYNHSILSVIGYKPRDFAAQINLNTANMWGIVKSIVDVCMKLGEGKYVLVKDPVKPQVRLYEVPNDAFENDYVEEPLPEEEQVRPFSEDVDASAKEMDAAAEAEATGTTAGAEKSGDVAAV

SEQ ID NO: 40107 - protein, 321 aa, Zea mays subsp. mays
  peptide (1)..(321): Ceres Seq. ID no. 12362572
  misc_feature (1)..(281): Pfam Name: eIF-3 Pfam Description: Eukaryotic translation initiation factor 3 subunit 7
  misc_feature (1)..(304): NCBI GI NO: 15233469 NR Description: translation initiation factor eIF3 - like protein
  misc_feature (1)..(304): NCBI GI NO: 17528988 NR Description: putative translation initiation factor eIF3
  misc_feature (1)..(295): NCBI GI NO: 15241470 NR Description: eukaryotic translation initiation factor 3 subunit7
  misc_feature (1)..(304): NCBI GI NO: 12407755 NR Description: initiation factor 3d [Arabidopsis thaliana]
  misc_feature (1)..(289): NCBI GI NO: 31418925 NR Description: Unknown (protein for MGC:64097) [Danio rerio]
  misc_feature (1)..(315): NCBI GI NO: 31207329 NR Description: ENSANGP00000015368 [Anopheles gambiae]
  misc_feature (1)..(282): NCBI GI NO: 4503523 NR Description: eukaryotic translation initiation factor 3 subunit7
  misc_feature (1)..(282): NCBI GI NO: 34866902 NR Description: similar to eukaryotic translation initiation factor3 subunit 7
  misc_feature (1)..(283): NCBI GI NO: 27882463 NR Description: Similar to eukaryotic translation initiation factor3
  misc_feature (1)..(282): NCBI GI NO: 26337171 NR Description: unnamed protein product [Mus musculus]
MCAPRSVQSWDIVIQRVGNKLFFDKRDGSQLDLLTVNETAQEALPEAKEDINSAHSLAVEATYVNQNFSQQVLLRNGEKVTFDEPNPFATEGEEAASVAYRYRRWKLDEETSLVARCEVHAVSVDLRGEHQFLTLNALNEFDPKVTGVDWRKKLETQRGAVLATELKNNANKLARWTAQALLAGADMMKLGYVSRLHPRDQYNHSILSVIGYKPRDFAAQINLNTANMWGIVKSIVDVCMKLGEGKYVLVKDPVKPQVRLYEVPNDAFENDYVEEPLPEEEQVRPFSEDVDASAKEMDAAAEAEATGTTAGAEKSGDVAAV

SEQ ID NO: 40108 - DNA, 2143 bp, Zea mays subsp. mays
  misc_feature (1)..(2143): Ceres Seq. ID no. 12424075
acaaattaagacgggcgtcgttggcttcaaatactggtctctcccctgtccaaaagtctctcgaatctccaccctggttccgcaccggttccagaattttctcccatttccagggtctccccgtttctgtccggcggttctgccgttccactgcttttgatttcggagtgtgagcttacatcttgctggacaataaagattggattttaagcgatttggggggtgcttgcctgatctccccctgcgaggtactgccgggggattggatttcggggaagttttggtggtttgatattcggcttggccggagcaggaatgacgatcgacatgtccattcccaggagctccgggctgctgaacgctgcggggaagagggacatgaagttcttcagcaacccctacgtgcttgcgctcacgggcgctgcaggaatcggtggattcctctttggctacgatacaggtgtcatatctggagcccttctgtatatccgcgatgattttccagcggtcaaggacaattacttcttacaggaaacgattgttagcatggccttagtcggagctatgattggagctgctgggggtggttggatcaatgatgcatacggtcgcaagaagtctactcttcttgctgatttgatgtttgctcttggctcacttgtcatgtgtgctgctgctggtccttacattctaattatcggaaggctcctcgttggtttgggtgtgggtgttgcatcagtcacagcaccggtatacattgctgaagctgctccttcagaaatcaggggaggtttggtgtcaactaatgtactcatgattaccggtggccaattcttctcctatcttatcaatcttggctttactgaggtgcctggaacatggcgctggatgcttggtgttgctgctgttcctgccattatacagtttgtgctgatgctattcctgccagaatctccgcgttggctttactggaaggatgagaaggcaaaagctattgccgtccttgagaggatctatgaatcggaccgcttggaggaagaggtagagctgcttgctacatcctccatgcatgaattccagtccaacaataccggaagctatctggatgtcttcaagtcgaaagaattgaggctagctttctttgctggggctggccttcaggccttccagcaatttactgggatcaacaccgtgatgtattacagccccacgatagtccagatggctggtttctcctccaacaggctggccttgctcctctccctgatcgtggcggccatgaacgccgccggaaccatcgtcgggatctacctaatcgaccgttgcggccgccgccgcctggccctcacaagcttggccggggtcgtggtctccctggccatcctcgccacggccttcatactgcagtcatcatccggcctctgcgcgagcgccgccagcggcacgtgccagggcgcgctaggctggttcgcggtggccggcctcgctctgtacatcgccttcttctccccgggcatggggcccgtgccgtgggccgtgaactcggagatctaccccgaggcgtaccgtgggatgtgcggcggcatgtcggccaccgtgaactgggtctctaacctcgtcgtggcacagacgttcctgtcgatcgtggggctggtcgggaccggcccgacgttcctgatcgtcgccgggatcgcggtgctggccttcgtcttcgtggccacgtacgtgccggagacgaagggcctgacttttgagcaggtggagcagatgtggagggagagagcgtgggggaacagcggcggcaactgcgagagccttttggcgggtactgcttctgcgccgtaggctacccgttgtcagcactggtcaagcgcgtcagttttagtatggccgcgctgggcttgatcggctccgtcctggcattagttggaagaaagtaaaaaacaaattggagatgcagatgcaaactgttgtatgtggtggtgctttatattgctatcctgttgcctgattgtacgtgttgtcatcgtggcaaatgtgcagtgggtgtaaaatatgaggtcataccgtaacgtcaaactaaggcaaaagggcagttgtatgacccagatgggtgattataattatttgtacagtttccggc

SEQ ID NO: 40109 - protein, 509 aa, Zea mays subsp. mays
  peptide (1)..(509): Ceres Seq. ID no. 12424076
  misc_feature (33)..(486): Pfam Name: and other Pfam Description: Sugar
  misc_feature (1)..(506): NCBI GI NO: 38347452 NR Description: OSJNBa0076N16.21
  misc_feature (1)..(496): NCBI GI NO: 30689342 NR Description: sugar transporter family [Arabidopsis thaliana]
  misc_feature (1)..(496): NCBI GI NO: 25308955 NR Description: probable membrane transporter
  misc_feature (1)..(502): NCBI GI NO: 29501739 NR Description: putative Na+/myo-inositol symporter
  misc_feature (25)..(361): NCBI GI NO: 15220697 NR Description: hypothetical protein; protein id: At1g30220
  misc_feature (378)..(490): NCBI GI NO: 15220697 NR Description: hypothetical protein; protein id: At1g30220
  misc_feature (27)..(361): NCBI GI NO: 33146705 NR Description: putative proton myo-inositol transporter
  misc_feature (378)..(489): NCBI GI NO: 33146705 NR Description: putative proton myo-inositol transporter
  misc_feature (25)..(362): NCBI GI NO: 32488451 NR Description: OSJNBa0004N05.8
  misc_feature (378)..(489): NCBI GI NO: 32488451 NR Description: OSJNBa0004N05.8
MTIDMSIPRSSGLLNAAGKRDMKFFSNPYVLALTGAAGIGGFLFGYDTGVISGALLYIRDDFPAVKDNYFLQETIVSMALVGAMIGAAGGGWINDAYGRKKSTLLADLMFALGSLVMCAAAGPYILIIGRLLVGLGVGVASVTAPVYIAEAAPSEIRGGLVSTNVLMITGGQFFSYLINLGFTEVPGTWRWMLGVAAVPAIIQFVLMLFLPESPRWLYWKDEKAKAIAVLERIYESDRLEEEVELLATSSMHEFQSNNTGSYLDVFKSKELRLAFFAGAGLQAFQQFTGINTVMYYSPTIVQMAGFSSNRLALLLSLIVAAMNAAGTIVGIYLIDRCGRRRLALTSLAGVVVSLAILATAFILQSSSGLCASAASGTCQGALGWFAVAGLALYIAFFSPGMGPVPWAVNSEIYPEAYRGMCGGMSATVNWVSNLVVAQTFLSIVGLVGTGPTFLIVAGIAVLAFVFVATYVPETKGLTFEQVEQMWRERAWGNSGGNCESLLAGTASAP

SEQ ID NO: 40110 - protein, 505 aa, Zea mays subsp. mays
  peptide (1)..(505): Ceres Seq. ID no. 12424077
  misc_feature (29)..(482): Pfam Name: and other Pfam Description: Sugar
  misc_feature (1)..(502): NCBI GI NO: 38347452 NR Description: OSJNBa0076N16.21
  misc_feature (1)..(492): NCBI GI NO: 30689342 NR Description: sugar transporter family [Arabidopsis thaliana]
  misc_feature (1)..(492): NCBI GI NO: 25308955 NR Description: probable membrane transporter
  misc_feature (1)..(498): NCBI GI NO: 29501739 NR Description: putative Na+/myo-inositol symporter
  misc_feature (21)..(357): NCBI GI NO: 15220697 NR Description: hypothetical protein; protein id: At1g30220
  misc_feature (374)..(486): NCBI GI NO: 15220697 NR Description: hypothetical protein; protein id: At1g30220
  misc_feature (23)..(357): NCBI GI NO: 33146705 NR Description: putative proton myo-inositol transporter
  misc_feature (374)..(485): NCBI GI NO: 33146705 NR Description: putative proton myo-inositol transporter
  misc_feature (21)..(358): NCBI GI NO: 32488451 NR Description: OSJNBa0004N05.8
  misc_feature (374)..(485): NCBI GI NO: 32488451 NR Description: OSJNBa0004N05.8
MSIPRSSGLLNAAGKRDMKFFSNPYVLALTGAAGIGGFLFGYDTGVISGALLYIRDDFPAVKDNYFLQETIVSMALVGAMIGAAGGGWINDAYGRKKSTLLADLMFALGSLVMCAAAGPYILIIGRLLVGLGVGVASVTAPVYIAEAAPSEIRGGLVSTNVLMITGGQFFSYLINLGFTEVPGTWRWMLGVAAVPAIIQFVLMLFLPESPRWLYWKDEKAKAIAVLERIYESDRLEEEVELLATSSMHEFQSNNTGSYLDVFKSKELRLAFFAGAGLQAFQQFTGINTVMYYSPTIVQMAGFSSNRLALLLSLIVAAMNAAGTIVGIYLIDRCGRRRLALTSLAGVVVSLAILATAFILQSSSGLCASAASGTCQGALGWFAVAGLALYIAFFSPGMGPVPWAVNSEIYPEAYRGMCGGMSATVNWVSNLVVAQTFLSIVGLVGTGPTFLIVAGIAVLAFVFVATYVPETKGLTFEQVEQMWRERAWGNSGGNCESLLAGTASAP

SEQ ID NO: 40111 - protein, 488 aa, Zea mays subsp. mays
  peptide (1)..(488): Ceres Seq. ID no. 12424078
  misc_feature (12)..(465): Pfam Name: and other Pfam Description: Sugar
  misc_feature (1)..(485): NCBI GI NO: 38347452 NR Description: OSJNBa0076N16.21
  misc_feature (1)..(475): NCBI GI NO: 30689342 NR Description: sugar transporter family [Arabidopsis thaliana]
  misc_feature (1)..(475): NCBI GI NO: 25308955 NR Description: probable membrane transporter
  misc_feature (1)..(481): NCBI GI NO: 29501739 NR Description: putative Na+/myo-inositol symporter
  misc_feature (4)..(340): NCBI GI NO: 15220697 NR Description: hypothetical protein; protein id: At1g30220
  misc_feature (357)..(469): NCBI GI NO: 15220697 NR Description: hypothetical protein; protein id: At1g30220
  misc_feature (6)..(340): NCBI GI NO: 33146705 NR Description: putative proton myo-inositol transporter
  misc_feature (357)..(468): NCBI GI NO: 33146705 NR Description: putative proton myo-inositol transporter
  misc_feature (4)..(341): NCBI GI NO: 32488451 NR Description: OSJNBa0004N05.8
  misc_feature (357)..(468): NCBI GI NO: 32488451 NR Description: OSJNBa0004N05.8
MKFFSNPYVLALTGAAGIGGFLFGYDTGVISGALLYIRDDFPAVKDNYFLQETIVSMALVGAMIGAAGGGWINDAYGRKKSTLLADLMFALGSLVMCAAAGPYILIIGRLLVGLGVGVASVTAPVYIAEAAPSEIRGGLVSTNVLMITGGQFFSYLINLGFTEVPGTWRWMLGVAAVPAIIQFVLMLFLPESPRWLYWKDEKAKAIAVLERIYESDRLEEEVELLATSSMHEFQSNNTGSYLDVFKSKELRLAFFAGAGLQAFQQFTGINTVMYYSPTIVQMAGFSSNRLALLLSLIVAAMNAAGTIVGIYLIDRCGRRRLALTSLAGVVVSLAILATAFILQSSSGLCASAASGTCQGALGWFAVAGLALYIAFFSPGMGPVPWAVNSEIYPEAYRGMCGGMSATVNWVSNLVVAQTFLSIVGLVGTGPTFLIVAGIAVLAFVFVATYVPETKGLTFEQVEQMWRERAWGNSGGNCESLLAGTASAP

SEQ ID NO: 40112 - DNA, 1058 bp, Zea mays subsp. mays
  misc_feature (1)..(1058): Ceres Seq. ID no. 12417219
  misc_feature (527)..(527): n is a, c, t, g, unknown, or other
ttgttgtcgtaattgctggcttgaacctgacagaagagcgtgaggacttcgacagagtgagccttctccttccaggcaagcagatgggcctcatacatgccattgctagtgtagcgaagaagccccttgtgttggttctcctgggtggtggtcctgttgatgtttcgtttgcaaagcaagatccacgaatcgcaagcattctttggctcggatatcctggcgaggttggtggacaagtccttccagaaattcttttcggagagtacaacccaggaggaaagctgcctataacttggtatcctgaatcctttactgctattcccatgactgatatgaacatgagagctgatccttcacgaggctaccctgggagaacatatcgattttacactggagatgtagtgtatggctttggatatggtttaagtttactccaaatatttcatatagcatctcctcggctccgaagaagatcaccgtgtcgcgttcatccgatttgggcattatcagcagaaagcctgcatacncaaggagggatggactaggctctgtgaaaactgaagatatcgcttcatgtgaagctctggttttctctgttcacgtcgctgtttcgaatcatggtagcatggatgggagtcatgctgttcttctgttcgcgagatcgaaatcaagcgtcccgggctttcctataaaacagctggttggctttgagagtgtccacacggcggctggcagtgcatccaatgtggagattactgttgacccctgcaagcaaatgagcgcagccaatcctgaaggcaaaagggtacttctgttgggtgcccatgttctaacggtgggtgatgaagagttcgaattatccattgaactctgacagggatgtgccaagtcctaccattttatggagttcaaagttgggaataatctgatgaaacttgtaaagaaacacgttgtaaagattcattattgagctggatgcgtgtacggtaaacatgctgtgacctgtgaagattcatcatttgagttgggtgctagtacaattgcagccattttgcggt

SEQ ID NO: 40113 - protein, 180 aa, Zea mays subsp. mays
  peptide (1)..(180): Ceres Seq. ID no. 12417220
  misc_feature (1)..(142): Pfam Name: Pfam Description:  Glycosyl hydrolase family 3 C terminal domain
  misc_feature (1)..(142): NCBI GI NO: 38346629 NR Description: OSJNBa0074L08.23
  misc_feature (1)..(155): NCBI GI NO: 26449574 NR Description: putative beta-xylosidase [Arabidopsis thaliana]
  misc_feature (1)..(155): NCBI GI NO: 15238197 NR Description: glycosyl hydrolase family 3; protein id:At5g10560
  misc_feature (1)..(148): NCBI GI NO: 40363751 NR Description: putative beta-xylosidase [Triticum aestivum]
  misc_feature (1)..(148): NCBI GI NO: 18025342 NR Description: beta-D-xylosidase [Hordeum vulgare]
  misc_feature (2)..(152): NCBI GI NO: 38344900 NR Description: OSJNBb0079B02.3
  misc_feature (1)..(142): NCBI GI NO: 6573772 NR Description: F28K19.27 [Arabidopsis thaliana]
  misc_feature (2)..(148): NCBI GI NO: 30316196 NR Description: Putative beta-D-xylosidase (PpAz152)
  misc_feature (1)..(142): NCBI GI NO: 15218202 NR Description: glycosyl hydrolase family 3; protein id:At1g78060
  misc_feature (2)..(142): NCBI GI NO: 32481073 NR Description: auxin-induced beta-glucosidase
  misc_feature (175)..(175): Xaa is any aa, unknown or other
VVVIAGLNLTEEREDFDRVSLLLPGKQMGLIHAIASVAKKPLVLVLLGGGPVDVSFAKQDPRIASILWLGYPGEVGGQVLPEILFGEYNPGGKLPITWYPESFTAIPMTDMNMRADPSRGYPGRTYRFYTGDVVYGFGYGLSLLQIFHIASPRLRRRSPCRVHPIWALSAESLHXQGGMD

SEQ ID NO: 40114 - protein, 153 aa, Zea mays subsp. mays
  peptide (1)..(153): Ceres Seq. ID no. 12417221
  misc_feature (1)..(115): Pfam Name: Pfam Description:  Glycosyl hydrolase family 3 C terminal domain
  misc_feature (1)..(115): NCBI GI NO: 38346629 NR Description: OSJNBa0074L08.23
  misc_feature (1)..(128): NCBI GI NO: 26449574 NR Description: putative beta-xylosidase [Arabidopsis thaliana]
  misc_feature (1)..(128): NCBI GI NO: 15238197 NR Description: glycosyl hydrolase family 3; protein id:At5g10560
  misc_feature (1)..(121): NCBI GI NO: 40363751 NR Description: putative beta-xylosidase [Triticum aestivum]
  misc_feature (1)..(121): NCBI GI NO: 18025342 NR Description: beta-D-xylosidase [Hordeum vulgare]
  misc_feature (1)..(125): NCBI GI NO: 38344900 NR Description: OSJNBb0079B02.3
  misc_feature (1)..(115): NCBI GI NO: 6573772 NR Description: F28K19.27 [Arabidopsis thaliana]
  misc_feature (1)..(121): NCBI GI NO: 30316196 NR Description: Putative beta-D-xylosidase (PpAz152)
  misc_feature (1)..(115): NCBI GI NO: 15218202 NR Description: glycosyl hydrolase family 3; protein id:At1g78060
  misc_feature (1)..(115): NCBI GI NO: 32481073 NR Description: auxin-induced beta-glucosidase
  misc_feature (148)..(148): Xaa is any aa, unknown or other
MGLIHAIASVAKKPLVLVLLGGGPVDVSFAKQDPRIASILWLGYPGEVGGQVLPEILFGEYNPGGKLPITWYPESFTAIPMTDMNMRADPSRGYPGRTYRFYTGDVVYGFGYGLSLLQIFHIASPRLRRRSPCRVHPIWALSAESLHXQGGMD

SEQ ID NO: 40115 - DNA, 1833 bp, Zea mays subsp. mays
  misc_feature (1)..(1833): Ceres Seq. ID no. 12366371
acagcaaaggcggcactgctcaaaccacctctttggccacacacacgcatactgccaccgctactgcttcatcagcagctagcagcaagcggccggtggtgcagcgctgcgcctgcgccgggtaatcgaacacatggctcagatgatctcaaccatgcccatgctagacgccgccccggcctcgtcagccattatgcccaagctgccgcccgccgcctgcctggacgcgccgccggcctcgggcatcaccgtcgtgtcgaggcagcacgttcgcccggacgccgcgtcggcggtcggcgacctcacgctgtccgtctccgacctgcccatgctgtcgtgccactacatccagaaggggctcttcttcccggcacccgacctgcccatgtcctcggtcgtgtcgctgctcctgtcctcgctgtcgcgggcgctcgccgtccgtcccggccctcgccggccgcttcgtcacgctgcccgacgaccgcatcgtcatccgctgcaacgacgcgggcgtggacttcctccacgccgtcgcacccggcctgtcgcttgacgactttctcgtccctgacgccgacgtgccgaccaagcacacaaaggacctgttccccatggaccggaccgtgagctacgatgggcaccgtcgcccgctcacgtcgttccaggtcaccgcactcggagacggcaccgtctttatcggcatcgtcgccaaccacgccgtcgtggacggcacctccttttggcaattcttcaatacctgggcggccatctgccgcggcgagtcccccaaactgccggacttccgccgaaacttcttcggcgagtccactgccgtcctccgcttccccggcggcgtcggcccgtccgtgaccttcgacgtggacgcgcctctccgtgagcgcgtctttcacttcagcgctgacgcaattcgcgagctgaaagcgattgccaaccgccgtccgagcggtggccaagacgccgaggtgtacggcaagatggcgcaggaccccaagaatccccaagtgcgcggggagatctcgtcgttccagtcactgtgcgcgcagatatggctctcggtcacgcgtgcccggaaacgcctggcgcccgacgcgacgacgacgttccgaatggcggtgaactgccggcaccggctgcagccggccatctcccctgtctactttggcaacgccatccagagcgctgcgacgatggcgacagtctccgagctggctcgcagcgatctaaggtgggcggcaggcaagctgaacgcgacccttgcggcctatggcgacggcacgatccggctcgcggcggccgcgtggcaggccgcaccccggtgcttcccgctgggcaaccccgacggctcggtgatcacgatggggagctccaaccggttcccgatgtacgtgggcaacgatttcggctggggccggcccctcgctgtgcggagcgggcgcgccaacaagttcgacggcaagatgtcggcgttcccgggacgcgccggggacggcagcgtggacatcgaggtgtgcctgcctccggagaccatggcggcgctgctccacgacgccgagttcatgcactacgtgtcgtgcccgtcgcatctgttgtgatgtactgcagccgtgcgggcgggcgggcgcgagtgggggccatcggccgtgacatgccatcaggcacctgttggattgctcggtcgtccactcgtccttgcctttcgggattcaggaatactagctagttggtgtcaagacattgtatctgtctcgctttttcggagtgctgcgtgtaatcgtgtgttagcagctactagtagtagtacttggaaattgg

SEQ ID NO: 40116 - protein, 333 aa, Zea mays subsp. mays
  peptide (1)..(333): Ceres Seq. ID no. 12366372
  misc_feature (1)..(323): Pfam Name: Pfam Description:  Transferase family
  misc_feature (1)..(327): NCBI GI NO: 34908396 NR Description: P0529E05.24
  misc_feature (1)..(148): NCBI GI NO: 15225603 NR Description: putative anthocyanin 5-aromatic acyltransferase
  misc_feature (125)..(327): NCBI GI NO: 15225603 NR Description: putative anthocyanin 5-aromatic acyltransferase
  misc_feature (1)..(327): NCBI GI NO: 15240918 NR Description: anthranilate N-benzoyltransferase - like protein
  misc_feature (1)..(327): NCBI GI NO: 21666314 NR Description: AER [Nicotiana tabacum]
  misc_feature (1)..(321): NCBI GI NO: 24413968 NR Description: N-hydroxycinnamoyl/benzoyltransferase-like protein~contains EST AU096989
  misc_feature (1)..(333): NCBI GI NO: 34899602 NR Description: N-hydroxycinnamoyl benzoyltransferase-like protein
  misc_feature (143)..(329): NCBI GI NO: 38346680 NR Description: OSJNBa0069D17.11
  misc_feature (1)..(105): NCBI GI NO: 38346680 NR Description: OSJNBa0069D17.11
  misc_feature (1)..(332): NCBI GI NO: 21636163 NR Description: HCBT-like putative defense response protein
MDRTVSYDGHRRPLTSFQVTALGDGTVFIGIVANHAVVDGTSFWQFFNTWAAICRGESPKLPDFRRNFFGESTAVLRFPGGVGPSVTFDVDAPLRERVFHFSADAIRELKAIANRRPSGGQDAEVYGKMAQDPKNPQVRGEISSFQSLCAQIWLSVTRARKRLAPDATTTFRMAVNCRHRLQPAISPVYFGNAIQSAATMATVSELARSDLRWAAGKLNATLAAYGDGTIRLAAAAWQAAPRCFPLGNPDGSVITMGSSNRFPMYVGNDFGWGRPLAVRSGRANKFDGKMSAFPGRAGDGSVDIEVCLPPETMAALLHDAEFMHYVSCPSHLL

SEQ ID NO: 40117 - protein, 224 aa, Zea mays subsp. mays
  peptide (1)..(224): Ceres Seq. ID no. 12366373
MALGHACPETPGARRDDDVPNGGELPAPAAAGHLPCLLWQRHPERCDDGDSLRAGSQRSKVGGRQAERDPCGLWRRHDPARGGRVAGRTPVLPAGQPRRLGDHDGELQPVPDVRGQRFRLGPAPRCAERARQQVRRQDVGVPGTRRGRQRGHRGVPASGDHGGAAPRRRVHALRVVPVASVVMYCSRAGGRARVGAIGRDMPSGTCWIARSSTRPCLSGFRNTS

SEQ ID NO: 40118 - protein, 208 aa, Zea mays subsp. mays
  peptide (1)..(208): Ceres Seq. ID no. 12366374
  misc_feature (148)..(208): Pfam Name: Pfam Description:  Equine herpesvirus glycoprotein gp2
  misc_feature (103)..(208): NCBI GI NO: 11360494 NR Description: antifreeze glycopeptide AFGP polyprotein precursor
  misc_feature (135)..(208): NCBI GI NO: 13592175 NR Description: ppg3 [Leishmania major]
  misc_feature (135)..(208): NCBI GI NO: 13592175 NR Description: ppg3 [Leishmania major]
  misc_feature (135)..(208): NCBI GI NO: 13592175 NR Description: ppg3 [Leishmania major]
  misc_feature (149)..(208): NCBI GI NO: 28574039 NR Description: Salivary gland secretion 1 CG3047-PA
  misc_feature (149)..(208): NCBI GI NO: 13592175 NR Description: ppg3 [Leishmania major]
  misc_feature (149)..(208): NCBI GI NO: 28574039 NR Description: Salivary gland secretion 1 CG3047-PA
  misc_feature (148)..(208): NCBI GI NO: 11360494 NR Description: antifreeze glycopeptide AFGP polyprotein precursor
  misc_feature (107)..(208): NCBI GI NO: 11360494 NR Description: antifreeze glycopeptide AFGP polyprotein precursor
  misc_feature (100)..(208): NCBI GI NO: 11360494 NR Description: antifreeze glycopeptide AFGP polyprotein precursor
TAKAALLKPPLWPHTRILPPLLLHQQLAASGRWCSAAPAPGNRTHGSDDLNHAHARRRPGLVSHYAQAAARRLPGRAAGLGHHRRVEAARSPGRRVGGRRPHAVRLRPAHAVVPLHPEGALLPGTRPAHVLGRVAAPVLAVAGARRPSRPSPAASSRCPTTASSSAATTRAWTSSTPSHPACRLTTFSSLTPTCRPSTQRTCSPWTGP

SEQ ID NO: 40119 - DNA, 1556 bp, Zea mays subsp. mays
  misc_feature (1)..(1556): Ceres Seq. ID no. 12417369
acgcagctcacgtacacgcgatgagcacaccgcgtcgcggcgggcagcaccacggcgacaagcgcaccgtgacacgagcagcctcccgaaacagcgacggacacggcgcaggcgacttgagcttcgggtccacggcggggcctcggttcgccgtcgccccgccgcgcccttgggcgccgccgcctgagcacgcggccgtcttcgcgcagccaccagacgatccgtcgacgttgaccatgctgtggggaccgcccggcgaggtgcccgttgccggcttcgctgcggcaccggaagggcgaccggatgcgttcgctggcagcgcgtcgtgcctgccgctcgcgaggcaggtcggcggccagcagggggcgcgcaacggcgcaacttcgtggtgtcgccgctgtcgttccacgcggcgctcgcgctggtggccgcgggcgcgcggggcgagacgcagcgggagctcctgcgcttcttggactccgagtcgctggtcgagctgcaccgcgccgcggcgacggcgctggtcgccaggctcagcgacctcccgcaggcgtccttcgcctgcggcgtctgggtggaccggagccgcgcgctcacgccggagttcatagaaaccgccgcgtcgcgctacgcggcggtcgcggagtccgtcgacttcttgaagaactccgaaggcggcaagggcagcaagtcaacgacttcgtgaaaggagcaacgaaagggctcatcgacgacgtcctgcctcccggctccgtcgactcgtccacggcgctcgtcctcgccaacgccatctacttcaagggggcgtgggctcggccgttcgatccgtcgagaaccatcttcgcgccgttccatctccccgacggcggcaccgtgcgcgtgccgttcatgactacgactacgagcggtttcgaggaccagcgggttgccgtgttccccggattcaaggcgctcaagctgccctacaagaacgacggcggcgcgcagcaggacgcgttctacatgcttctactcctccccgacggtgagaccctaaccctcaatgatctctatgataaggtcgtgtcgtcgccgggattcatcaggaagcacacgccggtggacgaggtcccggtcgggcggttcatggtgccgaagttcaagttcacgttcgagtttgaggcgtctcacgatatccagaagctgggagtcaaccgagcctttcaaagcggtgacttctccggcatggtctccggtggaaacgggctcatcatctcaggagtgtaccacaaggcaaccgtagaggtggacgaggccggcaccgtggccgccgcggccacggtcgagttcatgtcgtttgtatgtgcaagaatcgatccgcctgtggatttcgtggcggaccggccgttcttgttcgccatcgtggagagaagtggcgtcgtgctgtttcttgggcatgtggtgaaccctctggttgagtgatgacacaggagtggcagctatattttagtcgttatggctttacggaaatgacgttgttatttaacaataaataaataccgtccattatgtggttc

SEQ ID NO: 40120 - protein, 385 aa, Zea mays subsp. mays
  peptide (1)..(385): Ceres Seq. ID no. 12417370
  misc_feature (128)..(382): Pfam Name: serine protease inhibitor Pfam Description: Serpin
  misc_feature (128)..(385): NCBI GI NO: 34903126 NR Description: unnamed protein product
  misc_feature (129)..(384): NCBI GI NO: 5734504 NR Description: serpin [Triticum aestivum]
  misc_feature (129)..(384): NCBI GI NO: 7438218 NR Description: serpin - barley
  misc_feature (129)..(385): NCBI GI NO: 9937311 NR Description: phloem serpin-1 [Cucurbita maxima]
  misc_feature (129)..(384): NCBI GI NO: 7438222 NR Description: serpin homolog WZS3 - wheat
  misc_feature (129)..(384): NCBI GI NO: 2130110 NR Description: serpin - wheat
  misc_feature (129)..(384): NCBI GI NO: 1310677 NR Description: protein z-type serpin
  misc_feature (129)..(383): NCBI GI NO: 5734506 NR Description: serpin [Triticum aestivum]
  misc_feature (129)..(384): NCBI GI NO: 7438221 NR Description: serpin WZS2 - wheat
  misc_feature (129)..(383): NCBI GI NO: 15220298 NR Description: serpin, putative; protein id: At1g47710.1
MRSLAARRACRSRGRSAASRGRATAQLRGVAAVVPRGARAGGRGRAGRDAAGAPALLGLRVAGRAAPRRGDGAGRQAQRPPAGVLRLRRLGGPEPRAHAGVHRNRRVALRGGRGVRRLLEELRRRQGQQVNDFVKGATKGLIDDVLPPGSVDSSTALVLANAIYFKGAWARPFDPSRTIFAPFHLPDGGTVRVPFMTTTTSGFEDQRVAVFPGFKALKLPYKNDGGAQQDAFYMLLLLPDGETLTLNDLYDKVVSSPGFIRKHTPVDEVPVGRFMVPKFKFTFEFEASHDIQKLGVNRAFQSGDFSGMVSGGNGLIISGVYHKATVEVDEAGTVAAAATVEFMSFVCARIDPPVDFVADRPFLFAIVERSGVVLFLGHVVNPLVE

SEQ ID NO: 40121 - protein, 202 aa, Zea mays subsp. mays
  peptide (1)..(202): Ceres Seq. ID no. 12417371
AAHVHAMSTPRRGGQHHGDKRTVTRAASRNSDGHGAGDLSFGSTAGPRFAVAPPRPWAPPPEHAAVFAQPPDDPSTLTMLWGPPGEVPVAGFAAAPEGRPDAFAGSASCLPLARQVGGQQGARNGATSWCRRCRSTRRSRWWPRARGARRSGSSCASWTPSRWSSCTAPRRRRWSPGSATSRRRPSPAASGWTGAARSRRSS

SEQ ID NO: 40122 - protein, 196 aa, Zea mays subsp. mays
  peptide (1)..(196): Ceres Seq. ID no. 12417372
MSTPRRGGQHHGDKRTVTRAASRNSDGHGAGDLSFGSTAGPRFAVAPPRPWAPPPEHAAVFAQPPDDPSTLTMLWGPPGEVPVAGFAAAPEGRPDAFAGSASCLPLARQVGGQQGARNGATSWCRRCRSTRRSRWWPRARGARRSGSSCASWTPSRWSSCTAPRRRRWSPGSATSRRRPSPAASGWTGAARSRRSS

SEQ ID NO: 40123 - DNA, 2453 bp, Zea mays subsp. mays
  misc_feature (1)..(2453): Ceres Seq. ID no. 12361174
gcacgagaccattacctagaacatcctaatcaaaaagtaaattcttataatagcttacagggaaaagactcttcaatctgaagcaaaatgtaccgggaatgttgaagagcgggactcttaagcagtagtgagatgcggcggtggtggtcgccggcgttggcggctgtggagccgcggtccgtgcagctcctgctcctgggcgtcgctctcgtcgcagcttctttctacgccggcaccctcttcggctcctccgcgtcccctgcgctcgtactgcccccttcgcgcccccgatcgcccgattccttcagggccaaagttacagatgttccagtgtttaccaacagagtttctcgtacgtaccgggcaaaatcagtgacagttccagatcacggagttgatgtgtgtcctttggaatacaatgagtatgtcccctgccatgatggagcctatataagcagcttgaagagcctggatacatctaggcatgaggatcttgaaagtatttgtcctccatgggagaagcggttgttttgtttggtgccccctccaaatgactacaagataccaataagatggccaacaagccgagactacgtatggcgtagtaatgtcaaccattcacatcttgctgaggtcaaaggaggacagaactgggtgcatgagaagggcaaactttggtggtttcctggaggtggcactcacttcaaacatggtgcatcagaatacatagagaggctaggaaatatgacgacaaatagtactggtgatcttcgttctgccggagtagttcaagttttggatgttggatgtggtgttgctagcttttctgcatatcttcttccgctagacattcgaaccatgtcatttgctccaaaagatggccatgagaatcaaatccagtttgctttagaacgtgggattggtgcaatgatctctgtgttggccacaaaacaattaccttatcctgaaaattcatttgaaatggttcactgttcaagatgtcgtgttgattggcatgaaaatgatggaatattactcaaagaggtagaccgtcttttgcgacctaatgggtattttgtatactctgctccaccagcttatagaaaagataaggactttcctgttatttgggagaagctagttaatattacaacaacaatgtgttggaagcttattgctaagcatgttcaaacagctatttgggttaaacctgaagatgagtcctgcagacagaaaaatgttgatatgaatctactgagtatttgtgaatccaatgacaacatttcaccatcatggaaaattccgttaatgaattgtgtgaagctcaacaaggacaaatccaatattcagaaattgccttccagatctgatcgcctatcattttattccaagagtttggagataataggagttgcaccagagaggtttgagaagaataaccagttctggaagaaccaggttcacaagtattggtcatttcttcatgttgaaaagactagcattcgaaacgtcatggacatgaatgctaattatggtggatttgctgcagcactaagcagtgaccctgtctggattatgaatatagtaccctataccatgatgaacacattgcctgttatctatgaccgtgggttactcggttcttaccatgactggtgtgagccattctcaacatatcctagatcctatgacttgttgcatgctttccacctcttttctcattataaacgccgcaaggaagattgtttgttggaggatatcatgttagaaatggatcgcatcattcgaccacagggttttatcattattagagacgagaatgacactctctcaagaatcatcaatctagcaccgaagttcctttgggatgttaccacgcacatgttggaaaatgaggaaagcgggacagatcaagttctgttttgcaggaagaaattctgggctattgtttgagttatacttgggtggaaattgggaagctgccatattttatcctacttttggttgccctttgtatcagtgacagagcagagcgtaaggagagctgtttggcatgatagatgttccaatgaaacataatatttcattgcacgttctctgcagttgacagtagtgcattgttgagaaggcatatggtacggtggtgcggttgacagggttatccagaaactagctcggataatttttgcttttgagctgtactatttgtctacgaaggacatgggtgagccggtaaggtgtagtcttactgacagtgtttgtagtttctctcataatgaatagccgttaattcttttgttatcttattcactaatggctaattaggtttaggttctcaagttctcaacaatatgttggtagtgctgtttctgttgttccatctggggagcatctgtagtactataaaccttatgtaaggtactgtttccagccaatgccgaggtgcatttgtt

SEQ ID NO: 40124 - protein, 606 aa, Zea mays subsp. mays
  peptide (1)..(606): Ceres Seq. ID no. 12361175
  misc_feature (97)..(600): Pfam Name: Pfam Description:  Putative methyltransferase
  misc_feature (15)..(606): NCBI GI NO: 15237607 NR Description: putative protein; protein id: At5g04060
  misc_feature (15)..(606): NCBI GI NO: 30681189 NR Description: dehydration-induced protein-related
  misc_feature (88)..(606): NCBI GI NO: 6056205 NR Description: unknown protein [Arabidopsis thaliana]
  misc_feature (90)..(603): NCBI GI NO: 37535372 NR Description: hypothetical protein
  misc_feature (83)..(605): NCBI GI NO: 22326809 NR Description: putative protein; protein id: At5g14430
  misc_feature (88)..(605): NCBI GI NO: 11357548 NR Description: hypothetical protein F18O22
  misc_feature (90)..(603): NCBI GI NO: 18414198 NR Description: ankyrin like protein; protein id: At4g14360
  misc_feature (20)..(603): NCBI GI NO: 18390392 NR Description: ankyrin-like protein; protein id: At1g04430
  misc_feature (20)..(603): NCBI GI NO: 21536697 NR Description: ankyrin-like protein [Arabidopsis thaliana]
  misc_feature (20)..(603): NCBI GI NO: 14423548 NR Description: Unknown protein [Arabidopsis thaliana]
MRRWWSPALAAVEPRSVQLLLLGVALVAASFYAGTLFGSSASPALVLPPSRPRSPDSFRAKVTDVPVFTNRVSRTYRAKSVTVPDHGVDVCPLEYNEYVPCHDGAYISSLKSLDTSRHEDLESICPPWEKRLFCLVPPPNDYKIPIRWPTSRDYVWRSNVNHSHLAEVKGGQNWVHEKGKLWWFPGGGTHFKHGASEYIERLGNMTTNSTGDLRSAGVVQVLDVGCGVASFSAYLLPLDIRTMSFAPKDGHENQIQFALERGIGAMISVLATKQLPYPENSFEMVHCSRCRVDWHENDGILLKEVDRLLRPNGYFVYSAPPAYRKDKDFPVIWEKLVNITTTMCWKLIAKHVQTAIWVKPEDESCRQKNVDMNLLSICESNDNISPSWKIPLMNCVKLNKDKSNIQKLPSRSDRLSFYSKSLEIIGVAPERFEKNNQFWKNQVHKYWSFLHVEKTSIRNVMDMNANYGGFAAALSSDPVWIMNIVPYTMMNTLPVIYDRGLLGSYHDWCEPFSTYPRSYDLLHAFHLFSHYKRRKEDCLLEDIMLEMDRIIRPQGFIIIRDENDTLSRIINLAPKFLWDVTTHMLENEESGTDQVLFCRKKFWAIV

SEQ ID NO: 40125 - protein, 402 aa, Zea mays subsp. mays
  peptide (1)..(402): Ceres Seq. ID no. 12361176
  misc_feature (1)..(396): Pfam Name: Pfam Description:  Putative methyltransferase
  misc_feature (1)..(402): NCBI GI NO: 15237607 NR Description: putative protein; protein id: At5g04060
  misc_feature (1)..(402): NCBI GI NO: 30681189 NR Description: dehydration-induced protein-related
  misc_feature (1)..(402): NCBI GI NO: 6056205 NR Description: unknown protein [Arabidopsis thaliana]
  misc_feature (1)..(399): NCBI GI NO: 37535372 NR Description: hypothetical protein
  misc_feature (1)..(401): NCBI GI NO: 22326809 NR Description: putative protein; protein id: At5g14430
  misc_feature (1)..(401): NCBI GI NO: 11357548 NR Description: hypothetical protein F18O22
  misc_feature (1)..(399): NCBI GI NO: 18414198 NR Description: ankyrin like protein; protein id: At4g14360
  misc_feature (1)..(399): NCBI GI NO: 18390392 NR Description: ankyrin-like protein; protein id: At1g04430
  misc_feature (1)..(399): NCBI GI NO: 21536697 NR Description: ankyrin-like protein [Arabidopsis thaliana]
  misc_feature (1)..(399): NCBI GI NO: 14423548 NR Description: Unknown protein [Arabidopsis thaliana]
MTTNSTGDLRSAGVVQVLDVGCGVASFSAYLLPLDIRTMSFAPKDGHENQIQFALERGIGAMISVLATKQLPYPENSFEMVHCSRCRVDWHENDGILLKEVDRLLRPNGYFVYSAPPAYRKDKDFPVIWEKLVNITTTMCWKLIAKHVQTAIWVKPEDESCRQKNVDMNLLSICESNDNISPSWKIPLMNCVKLNKDKSNIQKLPSRSDRLSFYSKSLEIIGVAPERFEKNNQFWKNQVHKYWSFLHVEKTSIRNVMDMNANYGGFAAALSSDPVWIMNIVPYTMMNTLPVIYDRGLLGSYHDWCEPFSTYPRSYDLLHAFHLFSHYKRRKEDCLLEDIMLEMDRIIRPQGFIIIRDENDTLSRIINLAPKFLWDVTTHMLENEESGTDQVLFCRKKFWAIV

SEQ ID NO: 40126 - protein, 364 aa, Zea mays subsp. mays
  peptide (1)..(364): Ceres Seq. ID no. 12361177
  misc_feature (1)..(358): Pfam Name: Pfam Description:  Putative methyltransferase
  misc_feature (1)..(364): NCBI GI NO: 15237607 NR Description: putative protein; protein id: At5g04060
  misc_feature (1)..(364): NCBI GI NO: 30681189 NR Description: dehydration-induced protein-related
  misc_feature (1)..(364): NCBI GI NO: 6056205 NR Description: unknown protein [Arabidopsis thaliana]
  misc_feature (1)..(361): NCBI GI NO: 37535372 NR Description: hypothetical protein
  misc_feature (1)..(363): NCBI GI NO: 22326809 NR Description: putative protein; protein id: At5g14430
  misc_feature (1)..(363): NCBI GI NO: 11357548 NR Description: hypothetical protein F18O22
  misc_feature (1)..(361): NCBI GI NO: 18414198 NR Description: ankyrin like protein; protein id: At4g14360
  misc_feature (1)..(361): NCBI GI NO: 18390392 NR Description: ankyrin-like protein; protein id: At1g04430
  misc_feature (1)..(361): NCBI GI NO: 21536697 NR Description: ankyrin-like protein [Arabidopsis thaliana]
  misc_feature (1)..(361): NCBI GI NO: 14423548 NR Description: Unknown protein [Arabidopsis thaliana]
MSFAPKDGHENQIQFALERGIGAMISVLATKQLPYPENSFEMVHCSRCRVDWHENDGILLKEVDRLLRPNGYFVYSAPPAYRKDKDFPVIWEKLVNITTTMCWKLIAKHVQTAIWVKPEDESCRQKNVDMNLLSICESNDNISPSWKIPLMNCVKLNKDKSNIQKLPSRSDRLSFYSKSLEIIGVAPERFEKNNQFWKNQVHKYWSFLHVEKTSIRNVMDMNANYGGFAAALSSDPVWIMNIVPYTMMNTLPVIYDRGLLGSYHDWCEPFSTYPRSYDLLHAFHLFSHYKRRKEDCLLEDIMLEMDRIIRPQGFIIIRDENDTLSRIINLAPKFLWDVTTHMLENEESGTDQVLFCRKKFWAIV

SEQ ID NO: 40127 - DNA, 2854 bp, Zea mays subsp. mays
  misc_feature (1)..(2854): Ceres Seq. ID no. 12417119
actcgtcaggcccttccgccgtcccggaggctcgaacccctcggcccgcggacgggaccctaaacccgccccaccactcgcgcggggttcgcccgcgacccatgcgcggcggcggctggtaccctcggcagccggcgatcgccggaaatctgcggggacagtgcggcggcttgcacgagtgccggacacggcgggagtggggaacgtaggggagatggcggcgggaggaaagggctgggcggagcgggtacgccgcggggcgaggaccgcttggttcatggtggccatggtggcctcgctgctcgtggcgtcgtcgccggcgctggtggcggcggtcgacatggcagtggcgctctggctcgaggcgcggctcggctgcttccgaggcgacggcctgcggggccacctccagcgctaccgttttcggaactcgcttgccgacatacctctcgtctccgtcgttcgatccatcgtcatcacctgtaagccctcccgctgcctgctaactcattgatgctttagaatgggcagatggcctaaaaaccaacccgttcgcttgagttcgatttccttttcttctactatttctcccctttgtggtttatttgctctggtgatgtagagagtgtttactgtttagaatcatttttttgggtgaggtcttagcttgagaagatcttttcgcattcctctatgaggatttggtgatctgaaagctacagtactcactacggctgtgcttgtcttcttttgcttgcacggagctttcggcggaatctgcgtgtatctgcagttattaatcacagagtatagctgttgcctgctctcttttcttgggaggtagttaaactaagcctgttgtttagctggacctggactggttgtaagaaattgggaacctctcgaataccaaattctgctctgttcttaatttgagggcaaagactaaccttatgttctgcggcttctgcaggtgtgtacctcatgtctgatacttctggcctctctcatggtccttaccttggaacaacaactttctgttccttggcttctctgctcatcttgttaattaaggcatctgtttatagtccggcgcaggacattgggcctgagctctcgccgtcgttaccagatcacaagctcaatctcaagaatctatggggaatgcctgtacttttcctgtcttccttggtgtttgctcttggccatgttattgttgcttacagaacaagcggcagggctcgacggaagcttctcattcaccgcattgaccctgaatcgattttagcatacaagaatgccttttctggatgctacaaggttccacggtctcctacaccatacagcggaaagctttttacaaggagtgaaagtgagactaagagaaaatcacttatccaggacgatcgtgatttgccaatcagttttcttgcagacagtgatagcatgttcattgcttgccaggggatcactatacactacaaagtttccgatccagcagccagcctaccttcatcccctggcttcttttcagagagagatactcatcacgatgtaatttcatcaagcatttctcctagaagacagaggcatgagagtccaccatctgcttcctctaatacccgtcgcgttctgaataggagctttagccatcaataccataatacttcgctatatgcaccactattggtagaaccagtggcatctccaactttgttggatgatattcctctgatgtgtattgatgatggcaatgctgatggatgtctgagtcatgtgggctttgaccttgaggctggagggcagggtaaattcgctgtagttttggtgcatggatttggagggggagtattctcgtggagacatgtttccaatttgttagctcgacaattgggatgcactgtgatggcatttgatcgcccaggatggggattaacatctcgacctcgtaggaaggactgggaagataagaagttaccgaatccatatgagctggagtctcaggttgatcttcttatttcattttgttcagagatgggcttgcactctgtggttttagttggtcatgatgatgggggcttgcttgccttgaaggctgcggagaagctgcgcacttatggaggtgacagagaggttgaagtgaagggagtagttcttattggtgtgagcttatcaagagaagtcattcctgcatttgctcgtatactcctgcatacacctctgaggaaaaagcacatggttcgaccacttctacgtactgaaatcgttcaagttatcaatcggcgggcatggtatgatgccacaaagttgacgacagaaatacttaacctatacaaggctccgctatttgttgagggctgggatgaagcacttcatgaagtaggccggctttcgttttctactgtcctgccatcaaaacgagcagcggatctactaagatcagtggaagaccttccggttctggtggtagcgggctccgaggatgctcttgtttctctgaagtcggcacaagccatggcttcgaaatttgtaaattctaggatagtaattatatcggggtgtggacatctgccgcacgaggagtgccccaaggcgttgctctcggctcttgctcctttcatctctacattggtaccctcagaagatttgttgcaaagactgtagaatatactcgttcctttttcgtttttttaagaacttttttctagctggtgagtttgtatgagcccattgtagcgcgaagtagtagtggagcctgacccaaaatctcaagggttcctagagctcccctgatttttttgtcacatgttaatggttccccctgaacgatttcaattaagcaagttgaatgtgt

SEQ ID NO: 40128 - protein, 559 aa, Zea mays subsp. mays
  peptide (1)..(559): Ceres Seq. ID no. 12417120
  misc_feature (305)..(544): Pfam Name: Pfam Description:  alpha/beta hydrolase fold
  misc_feature (1)..(559): NCBI GI NO: 34911750 NR Description: P0038D11.18
  misc_feature (1)..(554): NCBI GI NO: 15220097 NR Description: unknown protein; protein id: At1g80280
  misc_feature (1)..(555): NCBI GI NO: 15218212 NR Description: unknown protein; protein id: At1g15490
  misc_feature (44)..(551): NCBI GI NO: 25405595 NR Description: unknown protein, 18223-15857
  misc_feature (44)..(551): NCBI GI NO: 22330208 NR Description: unknown protein; protein id: At1g52750
  misc_feature (386)..(546): NCBI GI NO: 6630546 NR Description: putative alpha/beta hydrolase
  misc_feature (276)..(371): NCBI GI NO: 6630546 NR Description: putative alpha/beta hydrolase
  misc_feature (386)..(546): NCBI GI NO: 30681503 NR Description: hydrolase, alpha/beta fold family
  misc_feature (276)..(371): NCBI GI NO: 30681503 NR Description: hydrolase, alpha/beta fold family
  misc_feature (1)..(113): NCBI GI NO: 30688139 NR Description: expressed protein [Arabidopsis thaliana]
MSDTSGLSHGPYLGTTTFCSLASLLILLIKASVYSPAQDIGPELSPSLPDHKLNLKNLWGMPVLFLSSLVFALGHVIVAYRTSGRARRKLLIHRIDPESILAYKNAFSGCYKVPRSPTPYSGKLFTRSESETKRKSLIQDDRDLPISFLADSDSMFIACQGITIHYKVSDPAASLPSSPGFFSERDTHHDVISSSISPRRQRHESPPSASSNTRRVLNRSFSHQYHNTSLYAPLLVEPVASPTLLDDIPLMCIDDGNADGCLSHVGFDLEAGGQGKFAVVLVHGFGGGVFSWRHVSNLLARQLGCTVMAFDRPGWGLTSRPRRKDWEDKKLPNPYELESQVDLLISFCSEMGLHSVVLVGHDDGGLLALKAAEKLRTYGGDREVEVKGVVLIGVSLSREVIPAFARILLHTPLRKKHMVRPLLRTEIVQVINRRAWYDATKLTTEILNLYKAPLFVEGWDEALHEVGRLSFSTVLPSKRAADLLRSVEDLPVLVVAGSEDALVSLKSAQAMASKFVNSRIVIISGCGHLPHEECPKALLSALAPFISTLVPSEDLLQRL

SEQ ID NO: 40129 - protein, 499 aa, Zea mays subsp. mays
  peptide (1)..(499): Ceres Seq. ID no. 12417121
  misc_feature (245)..(484): Pfam Name: Pfam Description:  alpha/beta hydrolase fold
  misc_feature (1)..(499): NCBI GI NO: 34911750 NR Description: P0038D11.18
  misc_feature (1)..(494): NCBI GI NO: 15220097 NR Description: unknown protein; protein id: At1g80280
  misc_feature (1)..(495): NCBI GI NO: 15218212 NR Description: unknown protein; protein id: At1g15490
  misc_feature (1)..(491): NCBI GI NO: 25405595 NR Description: unknown protein, 18223-15857
  misc_feature (1)..(491): NCBI GI NO: 22330208 NR Description: unknown protein; protein id: At1g52750
  misc_feature (326)..(486): NCBI GI NO: 6630546 NR Description: putative alpha/beta hydrolase
  misc_feature (216)..(311): NCBI GI NO: 6630546 NR Description: putative alpha/beta hydrolase
  misc_feature (326)..(486): NCBI GI NO: 30681503 NR Description: hydrolase, alpha/beta fold family
  misc_feature (216)..(311): NCBI GI NO: 30681503 NR Description: hydrolase, alpha/beta fold family
  misc_feature (1)..(53): NCBI GI NO: 30688139 NR Description: expressed protein [Arabidopsis thaliana]
MPVLFLSSLVFALGHVIVAYRTSGRARRKLLIHRIDPESILAYKNAFSGCYKVPRSPTPYSGKLFTRSESETKRKSLIQDDRDLPISFLADSDSMFIACQGITIHYKVSDPAASLPSSPGFFSERDTHHDVISSSISPRRQRHESPPSASSNTRRVLNRSFSHQYHNTSLYAPLLVEPVASPTLLDDIPLMCIDDGNADGCLSHVGFDLEAGGQGKFAVVLVHGFGGGVFSWRHVSNLLARQLGCTVMAFDRPGWGLTSRPRRKDWEDKKLPNPYELESQVDLLISFCSEMGLHSVVLVGHDDGGLLALKAAEKLRTYGGDREVEVKGVVLIGVSLSREVIPAFARILLHTPLRKKHMVRPLLRTEIVQVINRRAWYDATKLTTEILNLYKAPLFVEGWDEALHEVGRLSFSTVLPSKRAADLLRSVEDLPVLVVAGSEDALVSLKSAQAMASKFVNSRIVIISGCGHLPHEECPKALLSALAPFISTLVPSEDLLQRL

SEQ ID NO: 40130 - protein, 405 aa, Zea mays subsp. mays
  peptide (1)..(405): Ceres Seq. ID no. 12417122
  misc_feature (151)..(390): Pfam Name: Pfam Description:  alpha/beta hydrolase fold
  misc_feature (1)..(405): NCBI GI NO: 34911750 NR Description: P0038D11.18
  misc_feature (1)..(400): NCBI GI NO: 15220097 NR Description: unknown protein; protein id: At1g80280
  misc_feature (1)..(401): NCBI GI NO: 15218212 NR Description: unknown protein; protein id: At1g15490
  misc_feature (1)..(397): NCBI GI NO: 25405595 NR Description: unknown protein, 18223-15857
  misc_feature (1)..(397): NCBI GI NO: 22330208 NR Description: unknown protein; protein id: At1g52750
  misc_feature (232)..(392): NCBI GI NO: 6630546 NR Description: putative alpha/beta hydrolase
  misc_feature (122)..(217): NCBI GI NO: 6630546 NR Description: putative alpha/beta hydrolase
  misc_feature (232)..(392): NCBI GI NO: 30681503 NR Description: hydrolase, alpha/beta fold family
  misc_feature (122)..(217): NCBI GI NO: 30681503 NR Description: hydrolase, alpha/beta fold family
  misc_feature (119)..(396): NCBI GI NO: 21673775 NR Description: hydrolase, alpha/beta hydrolase fold family
MFIACQGITIHYKVSDPAASLPSSPGFFSERDTHHDVISSSISPRRQRHESPPSASSNTRRVLNRSFSHQYHNTSLYAPLLVEPVASPTLLDDIPLMCIDDGNADGCLSHVGFDLEAGGQGKFAVVLVHGFGGGVFSWRHVSNLLARQLGCTVMAFDRPGWGLTSRPRRKDWEDKKLPNPYELESQVDLLISFCSEMGLHSVVLVGHDDGGLLALKAAEKLRTYGGDREVEVKGVVLIGVSLSREVIPAFARILLHTPLRKKHMVRPLLRTEIVQVINRRAWYDATKLTTEILNLYKAPLFVEGWDEALHEVGRLSFSTVLPSKRAADLLRSVEDLPVLVVAGSEDALVSLKSAQAMASKFVNSRIVIISGCGHLPHEECPKALLSALAPFISTLVPSEDLLQRL

SEQ ID NO: 40131 - DNA, 1311 bp, Zea mays subsp. mays
  misc_feature (1)..(1311): Ceres Seq. ID no. 12417377
gcacgagaccattacctagaacatcctaatcaaaaagtcccacccctcctgcatttcaataatatctccctgcgcttttcctagccctttgtcatccaaggaaacaataaacaaccggcgcttttacacccccgccaagaacaggagcaacaacaacaaggctcctcgcaacaatccattctcatccatggcgaagctcatgaacaagctggtcgattcgttcgagcacgacgagataccggacgtcggctgcgtgcgcgccgtgctggccgagctcgtcctcaccttcctcttcgtcttcaccggcgtctccgccgccatggccgccggatccgacgggaagcccggcgacgctatgccgatggcgacgctggcggcggtggctatcgcgcacgcgctggccgctggcgtcctggtgacggccgggttccacgtctccggcggccacctgaaccccgcggtgacggtggggctcatggtgcgcggccacatcaccaagctccgggcggtgctgtacgtcgccgcccagctgctggcctcctccgccgcctgcgtcctcctccgcttcctcagcggcggcatggtgaccccggtgcacgccctgggcaggggcatcagccccgatgcagggcctggtgatggaggtgatcctcaccttctccctgctcttcgtcacctacgccatgatcctggacccgcagccaggtccgcgccatcggcccgctgctgacgggcctcatcgtcggcgccaacagcctcgccggcggcaacttcaccggcgcgtccatgaacccggcacgctccttcggcccggccctggccaccggggactggacaaaccactgggtctactggatcggcccgctgctcggtgggcccctggcaggcttcgtgtacgagtcgctgttcctggtgcagaagatgcacgagccgctgctcaatggggaagtctgacgaccatcagcaccttcatgcttgtttctgtaaaacaggtcattatctgcaagcatggtacatacattggccaaggtaattagagaggcttgctgtaaagcagtaggattgctggctgtagaaattgttgatgggctttttttgggggtttcctgccaaggaattctttcttttatataatctcaaaaaagtttttttttttggtatgggctgggttctatcaagggtttgttaaggctattagtttaccatgtagcagaaaaactagtgggacgtgaagttttttcacgtacattgtaatactttggtatttttgtctaccagatgaaactggaagtacagagcaaaaacttctct

SEQ ID NO: 40132 - protein, 180 aa, Zea mays subsp. mays
  peptide (1)..(180): Ceres Seq. ID no. 12417378
  misc_feature (16)..(148): Pfam Name: Pfam Description:  Major intrinsic protein
  misc_feature (1)..(148): NCBI GI NO: 13447829 NR Description: tonoplast membrane integral protein ZmTIP4-1
  misc_feature (1)..(148): NCBI GI NO: 13447831 NR Description: tonoplast membrane integral protein ZmTIP4-2
  misc_feature (14)..(143): NCBI GI NO: 13447835 NR Description: tonoplast membrane integral protein ZmTIP4-4
  misc_feature (7)..(148): NCBI GI NO: 15225195 NR Description: putative aquaporin
  misc_feature (5)..(148): NCBI GI NO: 34904336 NR Description: unnamed protein product
  misc_feature (5)..(148): NCBI GI NO: 4584429 NR Description: aquaglyceroporin; tonoplast intrinsic protein
  misc_feature (14)..(143): NCBI GI NO: 34904332 NR Description: unnamed protein product
  misc_feature (24)..(148): NCBI GI NO: 13447833 NR Description: tonoplast membrane integral protein ZmTIP4-3
  misc_feature (15)..(148): NCBI GI NO: 7441262 NR Description: aquaporin-like protein - Norway spruce
  misc_feature (15)..(148): NCBI GI NO: 17473872 NR Description: delta tonoplast intrinsic protein
MAKLMNKLVDSFEHDEIPDVGCVRAVLAELVLTFLFVFTGVSAAMAAGSDGKPGDAMPMATLAAVAIAHALAAGVLVTAGFHVSGGHLNPAVTVGLMVRGHITKLRAVLYVAAQLLASSAACVLLRFLSGGMVTPVHALGRGISPDAGPGDGGDPHLLPALRHLRHDPGPAARSAPSARC

SEQ ID NO: 40133 - protein, 176 aa, Zea mays subsp. mays
  peptide (1)..(176): Ceres Seq. ID no. 12417379
  misc_feature (12)..(144): Pfam Name: Pfam Description:  Major intrinsic protein
  misc_feature (1)..(144): NCBI GI NO: 13447829 NR Description: tonoplast membrane integral protein ZmTIP4-1
  misc_feature (1)..(144): NCBI GI NO: 13447831 NR Description: tonoplast membrane integral protein ZmTIP4-2
  misc_feature (10)..(139): NCBI GI NO: 13447835 NR Description: tonoplast membrane integral protein ZmTIP4-4
  misc_feature (3)..(144): NCBI GI NO: 15225195 NR Description: putative aquaporin
  misc_feature (1)..(144): NCBI GI NO: 34904336 NR Description: unnamed protein product
  misc_feature (1)..(144): NCBI GI NO: 4584429 NR Description: aquaglyceroporin; tonoplast intrinsic protein
  misc_feature (10)..(139): NCBI GI NO: 34904332 NR Description: unnamed protein product
  misc_feature (20)..(144): NCBI GI NO: 13447833 NR Description: tonoplast membrane integral protein ZmTIP4-3
  misc_feature (11)..(144): NCBI GI NO: 7441262 NR Description: aquaporin-like protein - Norway spruce
  misc_feature (11)..(144): NCBI GI NO: 17473872 NR Description: delta tonoplast intrinsic protein
MNKLVDSFEHDEIPDVGCVRAVLAELVLTFLFVFTGVSAAMAAGSDGKPGDAMPMATLAAVAIAHALAAGVLVTAGFHVSGGHLNPAVTVGLMVRGHITKLRAVLYVAAQLLASSAACVLLRFLSGGMVTPVHALGRGISPDAGPGDGGDPHLLPALRHLRHDPGPAARSAPSARC

SEQ ID NO: 40134 - protein, 137 aa, Zea mays subsp. mays
  peptide (1)..(137): Ceres Seq. ID no. 12417380
  misc_feature (1)..(26): NCBI GI NO: 13447829 NR Description: tonoplast membrane integral protein ZmTIP4-1
  misc_feature (1)..(26): NCBI GI NO: 13447831 NR Description: tonoplast membrane integral protein ZmTIP4-2
  misc_feature (1)..(26): NCBI GI NO: 13447835 NR Description: tonoplast membrane integral protein ZmTIP4-4
  misc_feature (2)..(28): NCBI GI NO: 15225195 NR Description: putative aquaporin
  misc_feature (1)..(38): NCBI GI NO: 34904336 NR Description: unnamed protein product
  misc_feature (2)..(28): NCBI GI NO: 4584429 NR Description: aquaglyceroporin; tonoplast intrinsic protein
  misc_feature (2)..(28): NCBI GI NO: 7441262 NR Description: aquaporin-like protein - Norway spruce
  misc_feature (1)..(28): NCBI GI NO: 17473872 NR Description: delta tonoplast intrinsic protein
  misc_feature (1)..(28): NCBI GI NO: 15219403 NR Description: tonoplast intrinsic protein, alpha
  misc_feature (1)..(28): NCBI GI NO: 38605857 NR Description: OSJNBb0034G17.15
MQGLVMEVILTFSLLFVTYAMILDPQPGPRHRPAADGPHRRRQQPRRRQLHRRVHEPGTLLRPGPGHRGLDKPLGLLDRPAARWAPGRLRVRVAVPGAEDARAAAQWGSLTTISTFMLVSVKQVIICKHGTYIGQGN

SEQ ID NO: 40135 - DNA, 2625 bp, Zea mays subsp. mays
  misc_feature (1)..(2625): Ceres Seq. ID no. 12366382
gcacgagaccattacctagaacatcctaatctaaaagatagagaaatgagcttcgctgttcgagaaaacagcagagcccggccgaattcgttgggcagcctgcggagatgcagtagaggccgccaggcgcagatggaatgagcgaccgggctctgctccgccgctagcctgccgccgcaccgcgccgtcgatcgccgcgccatgaacggtccccgcggctaccccctttctccaccggcaccttacccccgtatggcgtgatccaatgatagcaccaagagcgcaccttcccctctccctgacggcgtcgtcctccccgcacggcggcgcgcgcacccgcaccaagaagaggaagaaaccatgtcccccaacctggacagcgccatcaagatccaggtgccggcgctgctcctgaggcgtctcttcggcgcgtcccggcgggacgaggccaagcagctccagcggaccccggcgccggtggggaggcggcgggtgtttgtgcagacgggagaccggctgcgtgctcggcatggacctggaccgcggggacaacgcgcacaccgtcaagcgccggctgcagctcgcgctcaacatgcccaccggcgggacctcgctcaccttcggcgatcgcctcctggagaacgacctgtccttcatacgcccggactcgccgctgctgctcacccggaacagcatcaaccggagctgctccaccccgtgcctctgccccgtctccaaggacttcgagcacaaggactgcagcggactggttgagatgctcggctgttccagcagctgtgcccgggtgaagcgcctcgtggacgacgtggtgactgccatcaggagcggcgtggatccggtccccattagcagcggccttggtggctcgtactacttcaggaacgtcttgggcgacagggttgctattgtgaagccgacggacgaggagccctttgcgccaaacaatcccaaggggttcgtcgggagggcgctcggtcagccgggcctcaagagatctgtgcgagtgggagagacggggtttagggaggttgcggcattcctgttggaccatgacaacttcgccaacgttcctgccacggctctggtgaagataacacactccattttcaacataaactgcccggtaaatggaggaaacctggcaccggctcatgaccagcaacagcaagttaacagcaagattgcttcgttccagcagttcatagcccatgacttcgacgccagcgaccatggcacgtcaagcttccctgtcgctgctgttcataggatcggcatactagatatccggattttcaacactgacaggcacgccggcaatgtgctggtgaggaagcttaacggtggcacaggccgctttggttgccagacagagctgttcccaattgatcatggcatgtgcttgccggagaacttggaggacccttacttcgagtggatccattgggctcaggcttctattccgttctctgaggaagagctcgagtacatcagaaatcttgatccaaggaaagatgtgcagatgctgcgccgggaacttccgatgatacgtgaggcctgcctacatgtactggccctgtgcacaatcttccttaaggaggctgcagctttcggactctgcttggccgagataggcgagatgatgaccagggagttcagagggatggaggaggaaccaagccagctggaggttatgtgtatggaggccaggaagagagtagcagagtgggagcccttctctgccacggctgaacatggagaagataccgatttccagttctcggtggatatgctaggagaatacagtgatgtagtgcgatcaccgaggttcaatggctcaggttccaaggtgtccagtttcagaagccctttgtctaagctcgtcgagagtgtcgacgagggcagtgatggccatgaagatcaaaacgagtctgatcgagtcttgtatgctggatggaatacatccagcgttcctagcaaagctatgggccatagtggcaatgcctcaaaaagtgcaatgaacaggagtgccgatgaacaacttccatcaagtatgtgttttgtcaggctgtcggatatgagtgcagatgagtgggatgtattcctcgaaaaattccaggagctgctgaaagaggcactgcacgagagcgcaagggcagcagtaggtcaaaggatgaagcagcggctgggcacttcatgcaagttttgagcagggcaatagcgcatcagagaagaaaaaaatgcagtgctacttgtactgcttgcttatggagtgagtacaggatgaagatatcatcgtatgtggcaccttcaaccttgtgcaacgatctaggttgcagcagccatgtccagcaggtagataggaccacaagcatatgtagtgacggtgtggagaactgctacgcgtgtttattagctatatgtttacgaaggggaatgcttaataataaatgtttgtcagcctgtgtatattggcttgatgttagatactccagctttagcatgcaatttcttagtcgctgaaaattctttgtagcttgtgatgtgacctgtgagcagtgtaaacgttgcacctttgatggaaaaataatgcttacctgttgttgt

SEQ ID NO: 40136 - protein, 565 aa, Zea mays subsp. mays
  peptide (1)..(565): Ceres Seq. ID no. 12366383
  misc_feature (116)..(381): Pfam Name: Pfam Description:  Phosphatidylinositol 3- and 4-kinase
  misc_feature (1)..(506): NCBI GI NO: 18395629 NR Description: expressed protein; protein id: At2g03890
  misc_feature (1)..(506): NCBI GI NO: 25363315 NR Description: hypothetical protein At2g03890
  misc_feature (493)..(565): NCBI GI NO: 18395629 NR Description: expressed protein; protein id: At2g03890
  misc_feature (493)..(565): NCBI GI NO: 25363315 NR Description: hypothetical protein At2g03890
  misc_feature (1)..(565): NCBI GI NO: 18394020 NR Description: ubiquitin, putative; protein id: At1g13640
  misc_feature (1)..(565): NCBI GI NO: 25363319 NR Description: F21F23.8 protein - Arabidopsis thaliana
  misc_feature (1)..(475): NCBI GI NO: 18395825 NR Description: expressed protein; protein id: At1g26270
  misc_feature (497)..(565): NCBI GI NO: 18395825 NR Description: expressed protein; protein id: At1g26270
  misc_feature (38)..(458): NCBI GI NO: 15228965 NR Description: putative protein; protein id: At3g56600.1
  misc_feature (518)..(546): NCBI GI NO: 15228965 NR Description: putative protein; protein id: At3g56600.1
MDLDRGDNAHTVKRRLQLALNMPTGGTSLTFGDRLLENDLSFIRPDSPLLLTRNSINRSCSTPCLCPVSKDFEHKDCSGLVEMLGCSSSCARVKRLVDDVVTAIRSGVDPVPISSGLGGSYYFRNVLGDRVAIVKPTDEEPFAPNNPKGFVGRALGQPGLKRSVRVGETGFREVAAFLLDHDNFANVPATALVKITHSIFNINCPVNGGNLAPAHDQQQQVNSKIASFQQFIAHDFDASDHGTSSFPVAAVHRIGILDIRIFNTDRHAGNVLVRKLNGGTGRFGCQTELFPIDHGMCLPENLEDPYFEWIHWAQASIPFSEEELEYIRNLDPRKDVQMLRRELPMIREACLHVLALCTIFLKEAAAFGLCLAEIGEMMTREFRGMEEEPSQLEVMCMEARKRVAEWEPFSATAEHGEDTDFQFSVDMLGEYSDVVRSPRFNGSGSKVSSFRSPLSKLVESVDEGSDGHEDQNESDRVLYAGWNTSSVPSKAMGHSGNASKSAMNRSADEQLPSSMCFVRLSDMSADEWDVFLEKFQELLKEALHESARAAVGQRMKQRLGTSCKF

SEQ ID NO: 40137 - protein, 544 aa, Zea mays subsp. mays
  peptide (1)..(544): Ceres Seq. ID no. 12366384
  misc_feature (95)..(360): Pfam Name: Pfam Description:  Phosphatidylinositol 3- and 4-kinase
  misc_feature (1)..(485): NCBI GI NO: 18395629 NR Description: expressed protein; protein id: At2g03890
  misc_feature (1)..(485): NCBI GI NO: 25363315 NR Description: hypothetical protein At2g03890
  misc_feature (472)..(544): NCBI GI NO: 18395629 NR Description: expressed protein; protein id: At2g03890
  misc_feature (472)..(544): NCBI GI NO: 25363315 NR Description: hypothetical protein At2g03890
  misc_feature (1)..(544): NCBI GI NO: 18394020 NR Description: ubiquitin, putative; protein id: At1g13640
  misc_feature (1)..(544): NCBI GI NO: 25363319 NR Description: F21F23.8 protein - Arabidopsis thaliana
  misc_feature (1)..(454): NCBI GI NO: 18395825 NR Description: expressed protein; protein id: At1g26270
  misc_feature (476)..(544): NCBI GI NO: 18395825 NR Description: expressed protein; protein id: At1g26270
  misc_feature (17)..(437): NCBI GI NO: 15228965 NR Description: putative protein; protein id: At3g56600.1
  misc_feature (497)..(525): NCBI GI NO: 15228965 NR Description: putative protein; protein id: At3g56600.1
MPTGGTSLTFGDRLLENDLSFIRPDSPLLLTRNSINRSCSTPCLCPVSKDFEHKDCSGLVEMLGCSSSCARVKRLVDDVVTAIRSGVDPVPISSGLGGSYYFRNVLGDRVAIVKPTDEEPFAPNNPKGFVGRALGQPGLKRSVRVGETGFREVAAFLLDHDNFANVPATALVKITHSIFNINCPVNGGNLAPAHDQQQQVNSKIASFQQFIAHDFDASDHGTSSFPVAAVHRIGILDIRIFNTDRHAGNVLVRKLNGGTGRFGCQTELFPIDHGMCLPENLEDPYFEWIHWAQASIPFSEEELEYIRNLDPRKDVQMLRRELPMIREACLHVLALCTIFLKEAAAFGLCLAEIGEMMTREFRGMEEEPSQLEVMCMEARKRVAEWEPFSATAEHGEDTDFQFSVDMLGEYSDVVRSPRFNGSGSKVSSFRSPLSKLVESVDEGSDGHEDQNESDRVLYAGWNTSSVPSKAMGHSGNASKSAMNRSADEQLPSSMCFVRLSDMSADEWDVFLEKFQELLKEALHESARAAVGQRMKQRLGTSCKF

SEQ ID NO: 40138 - protein, 483 aa, Zea mays subsp. mays
  peptide (1)..(483): Ceres Seq. ID no. 12366385
  misc_feature (34)..(299): Pfam Name: Pfam Description:  Phosphatidylinositol 3- and 4-kinase
  misc_feature (1)..(424): NCBI GI NO: 18395629 NR Description: expressed protein; protein id: At2g03890
  misc_feature (1)..(424): NCBI GI NO: 25363315 NR Description: hypothetical protein At2g03890
  misc_feature (411)..(483): NCBI GI NO: 18395629 NR Description: expressed protein; protein id: At2g03890
  misc_feature (411)..(483): NCBI GI NO: 25363315 NR Description: hypothetical protein At2g03890
  misc_feature (1)..(483): NCBI GI NO: 18394020 NR Description: ubiquitin, putative; protein id: At1g13640
  misc_feature (1)..(483): NCBI GI NO: 25363319 NR Description: F21F23.8 protein - Arabidopsis thaliana
  misc_feature (1)..(393): NCBI GI NO: 18395825 NR Description: expressed protein; protein id: At1g26270
  misc_feature (415)..(483): NCBI GI NO: 18395825 NR Description: expressed protein; protein id: At1g26270
  misc_feature (1)..(376): NCBI GI NO: 15228965 NR Description: putative protein; protein id: At3g56600.1
  misc_feature (436)..(464): NCBI GI NO: 15228965 NR Description: putative protein; protein id: At3g56600.1
MLGCSSSCARVKRLVDDVVTAIRSGVDPVPISSGLGGSYYFRNVLGDRVAIVKPTDEEPFAPNNPKGFVGRALGQPGLKRSVRVGETGFREVAAFLLDHDNFANVPATALVKITHSIFNINCPVNGGNLAPAHDQQQQVNSKIASFQQFIAHDFDASDHGTSSFPVAAVHRIGILDIRIFNTDRHAGNVLVRKLNGGTGRFGCQTELFPIDHGMCLPENLEDPYFEWIHWAQASIPFSEEELEYIRNLDPRKDVQMLRRELPMIREACLHVLALCTIFLKEAAAFGLCLAEIGEMMTREFRGMEEEPSQLEVMCMEARKRVAEWEPFSATAEHGEDTDFQFSVDMLGEYSDVVRSPRFNGSGSKVSSFRSPLSKLVESVDEGSDGHEDQNESDRVLYAGWNTSSVPSKAMGHSGNASKSAMNRSADEQLPSSMCFVRLSDMSADEWDVFLEKFQELLKEALHESARAAVGQRMKQRLGTSCKF

SEQ ID NO: 40139 - DNA, 2424 bp, Zea mays subsp. mays
  misc_feature (1)..(2424): Ceres Seq. ID no. 12375124
gcacgagaccattacctagaacatcctaatcgaaaaagtttctcgttcccggcgtggtgtggcctggccactggccacccgtgccctatcctcttccgcacggcgtcctatatataaggaaaggaaaaatctgccactccacacgcgctcctctctcgccgtcgccaaccatcgccgcctcgcgtccggacccgccgttcctccgaggaaatggctgcactgcaaccctcattttcaccagcaatgactttgaagagtagctgcagcgccctgaagttcccaaaaactgcactgttatctggttttggtggcattccacgccttcaagatgcgcaagacaggaacactagcgtcgcttatttgatccccaaggctgcttcagtgactgaccagtcaatagcagagccaccaaaaaccaagcaaaataggcacacagtcgacccaacagctccagaatttctgccactcccatcttttgaagaatgctttccaaggagtaccaaagaatcaagtgaaatcatccacgaggaatcaggtcatgtcctcaaggttccattccggagagtccatttgactggagatcagaagcactttgatacatatgacaccagcggtcctcaaaatataagcccaaggattggactcccaaagataaggaaggaatggattgataggagggaaaagctgggtagtcctcggtacacacaaatgtattatgctaaacagggaattgtaacagaggagatgttatactgtgccagccgtgagaaccttagtcctgaatttgttcggacagaagttgcccgtggacgagccataattccttccaacaagaggcacctggaattggaacccatgattgttggaagaaacttccttgtaaaggtgaatgcaaatattgggaattcagctgttgtgagctccattgaggaggaagttcacaagctccagtgggccacgatgtggggagctgatactgtcatggacctttcaacagggcgacatatccatgagacgcgggaatggattattcgcaactctccggttcctattgggactgttcctatttaccaagcacttgagaaagtaaatggtattgctgaaaatctgagctgggaaatttttagggataccttgattgaacaagctgagcagggcgttgattacttcacaatccatgctggtgtcctgcttcgttacattcctcttacagcaaagagaatgacgggcatagtttcacgtggtggctcaatccatgcaaaatggtgcttaacttatcacaaggagaactttgcatatgaacattgggatgacattcttgacatatgcaatcagtatgatgtggcattatcaattggtgatggtttgaggcctggttccatttatgatgcaaatgatagtgcacagtttgcagaactgctgactcaaggtgaactaacacgtcgagcatgggcgaaagatgtgcaggtaatgaatgaaggcccgggtcacatcccaatgcataaaattcctgaaaacatggagaaacagttggagtggtgtaatgaagcgcctttctatacattgggtcctttgacaactgatattgcacctggttatgatcacatcacttcagccattggtgctgccaacattggagctcttggcactgcacttctttgctatgtaacaccaaaggagcaccttgggttgcccaatcgtgatgatgtcaagactggtgtaatatcctacaaaatttctgctcatgctgctgatttggcgaagggtcatccctatgcacaagcttgggatgatgcacttagcaaggcaaggtttgagtttagatggcttgaccaatttgctttatctctggatccagtaactgctatggctttccatgatgaaacattgccctctgagggtgccaaagtggcacatttctgctcaatgtgtgggcccaagttttgttcaatgaaaatcacggaggatatcaggaagtatgctgatgaaaatggttatggaacagtagaggaagctgtgatacaaggaatgaatgctatgagtgctgaatttttggctgcaaggaaaacaattagtggggaacaacatggtgaagcaggaggggagatctatgtaccagaaagctatgcagctcagaaataaggtttcctcggagccatccattctaaatgaggctaaggcatcagcagctgttctggctagtggctaaggcatcagcagctgttctaccatcttatctaatgagatggtaagcagtatgtgaataaagctggtgttgcttaccttcagtttgtgaatgccattatgtactgtaataaaaaactctgtattgtactccctagcattatcattatgcttttgtcttctttgtatcacaatgggattgttagtgatgaaaattgcaccaggggtgcctgtgttctc

SEQ ID NO: 40140 - protein, 643 aa, Zea mays subsp. mays
  peptide (1)..(643): Ceres Seq. ID no. 12375125
  misc_feature (165)..(588): Pfam Name: Pfam Description:  ThiC family
  misc_feature (15)..(643): NCBI GI NO: 15227584 NR Description: putative thiamin biosynthesis protein
  misc_feature (71)..(617): NCBI GI NO: 15614496 NR Description: thiamin biosynthesis protein [Bacillus halodurans]
  misc_feature (186)..(614): NCBI GI NO: 15600166 NR Description: thiamin biosynthesis protein ThiC
  misc_feature (155)..(194): NCBI GI NO: 15600166 NR Description: thiamin biosynthesis protein ThiC
  misc_feature (82)..(615): NCBI GI NO: 16077944 NR Description: thiA [Bacillus subtilis]
  misc_feature (142)..(616): NCBI GI NO: 16762293 NR Description: thiamine biosynthesis protein
  misc_feature (77)..(199): NCBI GI NO: 16762293 NR Description: thiamine biosynthesis protein
  misc_feature (186)..(614): NCBI GI NO: 23103985 NR Description: hypothetical protein [Azotobacter vinelandii]
  misc_feature (155)..(188): NCBI GI NO: 23103985 NR Description: hypothetical protein [Azotobacter vinelandii]
  misc_feature (186)..(614): NCBI GI NO: 26991600 NR Description: thiamin biosynthesis protein ThiC
MAALQPSFSPAMTLKSSCSALKFPKTALLSGFGGIPRLQDAQDRNTSVAYLIPKAASVTDQSIAEPPKTKQNRHTVDPTAPEFLPLPSFEECFPRSTKESSEIIHEESGHVLKVPFRRVHLTGDQKHFDTYDTSGPQNISPRIGLPKIRKEWIDRREKLGSPRYTQMYYAKQGIVTEEMLYCASRENLSPEFVRTEVARGRAIIPSNKRHLELEPMIVGRNFLVKVNANIGNSAVVSSIEEEVHKLQWATMWGADTVMDLSTGRHIHETREWIIRNSPVPIGTVPIYQALEKVNGIAENLSWEIFRDTLIEQAEQGVDYFTIHAGVLLRYIPLTAKRMTGIVSRGGSIHAKWCLTYHKENFAYEHWDDILDICNQYDVALSIGDGLRPGSIYDANDSAQFAELLTQGELTRRAWAKDVQVMNEGPGHIPMHKIPENMEKQLEWCNEAPFYTLGPLTTDIAPGYDHITSAIGAANIGALGTALLCYVTPKEHLGLPNRDDVKTGVISYKISAHAADLAKGHPYAQAWDDALSKARFEFRWLDQFALSLDPVTAMAFHDETLPSEGAKVAHFCSMCGPKFCSMKITEDIRKYADENGYGTVEEAVIQGMNAMSAEFLAARKTISGEQHGEAGGEIYVPESYAAQK

SEQ ID NO: 40141 - protein, 632 aa, Zea mays subsp. mays
  peptide (1)..(632): Ceres Seq. ID no. 12375126
  misc_feature (154)..(577): Pfam Name: Pfam Description:  ThiC family
  misc_feature (4)..(632): NCBI GI NO: 15227584 NR Description: putative thiamin biosynthesis protein
  misc_feature (60)..(606): NCBI GI NO: 15614496 NR Description: thiamin biosynthesis protein [Bacillus halodurans]
  misc_feature (175)..(603): NCBI GI NO: 15600166 NR Description: thiamin biosynthesis protein ThiC
  misc_feature (144)..(183): NCBI GI NO: 15600166 NR Description: thiamin biosynthesis protein ThiC
  misc_feature (71)..(604): NCBI GI NO: 16077944 NR Description: thiA [Bacillus subtilis]
  misc_feature (131)..(605): NCBI GI NO: 16762293 NR Description: thiamine biosynthesis protein
  misc_feature (66)..(188): NCBI GI NO: 16762293 NR Description: thiamine biosynthesis protein
  misc_feature (175)..(603): NCBI GI NO: 23103985 NR Description: hypothetical protein [Azotobacter vinelandii]
  misc_feature (144)..(177): NCBI GI NO: 23103985 NR Description: hypothetical protein [Azotobacter vinelandii]
  misc_feature (175)..(603): NCBI GI NO: 26991600 NR Description: thiamin biosynthesis protein ThiC
MTLKSSCSALKFPKTALLSGFGGIPRLQDAQDRNTSVAYLIPKAASVTDQSIAEPPKTKQNRHTVDPTAPEFLPLPSFEECFPRSTKESSEIIHEESGHVLKVPFRRVHLTGDQKHFDTYDTSGPQNISPRIGLPKIRKEWIDRREKLGSPRYTQMYYAKQGIVTEEMLYCASRENLSPEFVRTEVARGRAIIPSNKRHLELEPMIVGRNFLVKVNANIGNSAVVSSIEEEVHKLQWATMWGADTVMDLSTGRHIHETREWIIRNSPVPIGTVPIYQALEKVNGIAENLSWEIFRDTLIEQAEQGVDYFTIHAGVLLRYIPLTAKRMTGIVSRGGSIHAKWCLTYHKENFAYEHWDDILDICNQYDVALSIGDGLRPGSIYDANDSAQFAELLTQGELTRRAWAKDVQVMNEGPGHIPMHKIPENMEKQLEWCNEAPFYTLGPLTTDIAPGYDHITSAIGAANIGALGTALLCYVTPKEHLGLPNRDDVKTGVISYKISAHAADLAKGHPYAQAWDDALSKARFEFRWLDQFALSLDPVTAMAFHDETLPSEGAKVAHFCSMCGPKFCSMKITEDIRKYADENGYGTVEEAVIQGMNAMSAEFLAARKTISGEQHGEAGGEIYVPESYAAQK

SEQ ID NO: 40142 - protein, 477 aa, Zea mays subsp. mays
  peptide (1)..(477): Ceres Seq. ID no. 12375127
  misc_feature (1)..(422): Pfam Name: Pfam Description:  ThiC family
  misc_feature (1)..(477): NCBI GI NO: 15227584 NR Description: putative thiamin biosynthesis protein
  misc_feature (1)..(451): NCBI GI NO: 15614496 NR Description: thiamin biosynthesis protein [Bacillus halodurans]
  misc_feature (20)..(448): NCBI GI NO: 15600166 NR Description: thiamin biosynthesis protein ThiC
  misc_feature (1)..(28): NCBI GI NO: 15600166 NR Description: thiamin biosynthesis protein ThiC
  misc_feature (1)..(449): NCBI GI NO: 16077944 NR Description: thiA [Bacillus subtilis]
  misc_feature (1)..(450): NCBI GI NO: 16762293 NR Description: thiamine biosynthesis protein
  misc_feature (1)..(33): NCBI GI NO: 16762293 NR Description: thiamine biosynthesis protein
  misc_feature (20)..(448): NCBI GI NO: 23103985 NR Description: hypothetical protein [Azotobacter vinelandii]
  misc_feature (1)..(22): NCBI GI NO: 23103985 NR Description: hypothetical protein [Azotobacter vinelandii]
  misc_feature (20)..(448): NCBI GI NO: 26991600 NR Description: thiamin biosynthesis protein ThiC
MYYAKQGIVTEEMLYCASRENLSPEFVRTEVARGRAIIPSNKRHLELEPMIVGRNFLVKVNANIGNSAVVSSIEEEVHKLQWATMWGADTVMDLSTGRHIHETREWIIRNSPVPIGTVPIYQALEKVNGIAENLSWEIFRDTLIEQAEQGVDYFTIHAGVLLRYIPLTAKRMTGIVSRGGSIHAKWCLTYHKENFAYEHWDDILDICNQYDVALSIGDGLRPGSIYDANDSAQFAELLTQGELTRRAWAKDVQVMNEGPGHIPMHKIPENMEKQLEWCNEAPFYTLGPLTTDIAPGYDHITSAIGAANIGALGTALLCYVTPKEHLGLPNRDDVKTGVISYKISAHAADLAKGHPYAQAWDDALSKARFEFRWLDQFALSLDPVTAMAFHDETLPSEGAKVAHFCSMCGPKFCSMKITEDIRKYADENGYGTVEEAVIQGMNAMSAEFLAARKTISGEQHGEAGGEIYVPESYAAQK

SEQ ID NO: 40143 - DNA, 2341 bp, Zea mays subsp. mays
  misc_feature (1)..(2341): Ceres Seq. ID no. 12375114
gcacgagaccattacctagaacatcctaatcaaaaagaacgacggtccaaaattttccctacccaaccccctctacccatcctgtcccgttccgctccgccgccgccgtcgaccgcacgagatgccgccggccgaggacgccccaccgcagaccccccctcccgcgcgctggacggcggccgggtcgcgggtgctgctgcagtctccgcctccagcgttcccgctcggatccaatgatgaccagcaagaacgcgcccgcgcccgcgcggcggcgcgtgccgcctccgtccgccgccgatccctcgccgcctccattgcgccctccaaggacccgcgccacgacctcctcaaccgcgagcaggtcatggacctcttccataactgtatcaagctcgcatcggagaacaaaattaaccagaagaacacgtgggagctaggcctaatcgatcatctcagcgagatcatccaagcgggggtggacgaggacgaggagaccaactttcagaaggcaagctgcacactggaggcgggggtcaagatatattcacttcgtgtggattcagtgcactccgaggcttacaaggtgcttggtgggataaaccgtgccggaaggggtgaagaggctgatttggaggaaggcagcaatgttgaacctgcacaggatgaagcaatcaataaaaaggatgctgataggaggatttcacctgcttcaacgttggagtcgtcatttgaggctctcaatgtaaagaaatttgatgttgctttcacggtggatcctctataccatcaaactaccgctcagtttgatgaaggtggggcaaagggccttttgttgtataaccttggagtttatggtagctgccgtgtgctgttcgattcatttgaagctccagacaaatgcatcttaagtgatatgcaaactgagcaggctgagacaattgacctttcatttgctaaagagcaaattgaggaaatggtcactcaaatgcgtctatgtaatgatatttctccaaccctgagggatattgttgctcaatttgatgaagaaaaccaaaggccatcacataggttatctcctggtcaaatgccagtaatggaagatcagatggatgatggtaatgaagcagacgataacgatagcatgctacctgattctggaacttgggattttggtgattgtcatgaccatgaggatacatatgatcaaaactgtaatccaatggattccatctcaacaaactttcaagaggaattcaatgaatacactgttgagattcctcagggtactattgtaaacgatagagttgacaaaattgcatctcttgtgttacttggcatggcctcatcaaaagcaaatgcttgggcaggacctgagcactggaaatatcggaaagctaaagatttggaggctgctccaacttcatcaggtgattcagaaataacaaataagataaagaaaagaaccaaggataaacctgacattggtttcacaaaagcattggacaatgagcttccaaatatcttcgcggctcccaaaaatccaaagacattactgtttcctgcaaacagggctatttgcagcaataaacttccagaagattgccattaccggcctgaaagccttgttaaattatttcttctcccagatgttttgtgtcttgctaagagaagaaaatcacttgatgctccagtggataataatgatgactttatcccatctgaaccttgggaagatgacaacttttgcaatgaccacattgatgaaggacatgtgtgtagtgatgtagaagagccagtaaatcttatcaataaaccgagacaggtcaacaagattgatatacagtatgacaaggtatcaaaacaagtggatgttcatgctttaaaagaagtgctttggaatcacatccatgcatctgctgagactggtcaggaaagagaggaacctggaccaccgctgcgcctatctcaggtgttacatgaccttccaagcagcagcccagatgctgtagcaactgatatttcgccacacctgtatttcatctgccttctgcatctggcaaatgagcacaacttgaagctctgtgatcgccccatgttggatgaaatagacatatacatgccgccgacttcaccgcttgtgaagtgaaccatgctgtaccggagatgctagtcttttttattttgtttattgttgaccggcctaaaccaacgccatgattattgggtagtgatctctgattgttgctaaggtgcccgtcgtgacatgctcagctcactgatgtaacttgaaaaatgaaacttcatatattttttaaagtagtgatgctcggaacgatactgc

SEQ ID NO: 40144 - protein, 674 aa, Zea mays subsp. mays
  peptide (1)..(674): Ceres Seq. ID no. 12375115
  misc_feature (7)..(667): Pfam Name: Pfam Description:  Barren protein
  misc_feature (1)..(674): NCBI GI NO: 34913488 NR Description: putative condensin complex subunit
  misc_feature (11)..(377): NCBI GI NO: 15225709 NR Description: hypothetical protein; protein id: At2g32590.1
  misc_feature (149)..(666): NCBI GI NO: 15225709 NR Description: hypothetical protein; protein id: At2g32590.1
  misc_feature (1)..(604): NCBI GI NO: 30172764 NR Description: Condensin subunit 2
  misc_feature (560)..(664): NCBI GI NO: 30172764 NR Description: Condensin subunit 2
  misc_feature (7)..(664): NCBI GI NO: 33417152 NR Description: Unknown (protein for MGC:69107) [Xenopus laevis]
  misc_feature (3)..(589): NCBI GI NO: 21450193 NR Description: RIKEN cDNA A730011O11
  misc_feature (543)..(653): NCBI GI NO: 21450193 NR Description: RIKEN cDNA A730011O11
  misc_feature (3)..(589): NCBI GI NO: 30172806 NR Description: Condensin subunit 2
  misc_feature (543)..(653): NCBI GI NO: 30172806 NR Description: Condensin subunit 2
MPPAEDAPPQTPPPARWTAAGSRVLLQSPPPAFPLGSNDDQQERARARAAARAASVRRRSLAASIAPSKDPRHDLLNREQVMDLFHNCIKLASENKINQKNTWELGLIDHLSEIIQAGVDEDEETNFQKASCTLEAGVKIYSLRVDSVHSEAYKVLGGINRAGRGEEADLEEGSNVEPAQDEAINKKDADRRISPASTLESSFEALNVKKFDVAFTVDPLYHQTTAQFDEGGAKGLLLYNLGVYGSCRVLFDSFEAPDKCILSDMQTEQAETIDLSFAKEQIEEMVTQMRLCNDISPTLRDIVAQFDEENQRPSHRLSPGQMPVMEDQMDDGNEADDNDSMLPDSGTWDFGDCHDHEDTYDQNCNPMDSISTNFQEEFNEYTVEIPQGTIVNDRVDKIASLVLLGMASSKANAWAGPEHWKYRKAKDLEAAPTSSGDSEITNKIKKRTKDKPDIGFTKALDNELPNIFAAPKNPKTLLFPANRAICSNKLPEDCHYRPESLVKLFLLPDVLCLAKRRKSLDAPVDNNDDFIPSEPWEDDNFCNDHIDEGHVCSDVEEPVNLINKPRQVNKIDIQYDKVSKQVDVHALKEVLWNHIHASAETGQEREEPGPPLRLSQVLHDLPSSSPDAVATDISPHLYFICLLHLANEHNLKLCDRPMLDEIDIYMPPTSPLVK

SEQ ID NO: 40145 - protein, 593 aa, Zea mays subsp. mays
  peptide (1)..(593): Ceres Seq. ID no. 12375116
  misc_feature (1)..(586): Pfam Name: Pfam Description:  Barren protein
  misc_feature (1)..(593): NCBI GI NO: 34913488 NR Description: putative condensin complex subunit
  misc_feature (1)..(296): NCBI GI NO: 15225709 NR Description: hypothetical protein; protein id: At2g32590.1
  misc_feature (68)..(585): NCBI GI NO: 15225709 NR Description: hypothetical protein; protein id: At2g32590.1
  misc_feature (1)..(523): NCBI GI NO: 30172764 NR Description: Condensin subunit 2
  misc_feature (479)..(583): NCBI GI NO: 30172764 NR Description: Condensin subunit 2
  misc_feature (1)..(583): NCBI GI NO: 33417152 NR Description: Unknown (protein for MGC:69107) [Xenopus laevis]
  misc_feature (1)..(508): NCBI GI NO: 21450193 NR Description: RIKEN cDNA A730011O11
  misc_feature (462)..(572): NCBI GI NO: 21450193 NR Description: RIKEN cDNA A730011O11
  misc_feature (1)..(508): NCBI GI NO: 30172806 NR Description: Condensin subunit 2
  misc_feature (462)..(572): NCBI GI NO: 30172806 NR Description: Condensin subunit 2
MDLFHNCIKLASENKINQKNTWELGLIDHLSEIIQAGVDEDEETNFQKASCTLEAGVKIYSLRVDSVHSEAYKVLGGINRAGRGEEADLEEGSNVEPAQDEAINKKDADRRISPASTLESSFEALNVKKFDVAFTVDPLYHQTTAQFDEGGAKGLLLYNLGVYGSCRVLFDSFEAPDKCILSDMQTEQAETIDLSFAKEQIEEMVTQMRLCNDISPTLRDIVAQFDEENQRPSHRLSPGQMPVMEDQMDDGNEADDNDSMLPDSGTWDFGDCHDHEDTYDQNCNPMDSISTNFQEEFNEYTVEIPQGTIVNDRVDKIASLVLLGMASSKANAWAGPEHWKYRKAKDLEAAPTSSGDSEITNKIKKRTKDKPDIGFTKALDNELPNIFAAPKNPKTLLFPANRAICSNKLPEDCHYRPESLVKLFLLPDVLCLAKRRKSLDAPVDNNDDFIPSEPWEDDNFCNDHIDEGHVCSDVEEPVNLINKPRQVNKIDIQYDKVSKQVDVHALKEVLWNHIHASAETGQEREEPGPPLRLSQVLHDLPSSSPDAVATDISPHLYFICLLHLANEHNLKLCDRPMLDEIDIYMPPTSPLVK

SEQ ID NO: 40146 - protein, 410 aa, Zea mays subsp. mays
  peptide (1)..(410): Ceres Seq. ID no. 12375117
  misc_feature (1)..(403): Pfam Name: Pfam Description:  Barren protein
  misc_feature (1)..(410): NCBI GI NO: 34913488 NR Description: putative condensin complex subunit
  misc_feature (1)..(113): NCBI GI NO: 15225709 NR Description: hypothetical protein; protein id: At2g32590.1
  misc_feature (1)..(402): NCBI GI NO: 15225709 NR Description: hypothetical protein; protein id: At2g32590.1
  misc_feature (1)..(340): NCBI GI NO: 30172764 NR Description: Condensin subunit 2
  misc_feature (296)..(400): NCBI GI NO: 30172764 NR Description: Condensin subunit 2
  misc_feature (1)..(400): NCBI GI NO: 33417152 NR Description: Unknown (protein for MGC:69107) [Xenopus laevis]
  misc_feature (1)..(325): NCBI GI NO: 21450193 NR Description: RIKEN cDNA A730011O11
  misc_feature (279)..(389): NCBI GI NO: 21450193 NR Description: RIKEN cDNA A730011O11
  misc_feature (1)..(325): NCBI GI NO: 30172806 NR Description: Condensin subunit 2
  misc_feature (279)..(389): NCBI GI NO: 30172806 NR Description: Condensin subunit 2
MQTEQAETIDLSFAKEQIEEMVTQMRLCNDISPTLRDIVAQFDEENQRPSHRLSPGQMPVMEDQMDDGNEADDNDSMLPDSGTWDFGDCHDHEDTYDQNCNPMDSISTNFQEEFNEYTVEIPQGTIVNDRVDKIASLVLLGMASSKANAWAGPEHWKYRKAKDLEAAPTSSGDSEITNKIKKRTKDKPDIGFTKALDNELPNIFAAPKNPKTLLFPANRAICSNKLPEDCHYRPESLVKLFLLPDVLCLAKRRKSLDAPVDNNDDFIPSEPWEDDNFCNDHIDEGHVCSDVEEPVNLINKPRQVNKIDIQYDKVSKQVDVHALKEVLWNHIHASAETGQEREEPGPPLRLSQVLHDLPSSSPDAVATDISPHLYFICLLHLANEHNLKLCDRPMLDEIDIYMPPTSPLVK

SEQ ID NO: 40147 - DNA, 748 bp, Zea mays subsp. mays
  misc_feature (1)..(748): Ceres Seq. ID no. 12363969
gcacgagaccattacctagaacatcctaatcgaaaactccccaacagtttcattcctcgagggggatcgcttgtcggcggggaagcaaagcttagttcttgacgcccaacctccccgttgcctattcgcctcaggaatttgggaattatgtctctttgaggggaatcaagggacttgcttttacttgtctgggctccatgtctaagtgggagccagtcacgtttcaggaatctcttagctttgttaagaaagtaaaggcacgtgactacatgctatacatatcattgctcgatgtgctcaaccggaatgatcaaatccctctgcaagcttacagcgagctctcgcttctgtttcagcatcacgaagatctgttagcggagctgtcgaagttcaggcccctcccatgcccaaacaacgtttatacacacggctcgatttggatgatcatattcctcatgccttttctgctcctgagccttgtcctcgccttgagaagccattgaagtgtttcctgctccatagactgttgcgagcctaaatgatttgtcgtagcactaacacctagttgttgtatatagatatatggatggggttctatatcctgtaatttctttatgatctccttgtacgctcgtgcgcacggaaataatcgtacaatattatttcagtcgcggcagtctggcagtatgtaaagcctaaacagagatcgtttgacctcgtccaatcggaaattcagctttgtacaggg

SEQ ID NO: 40148 - protein, 101 aa, Zea mays subsp. mays
  peptide (1)..(101): Ceres Seq. ID no. 12363970
  misc_feature (1)..(98): NCBI GI NO: 34894158 NR Description: putative co-repressor protein
MSKWEPVTFQESLSFVKKVKARDYMLYISLLDVLNRNDQIPLQAYSELSLLFQHHEDLLAELSKFRPLPCPNNVYTHGSIWMIIFLMPFLLLSLVLALRSH

SEQ ID NO: 40149 - protein, 77 aa, Zea mays subsp. mays
  peptide (1)..(77): Ceres Seq. ID no. 12363971
  misc_feature (1)..(74): NCBI GI NO: 34894158 NR Description: putative co-repressor protein
MLYISLLDVLNRNDQIPLQAYSELSLLFQHHEDLLAELSKFRPLPCPNNVYTHGSIWMIIFLMPFLLLSLVLALRSH

SEQ ID NO: 40150 - DNA, 779 bp, Zea mays subsp. mays
  misc_feature (1)..(779): Ceres Seq. ID no. 12363972
gcacgagaccattacctagaacatcctaatcaaaagcctttttaccctcgtcctcgtgtgatctaccacttttcttctcgcgtgactctctcacagtctcactcacgcagtcacgcggctcacgccccaccccccaccaggccaccacaccgctctcttcttcaccaccgcgaaagcgagagagggagagagagcaggcagcggcaatggctggcgctggggacgagtactactacggcgggccggggcaggggcaggggccgcgcggcgccccacacggcctgctgctggcggtggtggtgggcctcgtggtggcgggcccgctgtttctgggcgacggcggcgaggcgctgacggaggccgtggcggagctgctgagcccggtcgggctgcttctcctccccgtgtgcctgctgttcctcatccgcctcctctcctccgaccgcggcgccgcggcgctcgccgacgtcttcgccttcggcgggtcccccgacgccgtccaccgcgtcggagggtcccccgtcggcgtcgcgctcatgctcctcctcatcctcgcgctgctctactaccgctcctcgctcttcggcggcggcggcgacgacgacgagtaggagaccggcggcgcgatctccggccgtggcgtggcgttgtttttgtgtaatgcgaggggcgtgggtgcaaaagtgcgtgtgtaaatcgagtggatcggagtaaattaatctaatttactcctttgctaatgcttcgtctgtttgtaaatcgatggctcctgaagctcc

SEQ ID NO: 40151 - protein, 134 aa, Zea mays subsp. mays
  peptide (1)..(134): Ceres Seq. ID no. 12363973
  misc_feature (1)..(134): NCBI GI NO: 22831149 NR Description: hypothetical protein~similar to Arabidopsisthaliana chromosome3
  misc_feature (11)..(133): NCBI GI NO: 18397751 NR Description: expressed protein; protein id: At3g06890
MAGAGDEYYYGGPGQGQGPRGAPHGLLLAVVVGLVVAGPLFLGDGGEALTEAVAELLSPVGLLLLPVCLLFLIRLLSSDRGAAALADVFAFGGSPDAVHRVGGSPVGVALMLLLILALLYYRSSLFGGGGDDDE

SEQ ID NO: 40152 - protein, 117 aa, Zea mays subsp. mays
  peptide (1)..(117): Ceres Seq. ID no. 12363974
ARDHYLEHPNQKPFYPRPRVIYHFSSRVTLSQSHSRSHAAHAPPPTRPPHRSLLHHRESERGRESRQRQWLALGTSTTTAGRGRGRGRAAPHTACCWRWWWASWWRARCFWATAARR

SEQ ID NO: 40153 - DNA, 584 bp, Zea mays subsp. mays
  misc_feature (1)..(584): Ceres Seq. ID no. 12418092
caaaatttcgtgccgttgtctttgtcttttctgccatttctcccgaatgattcttccgtggattggagcagagcactaagctcattgagccaaaatacaaaggaacagctgaggaatgcgtccacctgggtgtacccttcagtcagttttgattctgttcagaaatctgtaaccctcttcatgccaggctttgataagtctgaaatcaagctatatcaatatagaggtggatcagaactgttgatcgaagctggagatcagaggcgcgtcataaaattgccacttacgatgcagggaaaggtccaaggtgccaaattcgttgacaggaacctcgttgttagcatccggtagcagaatcgctggcgccggctgccggctgggattggagcaccccacttcagattggcagtttactgccgactaatgagcaggatcatcgggattgcatgtctgtttctgttcgtagcctgaattttgtggtgctgtttgtttcaactttcagccagagtgaagctgcatagtcctattattttttgaagaggttcgcgatactcgagtaaatagtaaactggcagttttttgcc

SEQ ID NO: 40154 - protein, 116 aa, Zea mays subsp. mays
  peptide (1)..(116): Ceres Seq. ID no. 12418093
  misc_feature (2)..(116): NCBI GI NO: 15222640 NR Description: unknown protein; protein id: At1g26090.1
  misc_feature (2)..(116): NCBI GI NO: 25518771 NR Description: hypothetical protein F14G11
  misc_feature (1)..(114): NCBI GI NO: 23125737 NR Description: hypothetical protein [Nostoc punctiforme]
  misc_feature (3)..(114): NCBI GI NO: 17231973 NR Description: hypothetical protein [Nostoc sp. PCC 7120]
  misc_feature (1)..(114): NCBI GI NO: 22299794 NR Description: ORF_ID:tlr2251~probable anion-transporting ATPase
  misc_feature (48)..(114): NCBI GI NO: 16329406 NR Description: hypothetical protein [Synechocystis sp. PCC 6803]
QNFVPLSLSFLPFLPNDSSVDWSRALSSLSQNTKEQLRNASTWVYPSVSFDSVQKSVTLFMPGFDKSEIKLYQYRGGSELLIEAGDQRRVIKLPLTMQGKVQGAKFVDRNLVVSIR

SEQ ID NO: 40155 - protein, 56 aa, Zea mays subsp. mays
  peptide (1)..(56): Ceres Seq. ID no. 12418094
  misc_feature (1)..(56): NCBI GI NO: 15222640 NR Description: unknown protein; protein id: At1g26090.1
  misc_feature (1)..(56): NCBI GI NO: 25518771 NR Description: hypothetical protein F14G11
  misc_feature (1)..(54): NCBI GI NO: 23125737 NR Description: hypothetical protein [Nostoc punctiforme]
  misc_feature (1)..(54): NCBI GI NO: 17231973 NR Description: hypothetical protein [Nostoc sp. PCC 7120]
  misc_feature (1)..(54): NCBI GI NO: 22299794 NR Description: ORF_ID:tlr2251~probable anion-transporting ATPase
  misc_feature (1)..(54): NCBI GI NO: 16329406 NR Description: hypothetical protein [Synechocystis sp. PCC 6803]
MPGFDKSEIKLYQYRGGSELLIEAGDQRRVIKLPLTMQGKVQGAKFVDRNLVVSIR

SEQ ID NO: 40156 - DNA, 526 bp, Zea mays subsp. mays
  misc_feature (1)..(526): Ceres Seq. ID no. 1983587
gttggacgggtgacccaccggctcgggaacggcaacccaggacggcaggcgcggcgacacatggtcggggtacagggcctggccgtggccgcctcctgctcttcgatctcacgctgcgatggagcggtacgaggtgatcagggacatcggctcgggcaacttcggggtgacaaagctcgtccgggacgtcaggaccaaggagctcttcgccgtcaagttcatcgagagagggcaaaagattgatgagcatgttcagagggagattatgaaccaccggtccctgaagcacccaaacataattagattcaaggaggtcgtgctaactcccacgcatttggcaatagttatggaatatgctgctgggggtgagctatttgaaaggatctgcagtgcggggagatttagtgaggatgaggcaaggttcttcttccagcaactgatttcgggagtgagctattgccattccatgcaagtatgccatagagatctgaaactagaaaacactctcctagattggtagtgtcgc

SEQ ID NO: 40157 - protein, 80 aa, Zea mays subsp. mays
  peptide (1)..(80): Ceres Seq. ID no. 1983588
VGRVTHRLGNGNPGRQARRHMVGVQGLAVAASCSSISRCDGAVRGDQGHRLGQLRGDKARPGRQDQGALRRQVHRERAKD

SEQ ID NO: 40158 - protein, 133 aa, Zea mays subsp. mays
  peptide (1)..(133): Ceres Seq. ID no. 1983589
  misc_feature (4)..(132): Pfam Name: Pfam Description:  Protein kinase domain
  misc_feature (1)..(132): NCBI GI NO: 29164823 NR Description: abcisic acid-inducible protein kinanase
  misc_feature (1)..(132): NCBI GI NO: 34906840 NR Description: putative protein kinase HvPKABA1
  misc_feature (1)..(132): NCBI GI NO: 2055374 NR Description: serine-threonine protein kinase
  misc_feature (1)..(132): NCBI GI NO: 14588571 NR Description: protein kinase HvPKABA1
  misc_feature (1)..(132): NCBI GI NO: 15218270 NR Description: serine-threonine protein kinase, putative
  misc_feature (1)..(132): NCBI GI NO: 21618139 NR Description: serine-threonine protein kinase, putative
  misc_feature (11)..(132): NCBI GI NO: 416564 NR Description: Abcisic acid-inducible protein kinase
  misc_feature (2)..(132): NCBI GI NO: 7446439 NR Description: probable serine/threonine-specific protein kinase
  misc_feature (2)..(132): NCBI GI NO: 18418337 NR Description: protein kinase - like protein
  misc_feature (2)..(132): NCBI GI NO: 15240124 NR Description: protein kinase, 41K (EC 2
MERYEVIRDIGSGNFGVTKLVRDVRTKELFAVKFIERGQKIDEHVQREIMNHRSLKHPNIIRFKEVVLTPTHLAIVMEYAAGGELFERICSAGRFSEDEARFFFQQLISGVSYCHSMQVCHRDLKLENTLLDW

SEQ ID NO: 40159 - protein, 84 aa, Zea mays subsp. mays
  peptide (1)..(84): Ceres Seq. ID no. 1983590
  misc_feature (1)..(83): Pfam Name: Pfam Description:  Protein kinase domain
  misc_feature (1)..(83): NCBI GI NO: 29164823 NR Description: abcisic acid-inducible protein kinanase
  misc_feature (1)..(83): NCBI GI NO: 34906840 NR Description: putative protein kinase HvPKABA1
  misc_feature (1)..(83): NCBI GI NO: 2055374 NR Description: serine-threonine protein kinase
  misc_feature (1)..(83): NCBI GI NO: 14588571 NR Description: protein kinase HvPKABA1
  misc_feature (1)..(83): NCBI GI NO: 15218270 NR Description: serine-threonine protein kinase, putative
  misc_feature (1)..(83): NCBI GI NO: 21618139 NR Description: serine-threonine protein kinase, putative
  misc_feature (1)..(83): NCBI GI NO: 416564 NR Description: Abcisic acid-inducible protein kinase
  misc_feature (1)..(83): NCBI GI NO: 7446439 NR Description: probable serine/threonine-specific protein kinase
  misc_feature (1)..(83): NCBI GI NO: 18418337 NR Description: protein kinase - like protein
  misc_feature (1)..(83): NCBI GI NO: 15240124 NR Description: protein kinase, 41K (EC 2
MNHRSLKHPNIIRFKEVVLTPTHLAIVMEYAAGGELFERICSAGRFSEDEARFFFQQLISGVSYCHSMQVCHRDLKLENTLLDW

SEQ ID NO: 40160 - DNA, 1795 bp, Zea mays subsp. mays
  misc_feature (1)..(1795): Ceres Seq. ID no. 12362950
gcacgagaccattacctagaacatcctaatcgaaaaaggccatcaagacgtagcagctccccttgcgtctgcgcacgccaccgaaggatcctcgccgcgcgtgcagtgcgatccgaggggaggggtccaaggccatgatgaagagcgtcagcggcaccggctcggccgggagccgtagcgatccgggcggcagcggcgagctgtcccgcttctccgtcgccaccacggcgtcgtccgcctcgcagccttccgcgaacggtggcgcgcgcgggatctccttcctcgacgccttccggtcctgcttcgttcccccggaggcgcgctcgccggagaactccatgtccgacgaatcccacccctcccaccaactctcgcagtctttgagctcacaaggttctaacagtgggagcgtgtttgggagcaagcgatcgattaaaggaatgtatagtcccatgcacaggagttctttagatagggagatccctggcagcacaaaattctccttgccacagatccagaaagcaacaaagaacttctcgccaaacttcaagattgggcagggtggttctgggactgtatacaagggtcagcttgctgatggtactcttgtcgctgtcaaacgtgccaagaagaatgtgtatgacaagtatatgggtcgtgagttctggaacgagattgagacattgcaacgcattgagcacctgaatttggttaggttccatgggtacctggagtttggtggcgagcagttgattattgtggagtatgttcccaatgggaatcttcgagagcacctcgactgtataaatggtaaaatattggaattctcactgagattggaaattgcaattgatgtggctcatgctattacatatcttcatacctattcagatcatccagtcatccacagagacatcaaatcctcaaacattcttctaatgaacaattgtcgagccaaggttgctgactttggattcgccaaattggctccaactgattctagtcatatatctactcaagtcaaaggaacagcaggctatctcgatccagaatatctcagaacataccagctcaatgagaagagtgatgtctactcctttggagtccttctggtggagttggttactgggaggcgccctatagagccaaaaaaggcaatcattgagcgtgttaccacaaaatgggcaatggaaaattttgtggagggcaatgctatccaaacactagatccgaatctggaagcgaccgatgcgatcaatctagcggtcgagaagctgtatgagctggctctgcaatgcttagccccaactaagaggaaccgaccgagcatgaagcggtgcgcagagattctgtggagcatccgtaaagattacagggagttggttgtacccacctctgcgatgaactgaagcaggtcgtctggagcagtcaagtgaacaaaaagatgtatcactccagtttgcctctcttgattcgcttcaaagattggtggttgaaatcatccgattgctgggattctttcagttaccgcaagtggtcgtgaacaggactgatggccttcctagatgctttgtttgtgctagaaaccagaaaagtcccttacaggtcttactatgctgtgtgaaagtgttgctgagtaaacatgtacgagtatatatcagatatctaatggtgtgtatatcttgtaggttctcttatacaggtaattgcatcacgcatgaagaaatctagttgtttccattgcatcttttttttttgtctatgatgaacaatattcagcgtatgattagcaagc

SEQ ID NO: 40161 - protein, 424 aa, Zea mays subsp. mays
  peptide (1)..(424): Ceres Seq. ID no. 12362951
  misc_feature (134)..(335): Pfam Name: Pfam Description:  Protein kinase domain
  misc_feature (1)..(424): NCBI GI NO: 27261468 NR Description: Hypothetical protein
  misc_feature (9)..(417): NCBI GI NO: 22328175 NR Description: coded for by A
  misc_feature (31)..(424): NCBI GI NO: 9759225 NR Description: contains similarity to proteinkinase~gene_id:K19M22
  misc_feature (126)..(414): NCBI GI NO: 34908354 NR Description: P0529H11.30
  misc_feature (59)..(424): NCBI GI NO: 15237782 NR Description: receptor-like protein kinase precursor - like
  misc_feature (110)..(413): NCBI GI NO: 38345153 NR Description: OSJNBa0014K14.7
  misc_feature (56)..(413): NCBI GI NO: 18397027 NR Description: putative protein kinase; protein id: At2g11520
  misc_feature (118)..(413): NCBI GI NO: 25287604 NR Description: probable protein kinase
  misc_feature (96)..(422): NCBI GI NO: 34897358 NR Description: putative receptor kinase [Oryza sativa]
  misc_feature (226)..(417): NCBI GI NO: 7434312 NR Description: receptor-like protein kinase 5 homolog A_IG005I10
MMKSVSGTGSAGSRSDPGGSGELSRFSVATTASSASQPSANGGARGISFLDAFRSCFVPPEARSPENSMSDESHPSHQLSQSLSSQGSNSGSVFGSKRSIKGMYSPMHRSSLDREIPGSTKFSLPQIQKATKNFSPNFKIGQGGSGTVYKGQLADGTLVAVKRAKKNVYDKYMGREFWNEIETLQRIEHLNLVRFHGYLEFGGEQLIIVEYVPNGNLREHLDCINGKILEFSLRLEIAIDVAHAITYLHTYSDHPVIHRDIKSSNILLMNNCRAKVADFGFAKLAPTDSSHISTQVKGTAGYLDPEYLRTYQLNEKSDVYSFGVLLVELVTGRRPIEPKKAIIERVTTKWAMENFVEGNAIQTLDPNLEATDAINLAVEKLYELALQCLAPTKRNRPSMKRCAEILWSIRKDYRELVVPTSAMN

SEQ ID NO: 40162 - protein, 423 aa, Zea mays subsp. mays
  peptide (1)..(423): Ceres Seq. ID no. 12362952
  misc_feature (133)..(334): Pfam Name: Pfam Description:  Protein kinase domain
  misc_feature (1)..(423): NCBI GI NO: 27261468 NR Description: Hypothetical protein
  misc_feature (8)..(416): NCBI GI NO: 22328175 NR Description: coded for by A
  misc_feature (30)..(423): NCBI GI NO: 9759225 NR Description: contains similarity to proteinkinase~gene_id:K19M22
  misc_feature (125)..(413): NCBI GI NO: 34908354 NR Description: P0529H11.30
  misc_feature (58)..(423): NCBI GI NO: 15237782 NR Description: receptor-like protein kinase precursor - like
  misc_feature (109)..(412): NCBI GI NO: 38345153 NR Description: OSJNBa0014K14.7
  misc_feature (55)..(412): NCBI GI NO: 18397027 NR Description: putative protein kinase; protein id: At2g11520
  misc_feature (117)..(412): NCBI GI NO: 25287604 NR Description: probable protein kinase
  misc_feature (95)..(421): NCBI GI NO: 34897358 NR Description: putative receptor kinase [Oryza sativa]
  misc_feature (225)..(416): NCBI GI NO: 7434312 NR Description: receptor-like protein kinase 5 homolog A_IG005I10
MKSVSGTGSAGSRSDPGGSGELSRFSVATTASSASQPSANGGARGISFLDAFRSCFVPPEARSPENSMSDESHPSHQLSQSLSSQGSNSGSVFGSKRSIKGMYSPMHRSSLDREIPGSTKFSLPQIQKATKNFSPNFKIGQGGSGTVYKGQLADGTLVAVKRAKKNVYDKYMGREFWNEIETLQRIEHLNLVRFHGYLEFGGEQLIIVEYVPNGNLREHLDCINGKILEFSLRLEIAIDVAHAITYLHTYSDHPVIHRDIKSSNILLMNNCRAKVADFGFAKLAPTDSSHISTQVKGTAGYLDPEYLRTYQLNEKSDVYSFGVLLVELVTGRRPIEPKKAIIERVTTKWAMENFVEGNAIQTLDPNLEATDAINLAVEKLYELALQCLAPTKRNRPSMKRCAEILWSIRKDYRELVVPTSAMN

SEQ ID NO: 40163 - protein, 356 aa, Zea mays subsp. mays
  peptide (1)..(356): Ceres Seq. ID no. 12362953
  misc_feature (66)..(267): Pfam Name: Pfam Description:  Protein kinase domain
  misc_feature (1)..(356): NCBI GI NO: 27261468 NR Description: Hypothetical protein
  misc_feature (1)..(349): NCBI GI NO: 22328175 NR Description: coded for by A
  misc_feature (1)..(356): NCBI GI NO: 9759225 NR Description: contains similarity to proteinkinase~gene_id:K19M22
  misc_feature (58)..(346): NCBI GI NO: 34908354 NR Description: P0529H11.30
  misc_feature (1)..(356): NCBI GI NO: 15237782 NR Description: receptor-like protein kinase precursor - like
  misc_feature (42)..(345): NCBI GI NO: 38345153 NR Description: OSJNBa0014K14.7
  misc_feature (1)..(345): NCBI GI NO: 18397027 NR Description: putative protein kinase; protein id: At2g11520
  misc_feature (50)..(345): NCBI GI NO: 25287604 NR Description: probable protein kinase
  misc_feature (28)..(354): NCBI GI NO: 34897358 NR Description: putative receptor kinase [Oryza sativa]
  misc_feature (158)..(349): NCBI GI NO: 7434312 NR Description: receptor-like protein kinase 5 homolog A_IG005I10
MSDESHPSHQLSQSLSSQGSNSGSVFGSKRSIKGMYSPMHRSSLDREIPGSTKFSLPQIQKATKNFSPNFKIGQGGSGTVYKGQLADGTLVAVKRAKKNVYDKYMGREFWNEIETLQRIEHLNLVRFHGYLEFGGEQLIIVEYVPNGNLREHLDCINGKILEFSLRLEIAIDVAHAITYLHTYSDHPVIHRDIKSSNILLMNNCRAKVADFGFAKLAPTDSSHISTQVKGTAGYLDPEYLRTYQLNEKSDVYSFGVLLVELVTGRRPIEPKKAIIERVTTKWAMENFVEGNAIQTLDPNLEATDAINLAVEKLYELALQCLAPTKRNRPSMKRCAEILWSIRKDYRELVVPTSAMN

SEQ ID NO: 40164 - DNA, 894 bp, Zea mays subsp. mays
  misc_feature (1)..(894): Ceres Seq. ID no. 12359615
  misc_feature (538)..(538): n is a, c, t, g, unknown, or other
  misc_feature (535)..(535): n is a, c, t, g, unknown, or other
  misc_feature (521)..(521): n is a, c, t, g, unknown, or other
  misc_feature (587)..(587): n is a, c, t, g, unknown, or other
  misc_feature (589)..(589): n is a, c, t, g, unknown, or other
  misc_feature (802)..(802): n is a, c, t, g, unknown, or other
  misc_feature (536)..(536): n is a, c, t, g, unknown, or other
  misc_feature (510)..(510): n is a, c, t, g, unknown, or other
  misc_feature (528)..(528): n is a, c, t, g, unknown, or other
  misc_feature (529)..(529): n is a, c, t, g, unknown, or other
  misc_feature (539)..(539): n is a, c, t, g, unknown, or other
  misc_feature (550)..(550): n is a, c, t, g, unknown, or other
acgaagcggatgacggcaggcgcgccccgtctcctcctcgtgacgtctttgaccatgacaagtgcgggtacctcggctggctggacaccaagccggccaattcggtggtgtacatctccttcggcagctcgtcggttatgtgcaaggaccaggtcgcggagatcaccgacgccatggcgcaggtgaagaggccgttcctcttggtcctgaggaaggacaaccgcaagggccacgacgacgacgcggcggcggcggccgatgcggacagcgccggcgggatggtgctggagtggtgcgaccaggcgcgcgtgctgtcgcacccggcggtcgcatgcttcgtgacgcattgcgggtggaactcgaccctggagagcgcggcgtgcggcgtgccgaccgtcgcggttccgcggtactcggaccagggcacggccgcgtggctcgtggcggagcggatgggcaccggcgtccgcgcggcggcgcgcgcggacggcgtcgtggaggcccaggagntgaggcggtgngtggagnnccgcgnngnngggggcggtgncggcgcgcgccgcggcgtggaagcggaatgcgtgggntnccgtggccgacggcgggagctcgcaccagaacctgacggggttcctgaggcagatcgcccacggccgcggcgactaaaccggagacgacgtcgtattgtattgtatcacctcgttgtggtggcgttgcagccagctgccagcgtgcatttctagcgaaaccatggatacagttgattgcaatttgagcgaggacgcaatccatgtctggtttntgaagtctggcaacgtattcccttcggctcgacgtccatctgaatatctgatggttccaacttccaaaaccaaaagtgctcgcctgtgcctt

SEQ ID NO: 40165 - protein, 246 aa, Zea mays subsp. mays
  peptide (1)..(246): Ceres Seq. ID no. 12359616
  misc_feature (14)..(175): Pfam Name: Pfam Description:  UDP-glucoronosyl and UDP-glucosyl transferase
  misc_feature (14)..(175): NCBI GI NO: 34906162 NR Description: putative anthocyanin 5-O-glucosyltransferase
  misc_feature (14)..(184): NCBI GI NO: 6683052 NR Description: anthocyanin 5-O-glucosyltransferase
  misc_feature (14)..(184): NCBI GI NO: 14192682 NR Description: cold-induced glucosyl transferase
  misc_feature (14)..(184): NCBI GI NO: 20146093 NR Description: glucosyltransferase NTGT2 [Nicotiana tabacum]
  misc_feature (14)..(181): NCBI GI NO: 4115559 NR Description: UDP-glucose:anthocysnin 5-O-glucosyltransferase
  misc_feature (17)..(198): NCBI GI NO: 34911270 NR Description: limonoid UDP-glucosyltransferase-like protein
  misc_feature (24)..(175): NCBI GI NO: 13236653 NR Description: putative glucosyltransferase [Oryza sativa]
  misc_feature (23)..(175): NCBI GI NO: 2149127 NR Description: UDP-glucose: indole-3-acetate beta-D-glucosyltransferase
  misc_feature (10)..(175): NCBI GI NO: 18390540 NR Description: UDP-glucose transferase
  misc_feature (23)..(175): NCBI GI NO: 7433892 NR Description: hypothetical protein - Arabidopsis thaliana
  misc_feature (170)..(170): Xaa is any aa, unknown or other
  misc_feature (173)..(173): Xaa is any aa, unknown or other
  misc_feature (176)..(176): Xaa is any aa, unknown or other
  misc_feature (178)..(178): Xaa is any aa, unknown or other
  misc_feature (179)..(179): Xaa is any aa, unknown or other
  misc_feature (183)..(183): Xaa is any aa, unknown or other
  misc_feature (195)..(195): Xaa is any aa, unknown or other
  misc_feature (196)..(196): Xaa is any aa, unknown or other
EADDGRRAPSPPRDVFDHDKCGYLGWLDTKPANSVVYISFGSSSVMCKDQVAEITDAMAQVKRPFLLVLRKDNRKGHDDDAAAAADADSAGGMVLEWCDQARVLSHPAVACFVTHCGWNSTLESAACGVPTVAVPRYSDQGTAAWLVAERMGTGVRAAARADGVVEAQEXRRXVEXRXXGGGXGARRGVEAECVXXRGRRRELAPEPDGVPEADRPRPRRLNRRRRRIVLYHLVVVALQPAASVHF

SEQ ID NO: 40166 - protein, 201 aa, Zea mays subsp. mays
  peptide (1)..(201): Ceres Seq. ID no. 12359617
  misc_feature (1)..(130): Pfam Name: Pfam Description:  UDP-glucoronosyl and UDP-glucosyl transferase
  misc_feature (1)..(130): NCBI GI NO: 34906162 NR Description: putative anthocyanin 5-O-glucosyltransferase
  misc_feature (1)..(139): NCBI GI NO: 6683052 NR Description: anthocyanin 5-O-glucosyltransferase
  misc_feature (1)..(139): NCBI GI NO: 14192682 NR Description: cold-induced glucosyl transferase
  misc_feature (1)..(139): NCBI GI NO: 20146093 NR Description: glucosyltransferase NTGT2 [Nicotiana tabacum]
  misc_feature (1)..(136): NCBI GI NO: 4115559 NR Description: UDP-glucose:anthocysnin 5-O-glucosyltransferase
  misc_feature (1)..(153): NCBI GI NO: 34911270 NR Description: limonoid UDP-glucosyltransferase-like protein
  misc_feature (1)..(130): NCBI GI NO: 13236653 NR Description: putative glucosyltransferase [Oryza sativa]
  misc_feature (1)..(130): NCBI GI NO: 2149127 NR Description: UDP-glucose: indole-3-acetate beta-D-glucosyltransferase
  misc_feature (1)..(130): NCBI GI NO: 18390540 NR Description: UDP-glucose transferase
  misc_feature (1)..(130): NCBI GI NO: 7433892 NR Description: hypothetical protein - Arabidopsis thaliana
  misc_feature (125)..(125): Xaa is any aa, unknown or other
  misc_feature (128)..(128): Xaa is any aa, unknown or other
  misc_feature (131)..(131): Xaa is any aa, unknown or other
  misc_feature (133)..(133): Xaa is any aa, unknown or other
  misc_feature (134)..(134): Xaa is any aa, unknown or other
  misc_feature (138)..(138): Xaa is any aa, unknown or other
  misc_feature (150)..(150): Xaa is any aa, unknown or other
  misc_feature (151)..(151): Xaa is any aa, unknown or other
MCKDQVAEITDAMAQVKRPFLLVLRKDNRKGHDDDAAAAADADSAGGMVLEWCDQARVLSHPAVACFVTHCGWNSTLESAACGVPTVAVPRYSDQGTAAWLVAERMGTGVRAAARADGVVEAQEXRRXVEXRXXGGGXGARRGVEAECVXXRGRRRELAPEPDGVPEADRPRPRRLNRRRRRIVLYHLVVVALQPAASVHF

SEQ ID NO: 40167 - protein, 189 aa, Zea mays subsp. mays
  peptide (1)..(189): Ceres Seq. ID no. 12359618
  misc_feature (1)..(118): Pfam Name: Pfam Description:  UDP-glucoronosyl and UDP-glucosyl transferase
  misc_feature (1)..(118): NCBI GI NO: 34906162 NR Description: putative anthocyanin 5-O-glucosyltransferase
  misc_feature (1)..(127): NCBI GI NO: 6683052 NR Description: anthocyanin 5-O-glucosyltransferase
  misc_feature (1)..(127): NCBI GI NO: 14192682 NR Description: cold-induced glucosyl transferase
  misc_feature (1)..(127): NCBI GI NO: 20146093 NR Description: glucosyltransferase NTGT2 [Nicotiana tabacum]
  misc_feature (1)..(124): NCBI GI NO: 4115559 NR Description: UDP-glucose:anthocysnin 5-O-glucosyltransferase
  misc_feature (1)..(141): NCBI GI NO: 34911270 NR Description: limonoid UDP-glucosyltransferase-like protein
  misc_feature (1)..(118): NCBI GI NO: 13236653 NR Description: putative glucosyltransferase [Oryza sativa]
  misc_feature (1)..(118): NCBI GI NO: 2149127 NR Description: UDP-glucose: indole-3-acetate beta-D-glucosyltransferase
  misc_feature (1)..(118): NCBI GI NO: 18390540 NR Description: UDP-glucose transferase
  misc_feature (1)..(118): NCBI GI NO: 7433892 NR Description: hypothetical protein - Arabidopsis thaliana
  misc_feature (113)..(113): Xaa is any aa, unknown or other
  misc_feature (116)..(116): Xaa is any aa, unknown or other
  misc_feature (119)..(119): Xaa is any aa, unknown or other
  misc_feature (121)..(121): Xaa is any aa, unknown or other
  misc_feature (122)..(122): Xaa is any aa, unknown or other
  misc_feature (126)..(126): Xaa is any aa, unknown or other
  misc_feature (138)..(138): Xaa is any aa, unknown or other
  misc_feature (139)..(139): Xaa is any aa, unknown or other
MAQVKRPFLLVLRKDNRKGHDDDAAAAADADSAGGMVLEWCDQARVLSHPAVACFVTHCGWNSTLESAACGVPTVAVPRYSDQGTAAWLVAERMGTGVRAAARADGVVEAQEXRRXVEXRXXGGGXGARRGVEAECVXXRGRRRELAPEPDGVPEADRPRPRRLNRRRRRIVLYHLVVVALQPAASVHF

SEQ ID NO: 40168 - DNA, 497 bp, Zea mays subsp. mays
  misc_feature (1)..(497): Ceres Seq. ID no. 3315326
acggaggtgaggatacacgggtgcggaacgagagctaggcgaacctgtctggtacctcgcggcggagatggacgagaaggcgacgatggagagcaagctgtcctcggcggcggccttcgtggaggggggcgtgcaggacgcctgckacgacgcctgcagcatctgcctcgacgccttctgcgacassaacccctccacgatgaccaagtgcaagcatgactaccatcttcagtgcattcttgaatggtgccagagaagctcccagtgccccatgtgttggcagcatatcagcatgaaagatcctatgagccaagagctactagaggctgttgaacaagagaggaacatccgagctaatccttcacgtaatactgctgttttccaccatcaaatgctgggtgattttgagatccctgtaggtgcagatgatgcagaacttgaagaacgcattattcagcacttggctgccgcagctgcagtgcgtaggtcacaccgtc

SEQ ID NO: 40169 - protein, 143 aa, Zea mays subsp. mays
  peptide (1)..(143): Ceres Seq. ID no. 3315327
  misc_feature (30)..(70): Pfam Name: RING finger Pfam Description: Zinc finger, C3HC4 type
  misc_feature (1)..(142): NCBI GI NO: 27819501 NR Description: putative zinc finger protein
  misc_feature (1)..(142): NCBI GI NO: 32493110 NR Description: putative RING-H2 zinc finger protein
  misc_feature (3)..(141): NCBI GI NO: 18420424 NR Description: Expressed protein; protein id: At5g22000
  misc_feature (3)..(141): NCBI GI NO: 26451710 NR Description: putative RING-H2 finger protein RHF2a
  misc_feature (6)..(141): NCBI GI NO: 30688252 NR Description: zinc finger
  misc_feature (1)..(111): NCBI GI NO: 32400766 NR Description: RING-H2 finger protein [Triticum aestivum]
  misc_feature (9)..(136): NCBI GI NO: 25360953 NR Description: RING-H2 finger protein RHF1a
  misc_feature (9)..(136): NCBI GI NO: 30682750 NR Description: zinc finger
  misc_feature (9)..(136): NCBI GI NO: 26450997 NR Description: putative RING-H2 finger protein RHF1a
  misc_feature (28)..(136): NCBI GI NO: 11358783 NR Description: RING-H2 finger protein RHF1a
  misc_feature (27)..(27): Xaa is any aa, unknown or other
  misc_feature (40)..(40): Xaa is any aa, unknown or other
MDEKATMESKLSSAAAFVEGGVQDACXDACSICLDAFCDXNPSTMTKCKHDYHLQCILEWCQRSSQCPMCWQHISMKDPMSQELLEAVEQERNIRANPSRNTAVFHHQMLGDFEIPVGADDAELEERIIQHLAAAAAVRRSHR

SEQ ID NO: 40170 - protein, 137 aa, Zea mays subsp. mays
  peptide (1)..(137): Ceres Seq. ID no. 3315328
  misc_feature (24)..(64): Pfam Name: RING finger Pfam Description: Zinc finger, C3HC4 type
  misc_feature (1)..(136): NCBI GI NO: 27819501 NR Description: putative zinc finger protein
  misc_feature (1)..(136): NCBI GI NO: 32493110 NR Description: putative RING-H2 zinc finger protein
  misc_feature (1)..(135): NCBI GI NO: 18420424 NR Description: Expressed protein; protein id: At5g22000
  misc_feature (1)..(135): NCBI GI NO: 26451710 NR Description: putative RING-H2 finger protein RHF2a
  misc_feature (1)..(135): NCBI GI NO: 30688252 NR Description: zinc finger
  misc_feature (1)..(105): NCBI GI NO: 32400766 NR Description: RING-H2 finger protein [Triticum aestivum]
  misc_feature (3)..(130): NCBI GI NO: 25360953 NR Description: RING-H2 finger protein RHF1a
  misc_feature (3)..(130): NCBI GI NO: 30682750 NR Description: zinc finger
  misc_feature (3)..(130): NCBI GI NO: 26450997 NR Description: putative RING-H2 finger protein RHF1a
  misc_feature (22)..(130): NCBI GI NO: 11358783 NR Description: RING-H2 finger protein RHF1a
  misc_feature (21)..(21): Xaa is any aa, unknown or other
  misc_feature (34)..(34): Xaa is any aa, unknown or other
MESKLSSAAAFVEGGVQDACXDACSICLDAFCDXNPSTMTKCKHDYHLQCILEWCQRSSQCPMCWQHISMKDPMSQELLEAVEQERNIRANPSRNTAVFHHQMLGDFEIPVGADDAELEERIIQHLAAAAAVRRSHR

SEQ ID NO: 40171 - protein, 99 aa, Zea mays subsp. mays
  peptide (1)..(99): Ceres Seq. ID no. 3315329
  misc_feature (1)..(98): NCBI GI NO: 27819501 NR Description: putative zinc finger protein
  misc_feature (1)..(98): NCBI GI NO: 32493110 NR Description: putative RING-H2 zinc finger protein
  misc_feature (1)..(97): NCBI GI NO: 18420424 NR Description: Expressed protein; protein id: At5g22000
  misc_feature (1)..(97): NCBI GI NO: 26451710 NR Description: putative RING-H2 finger protein RHF2a
  misc_feature (1)..(97): NCBI GI NO: 30688252 NR Description: zinc finger
  misc_feature (1)..(67): NCBI GI NO: 32400766 NR Description: RING-H2 finger protein [Triticum aestivum]
  misc_feature (1)..(92): NCBI GI NO: 25360953 NR Description: RING-H2 finger protein RHF1a
  misc_feature (1)..(92): NCBI GI NO: 30682750 NR Description: zinc finger
  misc_feature (1)..(92): NCBI GI NO: 26450997 NR Description: putative RING-H2 finger protein RHF1a
  misc_feature (1)..(92): NCBI GI NO: 11358783 NR Description: RING-H2 finger protein RHF1a
MTKCKHDYHLQCILEWCQRSSQCPMCWQHISMKDPMSQELLEAVEQERNIRANPSRNTAVFHHQMLGDFEIPVGADDAELEERIIQHLAAAAAVRRSHR

SEQ ID NO: 40172 - DNA, 480 bp, Zea mays subsp. mays
  misc_feature (1)..(480): Ceres Seq. ID no. 4612851
aactttgcttatgatgcagcactggatcaaggacatgaagtacagcaccagggtgaaggatgaggaaggctaccctgccatcgtcctcgtcaacaaagccactggagaggctctcaagcattcccttggccagtcacaccctgttcttctgacccgccataatccagactccctggacgagtctgtcctgtggacaagagcagggacgttggggatgggttccgctgcattaggatggtcaacaacatctacctgaactttgatgctttacatggagacaaggaccatggtggtgtgcgcgacgggacggcccttgtgctgtgggagtggtgcgagggagacaaccagcgctggaagattgttccctggtgaacaaggaaatgtgtgaccgagcccgcaccaaggaggagctcctgccgtaataagtgaagtgattggtactgaagtttctggaaataagaggctcttctgagatgcctg

SEQ ID NO: 40173 - protein, 84 aa, Zea mays subsp. mays
  peptide (1)..(84): Ceres Seq. ID no. 4612852
  misc_feature (6)..(73): NCBI GI NO: 34894060 NR Description: putative r40c1 protein
  misc_feature (6)..(73): NCBI GI NO: 34394516 NR Description: putative r40c1 protein
  misc_feature (6)..(73): NCBI GI NO: 7489573 NR Description: r40g3 protein - rice
  misc_feature (6)..(71): NCBI GI NO: 7489571 NR Description: r40c1 protein - rice
  misc_feature (6)..(71): NCBI GI NO: 34902150 NR Description: Putative r40c1 protein - rice
  misc_feature (6)..(73): NCBI GI NO: 7489571 NR Description: r40c1 protein - rice
  misc_feature (6)..(73): NCBI GI NO: 34902150 NR Description: Putative r40c1 protein - rice
  misc_feature (6)..(73): NCBI GI NO: 34394517 NR Description: r40g2 protein
  misc_feature (6)..(73): NCBI GI NO: 34394518 NR Description: putative r40c2 protein
  misc_feature (6)..(73): NCBI GI NO: 34394517 NR Description: r40g2 protein
TLLMMQHWIKDMKYSTRVKDEEGYPAIVLVNKATGEALKHSLGQSHPVLLTRHNPDSLDESVLWTRAGTLGMGSAALGWSTTST

SEQ ID NO: 40174 - protein, 81 aa, Zea mays subsp. mays
  peptide (1)..(81): Ceres Seq. ID no. 4612853
  misc_feature (3)..(70): NCBI GI NO: 34894060 NR Description: putative r40c1 protein
  misc_feature (3)..(70): NCBI GI NO: 34394516 NR Description: putative r40c1 protein
  misc_feature (3)..(70): NCBI GI NO: 7489573 NR Description: r40g3 protein - rice
  misc_feature (3)..(68): NCBI GI NO: 7489571 NR Description: r40c1 protein - rice
  misc_feature (3)..(68): NCBI GI NO: 34902150 NR Description: Putative r40c1 protein - rice
  misc_feature (3)..(70): NCBI GI NO: 7489571 NR Description: r40c1 protein - rice
  misc_feature (3)..(70): NCBI GI NO: 34902150 NR Description: Putative r40c1 protein - rice
  misc_feature (3)..(70): NCBI GI NO: 34394517 NR Description: r40g2 protein
  misc_feature (3)..(70): NCBI GI NO: 34394518 NR Description: putative r40c2 protein
  misc_feature (3)..(70): NCBI GI NO: 34394517 NR Description: r40g2 protein
MMQHWIKDMKYSTRVKDEEGYPAIVLVNKATGEALKHSLGQSHPVLLTRHNPDSLDESVLWTRAGTLGMGSAALGWSTTST

SEQ ID NO: 40175 - protein, 80 aa, Zea mays subsp. mays
  peptide (1)..(80): Ceres Seq. ID no. 4612854
  misc_feature (2)..(69): NCBI GI NO: 34894060 NR Description: putative r40c1 protein
  misc_feature (2)..(69): NCBI GI NO: 34394516 NR Description: putative r40c1 protein
  misc_feature (2)..(69): NCBI GI NO: 7489573 NR Description: r40g3 protein - rice
  misc_feature (2)..(67): NCBI GI NO: 7489571 NR Description: r40c1 protein - rice
  misc_feature (2)..(67): NCBI GI NO: 34902150 NR Description: Putative r40c1 protein - rice
  misc_feature (2)..(69): NCBI GI NO: 7489571 NR Description: r40c1 protein - rice
  misc_feature (2)..(69): NCBI GI NO: 34902150 NR Description: Putative r40c1 protein - rice
  misc_feature (2)..(69): NCBI GI NO: 34394517 NR Description: r40g2 protein
  misc_feature (2)..(69): NCBI GI NO: 34394518 NR Description: putative r40c2 protein
  misc_feature (2)..(69): NCBI GI NO: 34394517 NR Description: r40g2 protein
MQHWIKDMKYSTRVKDEEGYPAIVLVNKATGEALKHSLGQSHPVLLTRHNPDSLDESVLWTRAGTLGMGSAALGWSTTST

SEQ ID NO: 40176 - DNA, 989 bp, Zea mays subsp. mays
  misc_feature (1)..(989): Ceres Seq. ID no. 12378246
gcacgagaccattacctagaacatcctaatcaaaagtttcggtgcgctaggccgagcgcacgcccctcagcacttgtgtcctcctataagtcgggctcccgccggccatggccatccccggattcggcagctgcgcggacggccggactgcagccggcaggcggaagtgatgggcagcaccgtcgacgacgacgaggcgtgcgagctggtgagcggctcggacctcgtcatcggcgagggcgacgacagcgtcagcgcgtaccttttcaaggccgtcaagaacaacaatggcaccggcatccttctcctctccgacatcttcggcttccaggactccgccacgcgggacttcgcctaccgcgtcgcctgcaatggctacaatgtcctagttccggacttgttccgtgggaacccgtggaagctgaacgtcccgttcgacggcgacagcttcgagcggtggctggcggggcaggccccgggccgggtgtccggcgacatcgacgcgtgcacgaggtggctggtggacgagttcaaggccgcgggggtgtccaagaagctgggcgtgatcgggttctgctacggcggcgggcgcctcgtggagacgctggcgcgcgacgccgagagctgcttcagcgcgggggtctgcttctacgggtcccggatggacgcgtccctgggcgaccgcgtcgcggcgcccgtcctgttcgtgtgcggcgacggcgacccgctgtgccccgtggagacggtgcgggagctggaggggcgcgcgagaggcgcccgggcggcggtgtacgccggcaggggccacgggttcgcgcaccggccgcagtcggtggaggaggacggcgacgccgaggacgcgttcaacgcgatgcgggggtggctgcacgaccacctgctcgcctgatcggacgatcagacgctgtacacgggtttggggttgcaaatcaaggatgctagtaaagagttggagtgaatccctgaaatcg

SEQ ID NO: 40177 - protein, 319 aa, Zea mays subsp. mays
  peptide (1)..(319): Ceres Seq. ID no. 12378247
ARDHYLEHPNQKFRCARPSARPSALVSSYKSGSRRPWPSPDSAAARTAGLQPAGGSDGQHRRRRRGVRAGERLGPRHRRGRRQRQRVPFQGRQEQQWHRHPSPLRHLRLPGLRHAGLRLPRRLQWLQCPSSGLVPWEPVEAERPVRRRQLRAVAGGAGPGPGVRRHRRVHEVAGGRVQGRGGVQEAGRDRVLLRRRAPRGDAGARRRELLQRGGLLLRVPDGRVPGRPRRGARPVRVRRRRPAVPRGDGAGAGGARERRPGGGVRRQGPRVRAPAAVGGGGRRRRGRVQRDAGVAARPPARLIGRSDAVHGFGVANQGC

SEQ ID NO: 40178 - protein, 245 aa, Zea mays subsp. mays
  peptide (1)..(245): Ceres Seq. ID no. 12378248
  misc_feature (28)..(243): Pfam Name: Pfam Description:  Dienelactone hydrolase family
  misc_feature (5)..(244): NCBI GI NO: 18399662 NR Description: expressed protein; protein id: At1g35420
  misc_feature (5)..(244): NCBI GI NO: 21553574 NR Description: unknown [Arabidopsis thaliana]
  misc_feature (26)..(243): NCBI GI NO: 34854915 NR Description: similar to Ab2-225 [Rattus norvegicus]
  misc_feature (26)..(243): NCBI GI NO: 20270371 NR Description: hypothetical protein BC001573 [Homo sapiens]
  misc_feature (26)..(243): NCBI GI NO: 18676733 NR Description: unnamed protein product [Homo sapiens]
  misc_feature (29)..(243): NCBI GI NO: 40253303 NR Description: putative Endo-1,3;1,4-beta-D-glucanase precursor
  misc_feature (8)..(243): NCBI GI NO: 40253306 NR Description: putative Endo-1,3;1,4-beta-D-glucanase precursor
MGSTVDDDEACELVSGSDLVIGEGDDSVSAYLFKAVKNNNGTGILLLSDIFGFQDSATRDFAYRVACNGYNVLVPDLFRGNPWKLNVPFDGDSFERWLAGQAPGRVSGDIDACTRWLVDEFKAAGVSKKLGVIGFCYGGGRLVETLARDAESCFSAGVCFYGSRMDASLGDRVAAPVLFVCGDGDPLCPVETVRELEGRARGARAAVYAGRGHGFAHRPQSVEEDGDAEDAFNAMRGWLHDHLLA

SEQ ID NO: 40179 - DNA, 757 bp, Zea mays subsp. mays
  misc_feature (1)..(757): Ceres Seq. ID no. 12566307
atctcgcaatcgaggcgtttttttctgcttcgtaagttcgtggtcgatccagcgagcgagcgagcagaccggcggctaaccgcggagggagagatggcgcaggggacgctggaggtgcttctcgtcggagccaggggcctcgagaacaccgattacctgagcaacatggacccctacgcgcttctgcaatgtcgctcccacgagcagaagagcagcgtcgcatctggcaaaggctgtgaacctgagtggaacgagaccttcgtgttcaccgtctccgatggcgcagcagagctgttcatcaagctcctggacagtgacggtggcactgatgacgattttgttggtgaggcaacgattcctctggaagcagtttacacggaaggaaacatccctccgactgtttacaatgttgtgaaagacgaagaataccgcggagaaatcaaagttggcctcacgttcactccagaggaccagggcttctgaggaataacttggcgtgtggccgctggaactggaggcagcaggcagtcgtcttatgattcagaagcaaacgacggatcgattcccttgatgtactgcagtccagtgagcgtgcatctacaacttgtagaagaagcctgcaacatgatcacgggatcctgtactgcatcactctaaagcctagctaaaaccaccagctcctgtacttgatgccgggcgggcttgtcatgtactgaaacctacaataacggtcgccgaaccccactctttgatgttc

SEQ ID NO: 40180 - protein, 160 aa, Zea mays subsp. mays
  peptide (1)..(160): Ceres Seq. ID no. 12566308
  misc_feature (37)..(118): Pfam Name: Pfam Description:  C2 domain
  misc_feature (32)..(160): NCBI GI NO: 11358958 NR Description: elicitor-responsive gene 3 [imported] - rice
  misc_feature (32)..(160): NCBI GI NO: 15221718 NR Description: putative elicitor-responsive gene
  misc_feature (32)..(160): NCBI GI NO: 21553977 NR Description: putative elicitor-responsive gene
  misc_feature (32)..(155): NCBI GI NO: 5565983 NR Description: unknown [Zea mays]
  misc_feature (32)..(155): NCBI GI NO: 7489756 NR Description: hypothetical protein - maize
  misc_feature (32)..(155): NCBI GI NO: 38345558 NR Description: OSJNBa0032F06.15
  misc_feature (32)..(156): NCBI GI NO: 3860331 NR Description: hypothetical protein [Cicer arietinum]
  misc_feature (35)..(154): NCBI GI NO: 7489474 NR Description: FIERG2 protein - rice
  misc_feature (35)..(154): NCBI GI NO: 21998841 NR Description: RPP17-1 [Oryza sativa (japonica cultivar-group)]
  misc_feature (35)..(154): NCBI GI NO: 34908176 NR Description: putative FIERG1 protein
ISQSRRFFLLRKFVVDPASERADRRLTAEGEMAQGTLEVLLVGARGLENTDYLSNMDPYALLQCRSHEQKSSVASGKGCEPEWNETFVFTVSDGAAELFIKLLDSDGGTDDDFVGEATIPLEAVYTEGNIPPTVYNVVKDEEYRGEIKVGLTFTPEDQGF

SEQ ID NO: 40181 - protein, 129 aa, Zea mays subsp. mays
  peptide (1)..(129): Ceres Seq. ID no. 12566309
  misc_feature (6)..(87): Pfam Name: Pfam Description:  C2 domain
  misc_feature (1)..(129): NCBI GI NO: 11358958 NR Description: elicitor-responsive gene 3 [imported] - rice
  misc_feature (1)..(129): NCBI GI NO: 15221718 NR Description: putative elicitor-responsive gene
  misc_feature (1)..(129): NCBI GI NO: 21553977 NR Description: putative elicitor-responsive gene
  misc_feature (1)..(124): NCBI GI NO: 5565983 NR Description: unknown [Zea mays]
  misc_feature (1)..(124): NCBI GI NO: 7489756 NR Description: hypothetical protein - maize
  misc_feature (1)..(124): NCBI GI NO: 38345558 NR Description: OSJNBa0032F06.15
  misc_feature (1)..(125): NCBI GI NO: 3860331 NR Description: hypothetical protein [Cicer arietinum]
  misc_feature (4)..(123): NCBI GI NO: 7489474 NR Description: FIERG2 protein - rice
  misc_feature (4)..(123): NCBI GI NO: 21998841 NR Description: RPP17-1 [Oryza sativa (japonica cultivar-group)]
  misc_feature (4)..(123): NCBI GI NO: 34908176 NR Description: putative FIERG1 protein
MAQGTLEVLLVGARGLENTDYLSNMDPYALLQCRSHEQKSSVASGKGCEPEWNETFVFTVSDGAAELFIKLLDSDGGTDDDFVGEATIPLEAVYTEGNIPPTVYNVVKDEEYRGEIKVGLTFTPEDQGF

SEQ ID NO: 40182 - protein, 105 aa, Zea mays subsp. mays
  peptide (1)..(105): Ceres Seq. ID no. 12566310
  misc_feature (1)..(63): Pfam Name: Pfam Description:  C2 domain
  misc_feature (1)..(105): NCBI GI NO: 11358958 NR Description: elicitor-responsive gene 3 [imported] - rice
  misc_feature (1)..(105): NCBI GI NO: 15221718 NR Description: putative elicitor-responsive gene
  misc_feature (1)..(105): NCBI GI NO: 21553977 NR Description: putative elicitor-responsive gene
  misc_feature (1)..(100): NCBI GI NO: 5565983 NR Description: unknown [Zea mays]
  misc_feature (1)..(100): NCBI GI NO: 7489756 NR Description: hypothetical protein - maize
  misc_feature (1)..(100): NCBI GI NO: 38345558 NR Description: OSJNBa0032F06.15
  misc_feature (1)..(101): NCBI GI NO: 3860331 NR Description: hypothetical protein [Cicer arietinum]
  misc_feature (1)..(99): NCBI GI NO: 7489474 NR Description: FIERG2 protein - rice
  misc_feature (1)..(99): NCBI GI NO: 21998841 NR Description: RPP17-1 [Oryza sativa (japonica cultivar-group)]
  misc_feature (1)..(99): NCBI GI NO: 34908176 NR Description: putative FIERG1 protein
MDPYALLQCRSHEQKSSVASGKGCEPEWNETFVFTVSDGAAELFIKLLDSDGGTDDDFVGEATIPLEAVYTEGNIPPTVYNVVKDEEYRGEIKVGLTFTPEDQGF

SEQ ID NO: 40183 - DNA, 513 bp, Zea mays subsp. mays
  misc_feature (1)..(513): Ceres Seq. ID no. 12566894
cagcaagacacagtgtatgttgctggcctccagatggagctccagcaagcacgtgataggataagtgagctggaagtggagcggcggtcggctaggaagaagcttgatcacttgttcaagaaacttgcagaggagaaagcagcttggagaaacagagagcatgaaaaggtgcgtgctatcctcgaagatatgaaggcagaccttgaccatgagaagaaaaacaggaggcggctggagatgattaacttgaaactcgtcaatgagctgaaggaggccaagatgtcagcaaaacagctgttacaagagtatgagacagagaggaaggcgcgtgagctcaccgaggaggtatgcaacgagctagcaagagaggtgggggaagacaaagctgagattgaggccttgaaacgtgactccctgaggttgcgagaggaggtagacgaggaacggaagatgctccagatggctgaggtgtggccgtgaaacttttaatcaaatcagttcactcttttgcct

SEQ ID NO: 40184 - protein, 159 aa, Zea mays subsp. mays
  peptide (1)..(159): Ceres Seq. ID no. 12566895
  misc_feature (7)..(147): Pfam Name: Pfam Description:  Myosin tail
  misc_feature (1)..(158): NCBI GI NO: 38344183 NR Description: OSJNBa0053K19.22
  misc_feature (1)..(158): NCBI GI NO: 40253811 NR Description: hypothetical protein
  misc_feature (7)..(158): NCBI GI NO: 15223613 NR Description: unknown protein; protein id: At1g50660.1
  misc_feature (3)..(158): NCBI GI NO: 9294553 NR Description: gb|AAF00675
  misc_feature (3)..(158): NCBI GI NO: 15231114 NR Description: unknown protein; protein id: At3g20350.1
  misc_feature (40)..(158): NCBI GI NO: 29367527 NR Description: unknown [Oryza sativa (japonica cultivar-group)]
  misc_feature (7)..(156): NCBI GI NO: 15724288 NR Description: AT3g11590/F24K9_26 [Arabidopsis thaliana]
  misc_feature (7)..(156): NCBI GI NO: 18399293 NR Description: expressed protein; protein id: At3g11590
  misc_feature (4)..(158): NCBI GI NO: 38346645 NR Description: OSJNBa0072D21.15
  misc_feature (25)..(158): NCBI GI NO: 34394172 NR Description: hypothetical protein
QQDTVYVAGLQMELQQARDRISELEVERRSARKKLDHLFKKLAEEKAAWRNREHEKVRAILEDMKADLDHEKKNRRRLEMINLKLVNELKEAKMSAKQLLQEYETERKARELTEEVCNELAREVGEDKAEIEALKRDSLRLREEVDEERKMLQMAEVWP

SEQ ID NO: 40185 - protein, 148 aa, Zea mays subsp. mays
  peptide (1)..(148): Ceres Seq. ID no. 12566896
  misc_feature (1)..(136): Pfam Name: Pfam Description:  Myosin tail
  misc_feature (1)..(147): NCBI GI NO: 38344183 NR Description: OSJNBa0053K19.22
  misc_feature (1)..(147): NCBI GI NO: 40253811 NR Description: hypothetical protein
  misc_feature (1)..(147): NCBI GI NO: 15223613 NR Description: unknown protein; protein id: At1g50660.1
  misc_feature (1)..(147): NCBI GI NO: 9294553 NR Description: gb|AAF00675
  misc_feature (1)..(147): NCBI GI NO: 15231114 NR Description: unknown protein; protein id: At3g20350.1
  misc_feature (29)..(147): NCBI GI NO: 29367527 NR Description: unknown [Oryza sativa (japonica cultivar-group)]
  misc_feature (1)..(145): NCBI GI NO: 15724288 NR Description: AT3g11590/F24K9_26 [Arabidopsis thaliana]
  misc_feature (1)..(145): NCBI GI NO: 18399293 NR Description: expressed protein; protein id: At3g11590
  misc_feature (1)..(147): NCBI GI NO: 38346645 NR Description: OSJNBa0072D21.15
  misc_feature (14)..(147): NCBI GI NO: 34394172 NR Description: hypothetical protein
MELQQARDRISELEVERRSARKKLDHLFKKLAEEKAAWRNREHEKVRAILEDMKADLDHEKKNRRRLEMINLKLVNELKEAKMSAKQLLQEYETERKARELTEEVCNELAREVGEDKAEIEALKRDSLRLREEVDEERKMLQMAEVWP

SEQ ID NO: 40186 - protein, 96 aa, Zea mays subsp. mays
  peptide (1)..(96): Ceres Seq. ID no. 12566897
  misc_feature (1)..(84): Pfam Name: Pfam Description:  Myosin tail
  misc_feature (1)..(95): NCBI GI NO: 38344183 NR Description: OSJNBa0053K19.22
  misc_feature (1)..(95): NCBI GI NO: 40253811 NR Description: hypothetical protein
  misc_feature (1)..(95): NCBI GI NO: 15223613 NR Description: unknown protein; protein id: At1g50660.1
  misc_feature (1)..(95): NCBI GI NO: 9294553 NR Description: gb|AAF00675
  misc_feature (1)..(95): NCBI GI NO: 15231114 NR Description: unknown protein; protein id: At3g20350.1
  misc_feature (1)..(95): NCBI GI NO: 29367527 NR Description: unknown [Oryza sativa (japonica cultivar-group)]
  misc_feature (1)..(93): NCBI GI NO: 15724288 NR Description: AT3g11590/F24K9_26 [Arabidopsis thaliana]
  misc_feature (1)..(93): NCBI GI NO: 18399293 NR Description: expressed protein; protein id: At3g11590
  misc_feature (1)..(95): NCBI GI NO: 38346645 NR Description: OSJNBa0072D21.15
  misc_feature (1)..(95): NCBI GI NO: 34394172 NR Description: hypothetical protein
MKADLDHEKKNRRRLEMINLKLVNELKEAKMSAKQLLQEYETERKARELTEEVCNELAREVGEDKAEIEALKRDSLRLREEVDEERKMLQMAEVWP

SEQ ID NO: 40187 - DNA, 1330 bp, Zea mays subsp. mays
  misc_feature (1)..(1330): Ceres Seq. ID no. 12418837
gcacgagaccattacctagaacatcctaatcgaaaacccgcttggtcactcctgcttccttgccgttcgagagctatccgacacctgaacagagctccagttcctctatcgacctgagggcattgggttcttgatgggagacagcaggaggcacgaaccgagggttagcctccaaccggatggctggctgcgcaggcctgcgttgggattgaacagcctgatgcagattcccgataagattcagagctctcttaaggtgcaatttgggcgtttcttgaacaaggatggtgctgtccgccgcatgagtgctgagatatcgtcagagaagcgaaaccgtcgtgttctgctgctgcttccgcggaggttcgcttggataggcatctccaagcttggtgggacaatcctagctggaccgacgagccaccagaaataaaggtgactgtaccagaaggttccctttgcaacctcaatctgagatttaaggccggattaccaccagatgcagtatacaatatcataattgatccagagaacaaaagggtgttcaagaatattaaggaagtaatatcaaggaaagtcttgctcgacgaaggatcaagacaagtagtcgaagtggagcaggcagcaatctggaagttcctctggtggtctggcaccttttccgttcatgtttttgttgatcagaacagaaaaaaacacaccgtaaagtttaggcaagggcgagctggctttatgaggaagtttgagggttgctggacgatagaacccctttttgttgacaaggaattatgccttcctctgaacccacattcattggaggaatatgaatcttgtactggtggcagggggagagttggatctgccattaccttggaccaacttatcgagcctgctcttttacccccaccacccatttcgtggtacttgagaggaattactacaaggacaactgagatgctggtgaacgatctgatagcggaaactgctcgattgcgcaccatctcaaacaacgcaaatgccaagcaaggtactgaagaaaccggtgatgctaacataggtgatccagctagagagtgtggtgacattaaggaaaggtggcgacagagaagaaaaagtggacgtcacggatcatcccttagattaacaagtcgattcttgtaagataagctatgaagcagtgctcattttaggacccgatttacctgtatcttagtttgtaaggttttggttgtaggtaacattgtgtaagatggttgtttgtgaacatgtagaagctggttgttcaatacttatatatgttttatttatatgaataaaggtttacttgctc

SEQ ID NO: 40188 - protein, 142 aa, Zea mays subsp. mays
  peptide (1)..(142): Ceres Seq. ID no. 12418838
  misc_feature (1)..(71): Pfam Name: Pfam Description:  Domain of unknown function DUF220
  misc_feature (1)..(130): NCBI GI NO: 18409585 NR Description: expressed protein; protein id: At1g70480
  misc_feature (1)..(130): NCBI GI NO: 21592433 NR Description: unknown [Arabidopsis thaliana]
  misc_feature (1)..(86): NCBI GI NO: 2129655 NR Description: hypothetical protein OBP32 - Arabidopsis thaliana
  misc_feature (1)..(130): NCBI GI NO: 18395257 NR Description: Expressed protein; protein id: At1g23560
  misc_feature (1)..(130): NCBI GI NO: 21554971 NR Description: unknown [Arabidopsis thaliana]
  misc_feature (1)..(130): NCBI GI NO: 8778583 NR Description: F28C11.19 [Arabidopsis thaliana]
  misc_feature (1)..(101): NCBI GI NO: 8778583 NR Description: F28C11.19 [Arabidopsis thaliana]
  misc_feature (1)..(90): NCBI GI NO: 15220802 NR Description: putative OBP32pep protein; protein id: At1g23600.1
  misc_feature (1)..(90): NCBI GI NO: 15220821 NR Description: hypothetical protein; protein id: At1g23660.1
  misc_feature (1)..(90): NCBI GI NO: 15220815 NR Description: OBP32pep protein, putative; protein id: At1g23630
MRKFEGCWTIEPLFVDKELCLPLNPHSLEEYESCTGGRGRVGSAITLDQLIEPALLPPPPISWYLRGITTRTTEMLVNDLIAETARLRTISNNANAKQGTEETGDANIGDPARECGDIKERWRQRRKSGRHGSSLRLTSRFL

SEQ ID NO: 40189 - protein, 99 aa, Zea mays subsp. mays
  peptide (1)..(99): Ceres Seq. ID no. 12418839
MGDSRRHEPRVSLQPDGWLRRPALGLNSLMQIPDKIQSSLKVQFGRFLNKDGAVRRMSAEISSEKRNRRVLLLLPRRFAWIGISKLGGTILAGPTSHQK

SEQ ID NO: 40190 - DNA, 1372 bp, Zea mays subsp. mays
  misc_feature (1)..(1372): Ceres Seq. ID no. 12359071
aagtggggcgtgcactcaaacccctcatccccatgagaccgcacgagttggagcaaggctcagtgcccgcctgcccccgcatgccgtgcgatgccatggaggcgcgcgtccctgggcgtcgtcacgtcctcactccttgtccgtctgcctgtcgccttgtctcgccttgcaggtcgtagacggcagacgaggagcagcagcagcacgaggcggccgggcccgggccacgccatgccggagaaggaggcgcaggccgccgcgttctgcggcgaggcggtgatcgccgagttcgagtccctcacgcgggacgccgccgccgtgcagcgcgacacgctgcgccggatcctggcagacaacgcctgcgccgagtacctccgctgccggggcctcgcgggccgcaccgacgccgccagcttccgcgcctgcgtgccgctcgccacgcacgccgacatcgagccctacattgcgcgtatcgccgacggcgacacgtcccccgtgctcaccgccaagcccatcacctccatctccctcagctccggcacgacgcaggggaagcgcaagtacctgcccttcaaccaggagctcgtcaagtccacgatgcagatataccggacttcctacgccttcaggaacagggctgtaccggtaccgtctaggggacgtggtgcaggtggccgggttctacaactcgacgccgaagctcaagttcgtgtgccggcggaacctgttgctgagcatcaacatcgacaagagcagcgagcaggacctgcagctggccgtggacagcgcggccaaggtcctggcggcggagaagctggaggtggtggactacagcagccacgcggaggtgtcgcgcgacccgggccactacgtggtgttctgggagctgaacgccgacgccggcgacgacgtgctgcagagctgctgcgacgagctggaccgcgccttcgcggacccgggctacgtcgggtcgcggagggcgcgcagcatcggcccgctcgagctgcgggtgctgcagcgcggcaccttccagaaggtgctccgccactacctctccctcggcgcccccgtcagccagttcaagtcgccccgctgcgtcggccgggccaacaactccggcgtcctccagatcctctccgccaacgtcgtcaaggccttcttcagcgccgcctacgactgaacccgctgcgttcggtggcgacagatcctcaggtagttgtagactctgcatgcagctgtgctgctgtctgtgactgtgtattcacaggattccaggtgctcgatctgcgcgtagatgacgcatcgcatttgtggcctgtttgcaaagttagcagtgtcgtctatggatcgagtgaaataaaacctattgatt

SEQ ID NO: 40191 - protein, 427 aa, Zea mays subsp. mays
  peptide (1)..(427): Ceres Seq. ID no. 12359072
  misc_feature (62)..(186): Pfam Name: Pfam Description:  GH3 auxin-responsive promoter
  misc_feature (60)..(186): NCBI GI NO: 34904090 NR Description: unnamed protein product
  misc_feature (63)..(191): NCBI GI NO: 18407057 NR Description: putative auxin-responsive protein
  misc_feature (63)..(191): NCBI GI NO: 25345298 NR Description: auxin-regulated protein GH3 homolog At2g46370 -Arabidopsis thaliana
  misc_feature (63)..(191): NCBI GI NO: 15292855 NR Description: putative auxin-responsive protein
  misc_feature (63)..(191): NCBI GI NO: 15236304 NR Description: putative GH3-like protein; protein id: At4g03400
  misc_feature (61)..(190): NCBI GI NO: 16610205 NR Description: GH3-like protein 1 [Physcomitrella patens]
  misc_feature (48)..(213): NCBI GI NO: 15239653 NR Description: auxin-responsive-like protein
  misc_feature (48)..(213): NCBI GI NO: 17978966 NR Description: AT5g54510/F24B18_13 [Arabidopsis thaliana]
  misc_feature (70)..(160): NCBI GI NO: 40644906 NR Description: GH3-like protein [Physcomitrella patens]
  misc_feature (64)..(167): NCBI GI NO: 15221934 NR Description: Nt-gh3 deduced protein, putative
MPWRRASLGVVTSSLLVRLPVALSRLAGRRRQTRSSSSTRRPGPGHAMPEKEAQAAAFCGEAVIAEFESLTRDAAAVQRDTLRRILADNACAEYLRCRGLAGRTDAASFRACVPLATHADIEPYIARIADGDTSPVLTAKPITSISLSSGTTQGKRKYLPFNQELVKSTMQIYRTSYAFRNRAVPVPSRGRGAGGRVLQLDAEAQVRVPAEPVAEHQHRQEQRAGPAAGRGQRGQGPGGGEAGGGGLQQPRGGVARPGPLRGVLGAERRRRRRRAAELLRRAGPRLRGPGLRRVAEGAQHRPARAAGAAARHLPEGAPPLPLPRRPRQPVQVAPLRRPGQQLRRPPDPLRQRRQGLLQRRLRLNPLRSVATDPQVVVDSACSCAAVCDCVFTGFQVLDLRVDDASHLWPVCKVSSVVYGSSEIKPID

SEQ ID NO: 40192 - protein, 380 aa, Zea mays subsp. mays
  peptide (1)..(380): Ceres Seq. ID no. 12359073
  misc_feature (15)..(139): Pfam Name: Pfam Description:  GH3 auxin-responsive promoter
  misc_feature (13)..(139): NCBI GI NO: 34904090 NR Description: unnamed protein product
  misc_feature (16)..(144): NCBI GI NO: 18407057 NR Description: putative auxin-responsive protein
  misc_feature (16)..(144): NCBI GI NO: 25345298 NR Description: auxin-regulated protein GH3 homolog At2g46370 -Arabidopsis thaliana
  misc_feature (16)..(144): NCBI GI NO: 15292855 NR Description: putative auxin-responsive protein
  misc_feature (16)..(144): NCBI GI NO: 15236304 NR Description: putative GH3-like protein; protein id: At4g03400
  misc_feature (14)..(143): NCBI GI NO: 16610205 NR Description: GH3-like protein 1 [Physcomitrella patens]
  misc_feature (1)..(166): NCBI GI NO: 15239653 NR Description: auxin-responsive-like protein
  misc_feature (1)..(166): NCBI GI NO: 17978966 NR Description: AT5g54510/F24B18_13 [Arabidopsis thaliana]
  misc_feature (23)..(113): NCBI GI NO: 40644906 NR Description: GH3-like protein [Physcomitrella patens]
  misc_feature (17)..(120): NCBI GI NO: 15221934 NR Description: Nt-gh3 deduced protein, putative
MPEKEAQAAAFCGEAVIAEFESLTRDAAAVQRDTLRRILADNACAEYLRCRGLAGRTDAASFRACVPLATHADIEPYIARIADGDTSPVLTAKPITSISLSSGTTQGKRKYLPFNQELVKSTMQIYRTSYAFRNRAVPVPSRGRGAGGRVLQLDAEAQVRVPAEPVAEHQHRQEQRAGPAAGRGQRGQGPGGGEAGGGGLQQPRGGVARPGPLRGVLGAERRRRRRRAAELLRRAGPRLRGPGLRRVAEGAQHRPARAAGAAARHLPEGAPPLPLPRRPRQPVQVAPLRRPGQQLRRPPDPLRQRRQGLLQRRLRLNPLRSVATDPQVVVDSACSCAAVCDCVFTGFQVLDLRVDDASHLWPVCKVSSVVYGSSEIKPID

SEQ ID NO: 40193 - protein, 258 aa, Zea mays subsp. mays
  peptide (1)..(258): Ceres Seq. ID no. 12359074
  misc_feature (1)..(17): NCBI GI NO: 34904090 NR Description: unnamed protein product
  misc_feature (1)..(22): NCBI GI NO: 18407057 NR Description: putative auxin-responsive protein
  misc_feature (1)..(22): NCBI GI NO: 25345298 NR Description: auxin-regulated protein GH3 homolog At2g46370 -Arabidopsis thaliana
  misc_feature (1)..(22): NCBI GI NO: 15292855 NR Description: putative auxin-responsive protein
  misc_feature (1)..(22): NCBI GI NO: 15236304 NR Description: putative GH3-like protein; protein id: At4g03400
  misc_feature (1)..(21): NCBI GI NO: 16610205 NR Description: GH3-like protein 1 [Physcomitrella patens]
  misc_feature (1)..(44): NCBI GI NO: 15239653 NR Description: auxin-responsive-like protein
  misc_feature (1)..(44): NCBI GI NO: 17978966 NR Description: AT5g54510/F24B18_13 [Arabidopsis thaliana]
  misc_feature (1)..(52): NCBI GI NO: 34909816 NR Description: putative auxin-responsive GH3 protein
  misc_feature (57)..(89): NCBI GI NO: 15805485 NR Description: hypothetical protein [Deinococcus radiodurans]
MQIYRTSYAFRNRAVPVPSRGRGAGGRVLQLDAEAQVRVPAEPVAEHQHRQEQRAGPAAGRGQRGQGPGGGEAGGGGLQQPRGGVARPGPLRGVLGAERRRRRRRAAELLRRAGPRLRGPGLRRVAEGAQHRPARAAGAAARHLPEGAPPLPLPRRPRQPVQVAPLRRPGQQLRRPPDPLRQRRQGLLQRRLRLNPLRSVATDPQVVVDSACSCAAVCDCVFTGFQVLDLRVDDASHLWPVCKVSSVVYGSSEIKPID

SEQ ID NO: 40194 - DNA, 675 bp, Zea mays subsp. mays
  misc_feature (1)..(675): Ceres Seq. ID no. 12360054
ccttccaggttccgggaggtctatgactactattcggcactttttgattcactggatgccacccttccaagggaaagcccagatagaatgaacgtggagcgccagtgcctcgcacgggaaatcgtcaacatcttagcttgtgaaggccctgaccgtgtggaaaggtatgaagtggctgggaaatggagagctaggatggcaatggcgggctttgtgccgtccccatttaacagcggcgcggttgatggcataagatctctactgaaatcgtactgcgataagtacaggttcgagaaggtccaggacggcctccactttggctggggcgacaagacgctcgtcttctcttcggcgtggcaatagaagcttgcttgtagtattgccgatctgagcactttccagcgttttaggagcatctggtgcaagggctgtaaagagatttctgtcgccgtattgttgaagtacactcgtagctaaccttagcgtgttgcctgcctgtaggcttgtgaggtctacggtttacctagtttcttagatgaagtatgttgtgcattgtacacctactgaactacatgtagactgtagagtcgcgggtgtatttaattttgcccttcttttggaggggcagaatcacaatatgtcgacattgtttcgtgtataaagtactggatgatg

SEQ ID NO: 40195 - protein, 120 aa, Zea mays subsp. mays
  peptide (1)..(120): Ceres Seq. ID no. 12360055
  misc_feature (2)..(120): NCBI GI NO: 34907424 NR Description: scarecrow-like protein
  misc_feature (3)..(120): NCBI GI NO: 11358822 NR Description: scarecrow-like protein 1
  misc_feature (3)..(120): NCBI GI NO: 15218990 NR Description: scarecrow-like 1; protein id: At1g21450
  misc_feature (1)..(119): NCBI GI NO: 25989334 NR Description: chitin-inducible gibberellin-responsive protein
  misc_feature (3)..(120): NCBI GI NO: 15238903 NR Description: SCARECROW gene regulator-like
  misc_feature (3)..(120): NCBI GI NO: 26450054 NR Description: putative SCARECROW gene regulator
  misc_feature (3)..(120): NCBI GI NO: 15224425 NR Description: putative SCARECROW gene regulator
  misc_feature (3)..(119): NCBI GI NO: 37533564 NR Description: putative SCARECROW gene regulator-like
  misc_feature (3)..(120): NCBI GI NO: 11358827 NR Description: scarecrow-like protein 5
  misc_feature (3)..(120): NCBI GI NO: 25405382 NR Description: scarecrow-like protein
PSRFREVYDYYSALFDSLDATLPRESPDRMNVERQCLAREIVNILACEGPDRVERYEVAGKWRARMAMAGFVPSPFNSGAVDGIRSLLKSYCDKYRFEKVQDGLHFGWGDKTLVFSSAWQ

SEQ ID NO: 40196 - protein, 91 aa, Zea mays subsp. mays
  peptide (1)..(91): Ceres Seq. ID no. 12360056
  misc_feature (1)..(91): NCBI GI NO: 34907424 NR Description: scarecrow-like protein
  misc_feature (1)..(91): NCBI GI NO: 11358822 NR Description: scarecrow-like protein 1
  misc_feature (1)..(91): NCBI GI NO: 15218990 NR Description: scarecrow-like 1; protein id: At1g21450
  misc_feature (1)..(90): NCBI GI NO: 25989334 NR Description: chitin-inducible gibberellin-responsive protein
  misc_feature (1)..(91): NCBI GI NO: 15238903 NR Description: SCARECROW gene regulator-like
  misc_feature (1)..(91): NCBI GI NO: 26450054 NR Description: putative SCARECROW gene regulator
  misc_feature (1)..(91): NCBI GI NO: 15224425 NR Description: putative SCARECROW gene regulator
  misc_feature (1)..(90): NCBI GI NO: 37533564 NR Description: putative SCARECROW gene regulator-like
  misc_feature (1)..(91): NCBI GI NO: 11358827 NR Description: scarecrow-like protein 5
  misc_feature (1)..(91): NCBI GI NO: 25405382 NR Description: scarecrow-like protein
MNVERQCLAREIVNILACEGPDRVERYEVAGKWRARMAMAGFVPSPFNSGAVDGIRSLLKSYCDKYRFEKVQDGLHFGWGDKTLVFSSAWQ

SEQ ID NO: 40197 - DNA, 979 bp, Zea mays subsp. mays
  misc_feature (1)..(979): Ceres Seq. ID no. 13586215
gaaaaagcagccgtgacggatccagccgaaccccctcgcagtcgcagccccctcacgccacgcgacatgggcaagatcaggatgcccgtgccgtccctgttccgccgccgctcctccaagccgccgccgccgcagccgcagcagcaggcgcctgccgcgggcgacggcgacggcagcgggtccccggagcgggcgacggcggaggaggagatggcgcgcgtgttccgcaagttcgacgcgaacggcgacgggcggatctcgcggtcggagctggcggcgctgttcgagagcctgggccacggcgcgtcggacgacgaggtggcgcgcatgatggccgaggcggacgcggacggcgacggcttcatcagcctgcccgagttcgcggccctcaacgccacggtggccggcgacgcggccgccgtcgaggaggacctgcgccacgccttccgcgtcttcgacgccgacggcagcggcgccatctccgccgccgagctcgcgcgcgtcctccgcagcctcggcgagcccgcctccgtcgcgcagtgccgccgcatgatcgagggcgtcgaccagaacggcgacggcctcatctccttcgacgagttcaaggtcatgatggccaggggaggaggctgcttcgctaagatcgcctaggtaattagaggttccctcccggcccagccctttcgaatctctgctgctccacccatcccccccacctccgttcacagcagccgagagtatggcgtcgtgtgcggtcttaagtaaagtgtatatagaagccaagatcatcgtggagaagcactagcgctagattcttctctctactaataattgggaaccacggcggatattgctttttgcaagattggagcctggatgaaagcagtggttcagagctaacttctgttctagagatgcggatgcttgactctgtgaatgaaagagtagacgattcgaacctactcctatgtggatctct

SEQ ID NO: 40198 - protein, 216 aa, Zea mays subsp. mays
  peptide (1)..(216): Ceres Seq. ID no. 13586216
  misc_feature (180)..(208): Pfam Name: Pfam Description:  EF hand
  misc_feature (23)..(216): NCBI GI NO: 19386815 NR Description: B1147A04.10
  misc_feature (56)..(208): NCBI GI NO: 15221781 NR Description: polcalcin
  misc_feature (49)..(205): NCBI GI NO: 14423843 NR Description: Polcalcin Jun o 2
  misc_feature (65)..(207): NCBI GI NO: 34895640 NR Description: OSJNBa0083M16.33
  misc_feature (39)..(215): NCBI GI NO: 21740787 NR Description: OSJNBb0091E11.1
  misc_feature (69)..(205): NCBI GI NO: 14589311 NR Description: calcium binding protein [Sesbania rostrata]
  misc_feature (69)..(210): NCBI GI NO: 15240340 NR Description: calmodulin-related protein 2, touch-induced (TCH2)
  misc_feature (53)..(210): NCBI GI NO: 6901654 NR Description: calcium-binding protein [Olea europaea]
  misc_feature (68)..(211): NCBI GI NO: 13397927 NR Description: putative calmodulin-related protein
  misc_feature (70)..(210): NCBI GI NO: 28301674 NR Description: calcium-binding protein [Lotus japonicus]
EKAAVTDPAEPPRSRSPLTPRDMGKIRMPVPSLFRRRSSKPPPPQPQQQAPAAGDGDGSGSPERATAEEEMARVFRKFDANGDGRISRSELAALFESLGHGASDDEVARMMAEADADGDGFISLPEFAALNATVAGDAAAVEEDLRHAFRVFDADGSGAISAAELARVLRSLGEPASVAQCRRMIEGVDQNGDGLISFDEFKVMMARGGGCFAKIA

SEQ ID NO: 40199 - protein, 212 aa, Zea mays subsp. mays
  peptide (1)..(212): Ceres Seq. ID no. 13586217
  misc_feature (6)..(109): Pfam Name: Pfam Description:  Progesterone receptor
  misc_feature (46)..(209): NCBI GI NO: 29367367 NR Description: calmodulin-related protein
  misc_feature (45)..(209): NCBI GI NO: 34894284 NR Description: unnamed protein product
KSSRDGSSRTPSQSQPPHATRHGQDQDARAVPVPPPLLQAAAAAAAAAGACRGRRRRQRVPGAGDGGGGDGARVPQVRRERRRADLAVGAGGAVREPGPRRVGRRGGAHDGRGGRGRRRLHQPARVRGPQRHGGRRRGRRRGGPAPRLPRLRRRRQRRHLRRRARARPPQPRRARLRRAVPPHDRGRRPERRRPHLLRRVQGHDGQGRRLLR

SEQ ID NO: 40200 - protein, 194 aa, Zea mays subsp. mays
  peptide (1)..(194): Ceres Seq. ID no. 13586218
  misc_feature (158)..(186): Pfam Name: Pfam Description:  EF hand
  misc_feature (1)..(194): NCBI GI NO: 19386815 NR Description: B1147A04.10
  misc_feature (34)..(186): NCBI GI NO: 15221781 NR Description: polcalcin
  misc_feature (27)..(183): NCBI GI NO: 14423843 NR Description: Polcalcin Jun o 2
  misc_feature (43)..(185): NCBI GI NO: 34895640 NR Description: OSJNBa0083M16.33
  misc_feature (17)..(193): NCBI GI NO: 21740787 NR Description: OSJNBb0091E11.1
  misc_feature (47)..(183): NCBI GI NO: 14589311 NR Description: calcium binding protein [Sesbania rostrata]
  misc_feature (47)..(188): NCBI GI NO: 15240340 NR Description: calmodulin-related protein 2, touch-induced (TCH2)
  misc_feature (31)..(188): NCBI GI NO: 6901654 NR Description: calcium-binding protein [Olea europaea]
  misc_feature (46)..(189): NCBI GI NO: 13397927 NR Description: putative calmodulin-related protein
  misc_feature (48)..(188): NCBI GI NO: 28301674 NR Description: calcium-binding protein [Lotus japonicus]
MGKIRMPVPSLFRRRSSKPPPPQPQQQAPAAGDGDGSGSPERATAEEEMARVFRKFDANGDGRISRSELAALFESLGHGASDDEVARMMAEADADGDGFISLPEFAALNATVAGDAAAVEEDLRHAFRVFDADGSGAISAAELARVLRSLGEPASVAQCRRMIEGVDQNGDGLISFDEFKVMMARGGGCFAKIA

SEQ ID NO: 40201 - DNA, 657 bp, Zea mays subsp. mays
  misc_feature (1)..(657): Ceres Seq. ID no. 13492707
gtagtttcaattatcataacctccgactccgacgatctgaactgtgaagatgagcacttatccaccgccgacgggggaatggaccaccggcctctgtggctgcttcagcgactgcaagagctgttgcctgtcgttcttgtgcccgtgtatcccgttcggacaggtggcagaggtcttggacaagggcatgacatcctgtggtctggccggcctcctctactgtttgctgctgcatgccggggtggctgtggtcccgtgccactgcatctacacctgcacctaccgtcgcaagctccgggcggcgtacgacctgccgccggagccgtgcgccgattgctgcgtccacatgtggtgcgggccatgcgccatctcccagatgtaccgggagctcaagaacagaggcgccgacccggccatgggatgggaagtgctctcgaaaaagacgactatggctcctgtaccaatgcaagacatgacgcgctgacgacagcaactcgatctcctagcaaaccaggattacgtgttgcatatatgcacagtttgtgtgttatgtggctatgtcagcaagtaaatggatcggagtctatgagtggataaaattaagtggatgtgttcgcgtcttagtaataagtgaataaaatttcataagtgttactt

SEQ ID NO: 40202 - protein, 198 aa, Zea mays subsp. mays
  peptide (1)..(198): Ceres Seq. ID no. 13492708
  misc_feature (90)..(183): NCBI GI NO: 34897272 NR Description: hypothetical protein
VVSIIITSDSDDLNCEDEHLSTADGGMDHRPLWLLQRLQELLPVVLVPVYPVRTGGRGLGQGHDILWSGRPPLLFAAACRGGCGPVPLHLHLHLPSQAPGGVRPAAGAVRRLLRPHVVRAMRHLPDVPGAQEQRRRPGHGMGSALEKDDYGSCTNARHDALTTATRSPSKPGLRVAYMHSLCVMWLCQQVNGSESMSG

SEQ ID NO: 40203 - protein, 172 aa, Zea mays subsp. mays
  peptide (1)..(172): Ceres Seq. ID no. 13492709
  misc_feature (64)..(157): NCBI GI NO: 34897272 NR Description: hypothetical protein
MDHRPLWLLQRLQELLPVVLVPVYPVRTGGRGLGQGHDILWSGRPPLLFAAACRGGCGPVPLHLHLHLPSQAPGGVRPAAGAVRRLLRPHVVRAMRHLPDVPGAQEQRRRPGHGMGSALEKDDYGSCTNARHDALTTATRSPSKPGLRVAYMHSLCVMWLCQQVNGSESMSG

SEQ ID NO: 40204 - protein, 144 aa, Zea mays subsp. mays
  peptide (1)..(144): Ceres Seq. ID no. 13492710
  misc_feature (9)..(115): Pfam Name: Pfam Description:  Protein of unknown function, DUF614
  misc_feature (1)..(124): NCBI GI NO: 37530512 NR Description: unknown protein
  misc_feature (5)..(125): NCBI GI NO: 15223920 NR Description: expressed protein [Arabidopsis thaliana]
  misc_feature (5)..(144): NCBI GI NO: 34897270 NR Description: hypothetical protein
  misc_feature (6)..(144): NCBI GI NO: 34897268 NR Description: unknown protein
  misc_feature (5)..(135): NCBI GI NO: 34897274 NR Description: hypothetical protein
  misc_feature (8)..(144): NCBI GI NO: 8272626 NR Description: ORFX [Lycopersicon esculentum]
  misc_feature (8)..(144): NCBI GI NO: 27414005 NR Description: fw2.2 [Lycopersicon pimpinellifolium]
  misc_feature (8)..(144): NCBI GI NO: 8272628 NR Description: ORFX [Lycopersicon pennellii]
  misc_feature (8)..(144): NCBI GI NO: 27414017 NR Description: fw2.2 [Lycopersicon pennellii]
  misc_feature (8)..(144): NCBI GI NO: 27414003 NR Description: fw2.2 [Lycopersicon cheesmanii]
MSTYPPPTGEWTTGLCGCFSDCKSCCLSFLCPCIPFGQVAEVLDKGMTSCGLAGLLYCLLLHAGVAVVPCHCIYTCTYRRKLRAAYDLPPEPCADCCVHMWCGPCAISQMYRELKNRGADPAMGWEVLSKKTTMAPVPMQDMTR

SEQ ID NO: 40205 - DNA, 1349 bp, Zea mays subsp. mays
  misc_feature (1)..(1349): Ceres Seq. ID no. 13499297
taatcgaaaaaccgcgagctcttgcagcctaacggccttagctaatttaagagagattagtaaacaaacagcagacttaagagcgagcctagctagcggcagtaccatgaggcgcctccagttcctggccgccgccgccgccgccatcttcctcctcgcgcttccgctgatggcgacggcccagccgaagctgaggccggactactacgccggcgtctgcccgaacctcgagagcattgtccgcggcgccgtgcggcagtccgtggcgctctcgccgctcgccgccccggccacgctccggctcttcttccacgactgcgcggtcaggggctgcgacgcgtcggtgatgctcatcgacccggccggcggcgacgagtggcggagccccgacggcgtgatgctgaagccggaagggttcagcacggtgatgagcgccaaggcggcggtggacagcgacccgcagtgccggaacattgtgtcctgcgccgacatcttggccctcgccgccagggactccgtgttcctgagcggagggccagactacgaagtggagctgggcaggttcgacggcagggtgtcgagtggtggcagcgtcgtggttcctcatggcacgttcgacctcgaccagctcaacgccttcttctccagcctcggtctctcccagaccgacatgatcgcactgtcagggggtcacacgatcggcgcggcgtcgtgcggctccttcgcgtaccgggtgggcgcggatccggccatggacccggcgctcgcgcagcaggtcctggcgcgctgcccggggggcgggccagccgggttcgcgttcctggacgccacgacgccgctgcggttcgacaacgagtactaccggaacctgctcggcgggatggggatcctggcctccgaccaggtgctgtacgccgacccgaggtcccgcggcgccgtcgagcgctacgccgcggaccaggccgccttcttcggggactttgccgcggcaatgacgaggctcggcagggtcggggtccgcacggcggccgacggcgagatacgccgcgactgcaggttccccaacccccaactgatgggttcgccggctggctgtggcttggcttgtggttgcgcacttgcgcttgcgcgacggttttgtgttgcttctatcttctgtgacgtcacccgtggacgtggcgcgagtgggtgtctgtgttgcgttgttgacttgagtggacgtgcagaaggccgcgtgtcttttggaccaggaaggctctgggcctggtgggctgtgtcctgtgtggctccaagatgggtgtcatatctgttgtgaagggaaatgaaatgtaaagattggtggttggcct

SEQ ID NO: 40206 - protein, 437 aa, Zea mays subsp. mays
  peptide (1)..(437): Ceres Seq. ID no. 13499298
  misc_feature (80)..(318): Pfam Name: Pfam Description:  Peroxidase
  misc_feature (44)..(355): NCBI GI NO: 34915320 NR Description: putative peroxidase
  misc_feature (50)..(351): NCBI GI NO: 15234648 NR Description: peroxidase, putative [Arabidopsis thaliana]
  misc_feature (42)..(355): NCBI GI NO: 39545735 NR Description: OSJNBa0071I13.13
  misc_feature (49)..(351): NCBI GI NO: 1620369 NR Description: peroxidase ATP22a [Arabidopsis thaliana]
  misc_feature (49)..(351): NCBI GI NO: 15224266 NR Description: peroxidase, putative [Arabidopsis thaliana]
  misc_feature (36)..(351): NCBI GI NO: 2117624 NR Description: peroxidase (EC 1.11.1.7) 2 precursor - alfalfa
  misc_feature (63)..(351): NCBI GI NO: 17027274 NR Description: putative peroxidase
  misc_feature (49)..(351): NCBI GI NO: 4138647 NR Description: peroxidase [Trifolium repens]
  misc_feature (36)..(351): NCBI GI NO: 13992528 NR Description: peroxidase2 [Medicago sativa]
  misc_feature (51)..(351): NCBI GI NO: 28629828 NR Description: peroxidase 1 [Artemisia annua]
NRKTASSCSLTALANLREISKQTADLRASLASGSTMRRLQFLAAAAAAIFLLALPLMATAQPKLRPDYYAGVCPNLESIVRGAVRQSVALSPLAAPATLRLFFHDCAVRGCDASVMLIDPAGGDEWRSPDGVMLKPEGFSTVMSAKAAVDSDPQCRNIVSCADILALAARDSVFLSGGPDYEVELGRFDGRVSSGGSVVVPHGTFDLDQLNAFFSSLGLSQTDMIALSGGHTIGAASCGSFAYRVGADPAMDPALAQQVLARCPGGGPAGFAFLDATTPLRFDNEYYRNLLGGMGILASDQVLYADPRSRGAVERYAADQAAFFGDFAAAMTRLGRVGVRTAADGEIRRDCRFPNPQLMGSPAGCGLACGCALALARRFCVASIFCDVTRGRGASGCLCCVVDLSGRAEGRVSFGPGRLWAWWAVSCVAPRWVSYLL

SEQ ID NO: 40207 - protein, 402 aa, Zea mays subsp. mays
  peptide (1)..(402): Ceres Seq. ID no. 13499299
  misc_feature (45)..(283): Pfam Name: Pfam Description:  Peroxidase
  misc_feature (9)..(320): NCBI GI NO: 34915320 NR Description: putative peroxidase
  misc_feature (15)..(316): NCBI GI NO: 15234648 NR Description: peroxidase, putative [Arabidopsis thaliana]
  misc_feature (7)..(320): NCBI GI NO: 39545735 NR Description: OSJNBa0071I13.13
  misc_feature (14)..(316): NCBI GI NO: 1620369 NR Description: peroxidase ATP22a [Arabidopsis thaliana]
  misc_feature (14)..(316): NCBI GI NO: 15224266 NR Description: peroxidase, putative [Arabidopsis thaliana]
  misc_feature (1)..(316): NCBI GI NO: 2117624 NR Description: peroxidase (EC 1.11.1.7) 2 precursor - alfalfa
  misc_feature (28)..(316): NCBI GI NO: 17027274 NR Description: putative peroxidase
  misc_feature (14)..(316): NCBI GI NO: 4138647 NR Description: peroxidase [Trifolium repens]
  misc_feature (1)..(316): NCBI GI NO: 13992528 NR Description: peroxidase2 [Medicago sativa]
  misc_feature (16)..(316): NCBI GI NO: 28629828 NR Description: peroxidase 1 [Artemisia annua]
MRRLQFLAAAAAAIFLLALPLMATAQPKLRPDYYAGVCPNLESIVRGAVRQSVALSPLAAPATLRLFFHDCAVRGCDASVMLIDPAGGDEWRSPDGVMLKPEGFSTVMSAKAAVDSDPQCRNIVSCADILALAARDSVFLSGGPDYEVELGRFDGRVSSGGSVVVPHGTFDLDQLNAFFSSLGLSQTDMIALSGGHTIGAASCGSFAYRVGADPAMDPALAQQVLARCPGGGPAGFAFLDATTPLRFDNEYYRNLLGGMGILASDQVLYADPRSRGAVERYAADQAAFFGDFAAAMTRLGRVGVRTAADGEIRRDCRFPNPQLMGSPAGCGLACGCALALARRFCVASIFCDVTRGRGASGCLCCVVDLSGRAEGRVSFGPGRLWAWWAVSCVAPRWVSYLL

SEQ ID NO: 40208 - protein, 381 aa, Zea mays subsp. mays
  peptide (1)..(381): Ceres Seq. ID no. 13499300
  misc_feature (24)..(262): Pfam Name: Pfam Description:  Peroxidase
  misc_feature (1)..(299): NCBI GI NO: 34915320 NR Description: putative peroxidase
  misc_feature (1)..(295): NCBI GI NO: 15234648 NR Description: peroxidase, putative [Arabidopsis thaliana]
  misc_feature (1)..(299): NCBI GI NO: 39545735 NR Description: OSJNBa0071I13.13
  misc_feature (1)..(295): NCBI GI NO: 1620369 NR Description: peroxidase ATP22a [Arabidopsis thaliana]
  misc_feature (1)..(295): NCBI GI NO: 15224266 NR Description: peroxidase, putative [Arabidopsis thaliana]
  misc_feature (1)..(295): NCBI GI NO: 2117624 NR Description: peroxidase (EC 1.11.1.7) 2 precursor - alfalfa
  misc_feature (7)..(295): NCBI GI NO: 17027274 NR Description: putative peroxidase
  misc_feature (1)..(295): NCBI GI NO: 4138647 NR Description: peroxidase [Trifolium repens]
  misc_feature (1)..(295): NCBI GI NO: 13992528 NR Description: peroxidase2 [Medicago sativa]
  misc_feature (1)..(295): NCBI GI NO: 28629828 NR Description: peroxidase 1 [Artemisia annua]
MATAQPKLRPDYYAGVCPNLESIVRGAVRQSVALSPLAAPATLRLFFHDCAVRGCDASVMLIDPAGGDEWRSPDGVMLKPEGFSTVMSAKAAVDSDPQCRNIVSCADILALAARDSVFLSGGPDYEVELGRFDGRVSSGGSVVVPHGTFDLDQLNAFFSSLGLSQTDMIALSGGHTIGAASCGSFAYRVGADPAMDPALAQQVLARCPGGGPAGFAFLDATTPLRFDNEYYRNLLGGMGILASDQVLYADPRSRGAVERYAADQAAFFGDFAAAMTRLGRVGVRTAADGEIRRDCRFPNPQLMGSPAGCGLACGCALALARRFCVASIFCDVTRGRGASGCLCCVVDLSGRAEGRVSFGPGRLWAWWAVSCVAPRWVSYLL

SEQ ID NO: 40209 - DNA, 1773 bp, Zea mays subsp. mays; identical to SEQ ID NO: 25553
  misc_feature (1)..(1773): Ceres Seq. ID no. 12407294
  misc_feature (1742)..(1742): n is a, c, t, g, unknown, or other
  misc_feature (1743)..(1743): n is a, c, t, g, unknown, or other
  misc_feature (824)..(824): n is a, c, t, g, unknown, or other
  misc_feature (1767)..(1767): n is a, c, t, g, unknown, or other

SEQ ID NO: 40210 - protein, 532 aa, Zea mays subsp. mays; identical to SEQ ID NO: 25554
  peptide (1)..(532): Ceres Seq. ID no. 12407295
  misc_feature (380)..(525): Pfam Name: Pfam Description:  UDP-glucoronosyl and UDP-glucosyl transferase
  misc_feature (380)..(525): NCBI GI NO: 34906162 NR Description: putative anthocyanin 5-O-glucosyltransferase
  misc_feature (429)..(530): NCBI GI NO: 20146093 NR Description: glucosyltransferase NTGT2 [Nicotiana tabacum]
  misc_feature (429)..(523): NCBI GI NO: 14192682 NR Description: cold-induced glucosyl transferase
  misc_feature (429)..(531): NCBI GI NO: 40714353 NR Description: anthocyanin 5-O-glucosyltransferase
  misc_feature (429)..(530): NCBI GI NO: 6683052 NR Description: anthocyanin 5-O-glucosyltransferase
  misc_feature (429)..(529): NCBI GI NO: 18390540 NR Description: UDP-glucose transferase
  misc_feature (429)..(523): NCBI GI NO: 15220556 NR Description: UDP-glycosyltransferase family
  misc_feature (429)..(523): NCBI GI NO: 7433892 NR Description: hypothetical protein - Arabidopsis thaliana
  misc_feature (429)..(529): NCBI GI NO: 4115563 NR Description: UDP-glucose:anthocyanin 5-O-glucosyltransferase
  misc_feature (429)..(527): NCBI GI NO: 27530877 NR Description: anthocyanin 5-glucosyltransferase
  misc_feature (274)..(274): Xaa is any aa, unknown or other

SEQ ID NO: 40211 - protein, 499 aa, Zea mays subsp. mays; identical to SEQ ID NO: 25555
  peptide (1)..(499): Ceres Seq. ID no. 12407296
  misc_feature (37)..(383): Pfam Name: Pfam Description:  UDP-glucoronosyl and UDP-glucosyl transferase
  misc_feature (1)..(383): NCBI GI NO: 34906162 NR Description: putative anthocyanin 5-O-glucosyltransferase
  misc_feature (16)..(383): NCBI GI NO: 20146093 NR Description: glucosyltransferase NTGT2 [Nicotiana tabacum]
  misc_feature (16)..(383): NCBI GI NO: 14192682 NR Description: cold-induced glucosyl transferase
  misc_feature (18)..(383): NCBI GI NO: 40714353 NR Description: anthocyanin 5-O-glucosyltransferase
  misc_feature (16)..(383): NCBI GI NO: 6683052 NR Description: anthocyanin 5-O-glucosyltransferase
  misc_feature (193)..(383): NCBI GI NO: 18390540 NR Description: UDP-glucose transferase
  misc_feature (14)..(211): NCBI GI NO: 18390540 NR Description: UDP-glucose transferase
  misc_feature (192)..(383): NCBI GI NO: 15220556 NR Description: UDP-glycosyltransferase family
  misc_feature (16)..(207): NCBI GI NO: 15220556 NR Description: UDP-glycosyltransferase family
  misc_feature (162)..(383): NCBI GI NO: 7433892 NR Description: hypothetical protein - Arabidopsis thaliana
  misc_feature (232)..(232): Xaa is any aa, unknown or other

SEQ ID NO: 40212 - protein, 496 aa, Zea mays subsp. mays; identical to SEQ ID NO: 25556
  peptide (1)..(496): Ceres Seq. ID no. 12407297
  misc_feature (34)..(380): Pfam Name: Pfam Description:  UDP-glucoronosyl and UDP-glucosyl transferase
  misc_feature (1)..(380): NCBI GI NO: 34906162 NR Description: putative anthocyanin 5-O-glucosyltransferase
  misc_feature (13)..(380): NCBI GI NO: 20146093 NR Description: glucosyltransferase NTGT2 [Nicotiana tabacum]
  misc_feature (13)..(380): NCBI GI NO: 14192682 NR Description: cold-induced glucosyl transferase
  misc_feature (15)..(380): NCBI GI NO: 40714353 NR Description: anthocyanin 5-O-glucosyltransferase
  misc_feature (13)..(380): NCBI GI NO: 6683052 NR Description: anthocyanin 5-O-glucosyltransferase
  misc_feature (190)..(380): NCBI GI NO: 18390540 NR Description: UDP-glucose transferase
  misc_feature (11)..(208): NCBI GI NO: 18390540 NR Description: UDP-glucose transferase
  misc_feature (189)..(380): NCBI GI NO: 15220556 NR Description: UDP-glycosyltransferase family
  misc_feature (13)..(204): NCBI GI NO: 15220556 NR Description: UDP-glycosyltransferase family
  misc_feature (159)..(380): NCBI GI NO: 7433892 NR Description: hypothetical protein - Arabidopsis thaliana
  misc_feature (229)..(229): Xaa is any aa, unknown or other

SEQ ID NO: 40213 - DNA, 1121 bp, Zea mays subsp. mays
  misc_feature (1)..(1121): Ceres Seq. ID no. 12359075
accattgagccgagcatcctgcgagagcgagcaagagaatcacgacttataactagggttctccacaggtaccgagatacgaatagctagctaggatgatgctgcttgcactgcattctccatctaccggtaccgtcgcttggcgtcgtcgtcgtccggctccattacccgccatctcgcgccgcgctcgcattatccggccgtctccattcgctctgtccaccgcggcggccacggacacgagcaccggccatgccccggccacggccgatcgcgaggcgccgctactccagctcctccacagcggggtgcgggcagagtcgctgccgcggcacgtagggttggtgatcgatgggcacgcgagatgggcgcgcgccagggggctgtcggtgtcggagggccacgcggttgggcggcgcacggtggagcacacggtgcgactgtcgcgagcgtggggcatccgcgtgctcaccgtcttcgcctgctcccacgagaacatgacgacccgccccaaggcggagatggacttcttcatgcagctgtacgaggggtttatccgtgacaacgtcgaccagttctgcagggagggaatccggctgcatctcatcggcgactcgccgggattgccagcgtccctgctgcgcgcggcgagggaagccaaccagctggccacgcagagcgagtcggagatggtcctgatgctggccatgggctacagcgggcggcgggacatactgcgggcgtgccaagagctcgccacggaggtgcagcggaacctgctgaggccagaggacatcgacgaggcgctcatcgccgggaagctggggaccagtatcgccggcggcgagctctcttaccccgacctggtcatcaggaccagcggcgagctgcggctgagcaacttcctgctgtggcagtccgcattcgcggagctcttcttctctgacgtcatgtggccggattttggggaggacgagtacctcggggccttgcgttcctaccagaccagacaacggcgcttcggccaacgaaagtagagctcacttcttcttcttttttcctttcaaaatacaacaaacgaggaaataaaaagctacatcactactatatagatttgattc

SEQ ID NO: 40214 - protein, 313 aa, Zea mays subsp. mays
  peptide (1)..(313): Ceres Seq. ID no. 12359076
  misc_feature (84)..(310): Pfam Name: Pfam Description:  Putative undecaprenyl diphosphate synthase
  misc_feature (62)..(313): NCBI GI NO: 34908428 NR Description: putative undecaprenyl pyrophosphate synthetase
  misc_feature (58)..(313): NCBI GI NO: 15237748 NR Description: dehydrodolichyl diphosphate synthase
  misc_feature (72)..(312): NCBI GI NO: 18424144 NR Description: dehydrodolichyl diphosphate synthase
  misc_feature (64)..(311): NCBI GI NO: 37519677 NR Description: undecaprenyl pyrophosphate synthetase
  misc_feature (77)..(310): NCBI GI NO: 16078716 NR Description: similar to hypothetical proteins
  misc_feature (75)..(311): NCBI GI NO: 22299306 NR Description: undecaprenyl pyrophosphate synthetase
  misc_feature (75)..(313): NCBI GI NO: 17230924 NR Description: undecaprenyl pyrophosphate synthetase
  misc_feature (77)..(312): NCBI GI NO: 8843800 NR Description: cis-prenyltransferase homolog-like
  misc_feature (77)..(312): NCBI GI NO: 18424148 NR Description: dehydrodolichyl diphosphate synthase
  misc_feature (71)..(312): NCBI GI NO: 7447521 NR Description: hypothetical protein At2g23410
MMLLALHSPSTGTVAWRRRRPAPLPAISRRARIIRPSPFALSTAAATDTSTGHAPATADREAPLLQLLHSGVRAESLPRHVGLVIDGHARWARARGLSVSEGHAVGRRTVEHTVRLSRAWGIRVLTVFACSHENMTTRPKAEMDFFMQLYEGFIRDNVDQFCREGIRLHLIGDSPGLPASLLRAAREANQLATQSESEMVLMLAMGYSGRRDILRACQELATEVQRNLLRPEDIDEALIAGKLGTSIAGGELSYPDLVIRTSGELRLSNFLLWQSAFAELFFSDVMWPDFGEDEYLGALRSYQTRQRRFGQRK

SEQ ID NO: 40215 - protein, 312 aa, Zea mays subsp. mays
  peptide (1)..(312): Ceres Seq. ID no. 12359077
  misc_feature (83)..(309): Pfam Name: Pfam Description:  Putative undecaprenyl diphosphate synthase
  misc_feature (61)..(312): NCBI GI NO: 34908428 NR Description: putative undecaprenyl pyrophosphate synthetase
  misc_feature (57)..(312): NCBI GI NO: 15237748 NR Description: dehydrodolichyl diphosphate synthase
  misc_feature (71)..(311): NCBI GI NO: 18424144 NR Description: dehydrodolichyl diphosphate synthase
  misc_feature (63)..(310): NCBI GI NO: 37519677 NR Description: undecaprenyl pyrophosphate synthetase
  misc_feature (76)..(309): NCBI GI NO: 16078716 NR Description: similar to hypothetical proteins
  misc_feature (74)..(310): NCBI GI NO: 22299306 NR Description: undecaprenyl pyrophosphate synthetase
  misc_feature (74)..(312): NCBI GI NO: 17230924 NR Description: undecaprenyl pyrophosphate synthetase
  misc_feature (76)..(311): NCBI GI NO: 8843800 NR Description: cis-prenyltransferase homolog-like
  misc_feature (76)..(311): NCBI GI NO: 18424148 NR Description: dehydrodolichyl diphosphate synthase
  misc_feature (70)..(311): NCBI GI NO: 7447521 NR Description: hypothetical protein At2g23410
MLLALHSPSTGTVAWRRRRPAPLPAISRRARIIRPSPFALSTAAATDTSTGHAPATADREAPLLQLLHSGVRAESLPRHVGLVIDGHARWARARGLSVSEGHAVGRRTVEHTVRLSRAWGIRVLTVFACSHENMTTRPKAEMDFFMQLYEGFIRDNVDQFCREGIRLHLIGDSPGLPASLLRAAREANQLATQSESEMVLMLAMGYSGRRDILRACQELATEVQRNLLRPEDIDEALIAGKLGTSIAGGELSYPDLVIRTSGELRLSNFLLWQSAFAELFFSDVMWPDFGEDEYLGALRSYQTRQRRFGQRK

SEQ ID NO: 40216 - protein, 179 aa, Zea mays subsp. mays
  peptide (1)..(179): Ceres Seq. ID no. 12359078
  misc_feature (1)..(176): Pfam Name: Pfam Description:  Putative undecaprenyl diphosphate synthase
  misc_feature (1)..(179): NCBI GI NO: 34908428 NR Description: putative undecaprenyl pyrophosphate synthetase
  misc_feature (1)..(179): NCBI GI NO: 15237748 NR Description: dehydrodolichyl diphosphate synthase
  misc_feature (1)..(178): NCBI GI NO: 18424144 NR Description: dehydrodolichyl diphosphate synthase
  misc_feature (1)..(177): NCBI GI NO: 37519677 NR Description: undecaprenyl pyrophosphate synthetase
  misc_feature (1)..(176): NCBI GI NO: 16078716 NR Description: similar to hypothetical proteins
  misc_feature (1)..(177): NCBI GI NO: 22299306 NR Description: undecaprenyl pyrophosphate synthetase
  misc_feature (1)..(179): NCBI GI NO: 17230924 NR Description: undecaprenyl pyrophosphate synthetase
  misc_feature (1)..(178): NCBI GI NO: 8843800 NR Description: cis-prenyltransferase homolog-like
  misc_feature (1)..(178): NCBI GI NO: 18424148 NR Description: dehydrodolichyl diphosphate synthase
  misc_feature (1)..(178): NCBI GI NO: 7447521 NR Description: hypothetical protein At2g23410
MTTRPKAEMDFFMQLYEGFIRDNVDQFCREGIRLHLIGDSPGLPASLLRAAREANQLATQSESEMVLMLAMGYSGRRDILRACQELATEVQRNLLRPEDIDEALIAGKLGTSIAGGELSYPDLVIRTSGELRLSNFLLWQSAFAELFFSDVMWPDFGEDEYLGALRSYQTRQRRFGQRK

SEQ ID NO: 40217 - DNA, 922 bp, Zea mays subsp. mays
  misc_feature (1)..(922): Ceres Seq. ID no. 12358505
ccggcagtctgcgatcaaaccgcacgcaagcgaaccacagcgtgctcgccatctcactgactgtgacgacggcaacaagccagtgagcagctcgccatggcagcagtgtccaccgcgccggcgctcgaaggccgcatcgcgctcgtcaccggcggctcccggggcatcggccgcgaggtgtcgtcccacctcgccgcgctcggcgcgcgtgtcgtggtcaactacgccaccaacccggccaaggccgaggagctcgtcgcggagctcgcctcgcgcggcctccgcgccgtggccgtgcgcgcggacgtctccgatccggacgccgtgcgcgcgctcttcgaccgcgccgaggaggccttcgggtccccgccccacgtagtggtcgcctgcgcgggcatcatggacgccaagtaccccgcgctggtcgacactgccgtcgaggacttcgacgccacgttcgcggtgaacacgcgcggcaagttcctggtgtgccgggaggccgcccggcgcatcccccccaacagcggtgggcgcatcgtgacgttctcgtccacgacggttgccgtgctgccgccgggctacgcggcgtacgctgcgtccaacgccgctgtggaggcgatgacgaaggtcctggccaaggaggtggcgccgaaggggatcacggccaacgtggtggcgccgggccctgtgcgcacggagctcttccttgccgggaaggatgaggcgttcctagagagggtaaagaactccatgcgtatagccgagacgacagacatagcgcccgtggtggcgttcctggcgagcgaggcctcgggctgggtgaacgggcaggttatcagggtcaatgggggcgtcgcatgagtgcggcgttgttattattacctcattatctgccatggctttccaaggatgttgttttcct

SEQ ID NO: 40218 - protein, 254 aa, Zea mays subsp. mays
  peptide (1)..(254): Ceres Seq. ID no. 12358506
  misc_feature (1)..(254): NCBI GI NO: 37534988 NR Description: putative short-chain alcohol dehydrogenase
  misc_feature (1)..(254): NCBI GI NO: 34395018 NR Description: putative short-chain dehydrogenase/reductase
  misc_feature (5)..(252): NCBI GI NO: 34393370 NR Description: putative short-chain dehydrogenase/reductase
  misc_feature (5)..(252): NCBI GI NO: 15235621 NR Description: short-chain alcohol dehydrogenase like protein
  misc_feature (1)..(252): NCBI GI NO: 34395019 NR Description: putative short-chain dehydrogenase/reductase
  misc_feature (2)..(252): NCBI GI NO: 15229203 NR Description: putative short-chain type dehydrogenase/reductase
  misc_feature (5)..(251): NCBI GI NO: 9758903 NR Description: Brn1-like protein [Arabidopsis thaliana]
  misc_feature (1)..(252): NCBI GI NO: 18087667 NR Description: putative dehydrogenase [Oryza sativa]
  misc_feature (1)..(252): NCBI GI NO: 30679011 NR Description: short-chain type dehydrogenase/reductase -related
  misc_feature (10)..(252): NCBI GI NO: 1711355 NR Description: SHORT-CHAIN TYPE DEHYDROGENASE/REDUCTASE
MAAVSTAPALEGRIALVTGGSRGIGREVSSHLAALGARVVVNYATNPAKAEELVAELASRGLRAVAVRADVSDPDAVRALFDRAEEAFGSPPHVVVACAGIMDAKYPALVDTAVEDFDATFAVNTRGKFLVCREAARRIPPNSGGRIVTFSSTTVAVLPPGYAAYAASNAAVEAMTKVLAKEVAPKGITANVVAPGPVRTELFLAGKDEAFLERVKNSMRIAETTDIAPVVAFLASEASGWVNGQVIRVNGGVA

SEQ ID NO: 40219 - protein, 153 aa, Zea mays subsp. mays
  peptide (1)..(153): Ceres Seq. ID no. 12358507
  misc_feature (1)..(153): NCBI GI NO: 37534988 NR Description: putative short-chain alcohol dehydrogenase
  misc_feature (1)..(153): NCBI GI NO: 34395018 NR Description: putative short-chain dehydrogenase/reductase
  misc_feature (1)..(151): NCBI GI NO: 34393370 NR Description: putative short-chain dehydrogenase/reductase
  misc_feature (1)..(151): NCBI GI NO: 15235621 NR Description: short-chain alcohol dehydrogenase like protein
  misc_feature (1)..(151): NCBI GI NO: 34395019 NR Description: putative short-chain dehydrogenase/reductase
  misc_feature (1)..(151): NCBI GI NO: 15229203 NR Description: putative short-chain type dehydrogenase/reductase
  misc_feature (1)..(150): NCBI GI NO: 9758903 NR Description: Brn1-like protein [Arabidopsis thaliana]
  misc_feature (1)..(151): NCBI GI NO: 18087667 NR Description: putative dehydrogenase [Oryza sativa]
  misc_feature (1)..(151): NCBI GI NO: 30679011 NR Description: short-chain type dehydrogenase/reductase -related
  misc_feature (1)..(151): NCBI GI NO: 1711355 NR Description: SHORT-CHAIN TYPE DEHYDROGENASE/REDUCTASE
MDAKYPALVDTAVEDFDATFAVNTRGKFLVCREAARRIPPNSGGRIVTFSSTTVAVLPPGYAAYAASNAAVEAMTKVLAKEVAPKGITANVVAPGPVRTELFLAGKDEAFLERVKNSMRIAETTDIAPVVAFLASEASGWVNGQVIRVNGGVA

SEQ ID NO: 40220 - DNA, 1521 bp, Zea mays subsp. mays
  misc_feature (1)..(1521): Ceres Seq. ID no. 12375567
gcacgagaccattacctagaacatcctaatcaaaaagcgaaaccatcagcggattacataagccgacaggcaccggtcgttgcgtcttgctcatcagaacgctagctaggactaggagaagcttaacctctgcaaccaccgataagagttactactatttacataggagcggcagctgctaccgcgtgcgccggcgatggggtggtgggagaacgccaagagcgtgttcggcgacgccgggaacgtcggctgcttcccgaggatcgggaggaagcagtccaagaactcgtacgctttcccggcggatcctgggagcgagaaacggagagggtcaggcggccccgcccccgccccggaggaggtgatcacggtggaggtgccggaggtgcgcctgcgcgagctgaacgagatcacggcgtccttctcaggcgagaagctgatcgggcaagggtcctacgccaaggtctaccaggccacgacgcggaccggcaggctggccgtcgtcaagcggctggagaagccctccaagcacgcgtccaacgacgtcttcctcaagcagctcggggtggcgtccaggctcaagcacgacaacttcgtccgcctgctcgggtacaccatcagcggcgacctccgcgtgctggtctacgagttcgccaccatgggcaccctccacgacgtgcttcacggggacagggatgtgctgaggctaccgccgccggagcagctgggcagcgccgccaggccggtgctgagctggattcaccgcgtgcacatcgcgctggatgcggcgagggggctggagtacctgcacgagatggtgcagccgccggtgacgcacaaggacgtgcgctccaccaacgtcctgctgttcgacggcttcagggccaagatcgccgactacaacatgttcagccaggccgcggacatggccaggctcaaccgctccacgcacacgctcggttccttcggctaccaggcgcccgagtacgccatgacgggccagatgacggacaagagcgacgtgtacagcttcggcatcgttctcctggagctcctgacgggtaggaagccattggaccggacgctgccgccgggccagcgaagcctggtgaactgggcaactccgatgctgacggaagacagggttcaggaatgcatcgatccgcaacttggtgatcagtatcctcctgctggagctgtcaagctcgggcgaatcgcggtgcagtgcctgcagtacgaccccaccttccggccgtccatgggcaccgtcgcccgcgtcatcaactacgccgtcttgcgagaccagcagggcgtcgtctgatttgatggcatgccgaattttgctactatagctgtgaatatcatgcatgtcttgctgtgctatatgttatgtaagctgagcagcggttattatctgagaatggatactatccttggaagcagcacggaatggttgcggttacgaccatgcataaaacaatgggctagtttgtaatatcaatatatttttctctgagaatg

SEQ ID NO: 40221 - protein, 374 aa, Zea mays subsp. mays
  peptide (1)..(374): Ceres Seq. ID no. 12375568
  misc_feature (1)..(374): NCBI GI NO: 38345233 NR Description: OSJNBa0084K20.11
  misc_feature (35)..(362): NCBI GI NO: 29838544 NR Description: protein kinase Pti1 [Glycine max]
  misc_feature (37)..(362): NCBI GI NO: 11259776 NR Description: protein kinase-like protein - Arabidopsis thaliana
  misc_feature (37)..(362): NCBI GI NO: 30694970 NR Description: serine/threonine protein kinase, putative
  misc_feature (37)..(362): NCBI GI NO: 30694972 NR Description: serine/threonine protein kinase, putative
  misc_feature (43)..(362): NCBI GI NO: 18406188 NR Description: putative protein kinase; protein id: At2g43230
  misc_feature (43)..(362): NCBI GI NO: 25287594 NR Description: probable protein kinase
  misc_feature (36)..(363): NCBI GI NO: 34907668 NR Description: putative protein kinase
  misc_feature (52)..(362): NCBI GI NO: 15224557 NR Description: putative protein kinase; protein id: At2g30740.1
  misc_feature (40)..(362): NCBI GI NO: 13877995 NR Description: putative protein kinase interactor
MGWWENAKSVFGDAGNVGCFPRIGRKQSKNSYAFPADPGSEKRRGSGGPAPAPEEVITVEVPEVRLRELNEITASFSGEKLIGQGSYAKVYQATTRTGRLAVVKRLEKPSKHASNDVFLKQLGVASRLKHDNFVRLLGYTISGDLRVLVYEFATMGTLHDVLHGDRDVLRLPPPEQLGSAARPVLSWIHRVHIALDAARGLEYLHEMVQPPVTHKDVRSTNVLLFDGFRAKIADYNMFSQAADMARLNRSTHTLGSFGYQAPEYAMTGQMTDKSDVYSFGIVLLELLTGRKPLDRTLPPGQRSLVNWATPMLTEDRVQECIDPQLGDQYPPAGAVKLGRIAVQCLQYDPTFRPSMGTVARVINYAVLRDQQGVV

SEQ ID NO: 40222 - protein, 220 aa, Zea mays subsp. mays
  peptide (1)..(220): Ceres Seq. ID no. 12375569
  misc_feature (1)..(220): NCBI GI NO: 38345233 NR Description: OSJNBa0084K20.11
  misc_feature (1)..(208): NCBI GI NO: 29838544 NR Description: protein kinase Pti1 [Glycine max]
  misc_feature (1)..(208): NCBI GI NO: 11259776 NR Description: protein kinase-like protein - Arabidopsis thaliana
  misc_feature (1)..(208): NCBI GI NO: 30694970 NR Description: serine/threonine protein kinase, putative
  misc_feature (1)..(208): NCBI GI NO: 30694972 NR Description: serine/threonine protein kinase, putative
  misc_feature (1)..(208): NCBI GI NO: 18406188 NR Description: putative protein kinase; protein id: At2g43230
  misc_feature (1)..(208): NCBI GI NO: 25287594 NR Description: probable protein kinase
  misc_feature (1)..(209): NCBI GI NO: 34907668 NR Description: putative protein kinase
  misc_feature (1)..(208): NCBI GI NO: 15224557 NR Description: putative protein kinase; protein id: At2g30740.1
  misc_feature (1)..(208): NCBI GI NO: 13877995 NR Description: putative protein kinase interactor
MGTLHDVLHGDRDVLRLPPPEQLGSAARPVLSWIHRVHIALDAARGLEYLHEMVQPPVTHKDVRSTNVLLFDGFRAKIADYNMFSQAADMARLNRSTHTLGSFGYQAPEYAMTGQMTDKSDVYSFGIVLLELLTGRKPLDRTLPPGQRSLVNWATPMLTEDRVQECIDPQLGDQYPPAGAVKLGRIAVQCLQYDPTFRPSMGTVARVINYAVLRDQQGVV

SEQ ID NO: 40223 - DNA, 1336 bp, Zea mays subsp. mays
  misc_feature (1)..(1336): Ceres Seq. ID no. 12376632
  misc_feature (693)..(693): n is a, c, t, g, unknown, or other
  misc_feature (692)..(692): n is a, c, t, g, unknown, or other
gcacgagaccattacctagaacatcctaatcgaaaaatcagttcagtaagttcagccttcttgacttgtacagttgtactgaggtaggtctcgtctgagttggcaacgaccatgcctgccgtctcggccgccgcctgctgcgccgccacaacgccggcaaacgaggtggcggaggacctcctcggcttcctccgcgttctcagagacggcaccgtgctccggtcgccggcggacccagtgttctgcccggccaccttccccggcagccacccgtccgtgcagtggaaggaggccgtctacgacaagcccaagaacctccgcgtccgcgtgtacaggccgacgacgccgccggggacgaagaagaagctcccagtgctcgtccacttccacggcggcggcttctgcctggggtcgtgcacgtgggccaacgtccacgagttctgcctccgcctggccgcggaggccggcgccgtcgtgctctccgcgggataccgcctggcccccgagcaccgcctccccgcggccttcgacgacggggccgggttcatgcgctggctccgggaccagtcagcgatcggcggcgccggcgcctccgacgcctggctcgcggaggccgccgatttcggccgcgtgctcgtcaccggcgactcggcgggcgccacgatcgcgcaccacctcgccgtgcgcgccgnnctcggccgcggcggagccagagccggagccggagccgggcctcctcacggtccgcggctacgttctgctcatgccgttcttcggcggcgtccggcgcacggcctcggaggccgagtgcgcggaggaggcgttcccgaaccttgacctggtggaccggttctggaggctgtcgctgccggccggcgccaccagggaccacccggcgtccaacccgttcgggccggacagccctgacctgggcccggtggacttccggtccgtgctcgtggtggccggcggcctcgacctgatacgcgaccgcaccgtcgactacgccgagcggctggcggcgatgggcaagcccgtggagctcgccgagttcgccggcatgccccacgggttctacctgcaccagccggggtcccaggccaccggcgagctcatccagaccgtcgcccggttcgtccacgtcgttgcgccagaggctgcggcttaatttactcggcatatgcatgcatccgtgcatgtatcccgtttcttgtcgtcgtgttgtggttcactcgtatacctcatcttttttctcttatgaaattcttgtagagtaaaacccttctctctctgatgtctcggttgaatgatccaaataatggaccactggtttggg

SEQ ID NO: 40224 - protein, 241 aa, Zea mays subsp. mays
  peptide (1)..(241): Ceres Seq. ID no. 12376633
  misc_feature (74)..(131): Pfam Name: Pfam Description:  Carboxylesterase
  misc_feature (1)..(208): NCBI GI NO: 34899932 NR Description: putative cell death associated protein
  misc_feature (19)..(202): NCBI GI NO: 34899936 NR Description: putative cell death associated protein
  misc_feature (11)..(198): NCBI GI NO: 27819508 NR Description: putative esterase
  misc_feature (15)..(197): NCBI GI NO: 34895938 NR Description: P0030H07.40
  misc_feature (1)..(197): NCBI GI NO: 34895916 NR Description: P0030H07.24
  misc_feature (18)..(196): NCBI GI NO: 15240090 NR Description: putative protein; protein id: At5g06570.1
  misc_feature (60)..(192): NCBI GI NO: 34904760 NR Description: similar to carboxylesterase
  misc_feature (60)..(221): NCBI GI NO: 34904758 NR Description: hypothetical protein~predicted by GeneMark
  misc_feature (77)..(193): NCBI GI NO: 15229371 NR Description: putative protein; protein id: At3g63010.1
  misc_feature (19)..(193): NCBI GI NO: 34393323 NR Description: putative cell death associated protein
  misc_feature (194)..(194): Xaa is any aa, unknown or other
MPAVSAAACCAATTPANEVAEDLLGFLRVLRDGTVLRSPADPVFCPATFPGSHPSVQWKEAVYDKPKNLRVRVYRPTTPPGTKKKLPVLVHFHGGGFCLGSCTWANVHEFCLRLAAEAGAVVLSAGYRLAPEHRLPAAFDDGAGFMRWLRDQSAIGGAGASDAWLAEAADFGRVLVTGDSAGATIAHHLAVRAXLGRGGARAGAGAGPPHGPRLRSAHAVLRRRPAHGLGGRVRGGGVPEP

SEQ ID NO: 40225 - protein, 134 aa, Zea mays subsp. mays
  peptide (1)..(134): Ceres Seq. ID no. 12376634
  misc_feature (1)..(130): NCBI GI NO: 34899932 NR Description: putative cell death associated protein
  misc_feature (1)..(125): NCBI GI NO: 34899936 NR Description: putative cell death associated protein
  misc_feature (1)..(134): NCBI GI NO: 27819508 NR Description: putative esterase
  misc_feature (1)..(126): NCBI GI NO: 34895938 NR Description: P0030H07.40
  misc_feature (1)..(126): NCBI GI NO: 34895916 NR Description: P0030H07.24
  misc_feature (1)..(126): NCBI GI NO: 15240090 NR Description: putative protein; protein id: At5g06570.1
  misc_feature (1)..(125): NCBI GI NO: 34904760 NR Description: similar to carboxylesterase
  misc_feature (1)..(125): NCBI GI NO: 34904758 NR Description: hypothetical protein~predicted by GeneMark
  misc_feature (1)..(128): NCBI GI NO: 15229371 NR Description: putative protein; protein id: At3g63010.1
  misc_feature (1)..(134): NCBI GI NO: 34393323 NR Description: putative cell death associated protein
MPFFGGVRRTASEAECAEEAFPNLDLVDRFWRLSLPAGATRDHPASNPFGPDSPDLGPVDFRSVLVVAGGLDLIRDRTVDYAERLAAMGKPVELAEFAGMPHGFYLHQPGSQATGELIQTVARFVHVVAPEAAA

SEQ ID NO: 40226 - DNA, 454 bp, Zea mays subsp. mays
  misc_feature (1)..(454): Ceres Seq. ID no. 12637897
cactcgcgtccgcccccgccgccgcctttcgtcccagcccctaaaccattctccattcctctcatcagtttagcacaatggcactggctaataagcttggtggtctgctcaagaaagccacaagttcaaatctgtctgtctaccaagcaatcagatgcatgtcatccaagctctttgttggagggatttcttatcaaactgatgatcacagtctcagggacgagtttgccaaatatgggcaagtcattgaagctaggattatcattgaccttgaatctgggaggtctagaggttttggctttgtaacttacacgtcttctgaggaggcttcagctgccattactgccttggatggaaagactctcgatggacggagcatacgtgttaatcatgctaacgagaagacaggtgcgccaagagcaaggcgagtcgcgagaggaagatgctaggaggg

SEQ ID NO: 40227 - protein, 123 aa, Zea mays subsp. mays
  peptide (1)..(123): Ceres Seq. ID no. 12637898
  misc_feature (32)..(103): Pfam Name: a.k.a. RRM, RBD, or RNP domain Pfam Description: RNA recognition motif.
  misc_feature (1)..(110): NCBI GI NO: 15239505 NR Description: glycine-rich RNA-binding protein
  misc_feature (1)..(115): NCBI GI NO: 2826811 NR Description: AtGRP2 [Arabidopsis thaliana]
  misc_feature (1)..(115): NCBI GI NO: 15236359 NR Description: glycine-rich RNA-binding protein AtGRP2
  misc_feature (1)..(115): NCBI GI NO: 30682622 NR Description: glycine-rich RNA-binding protein (AtGRP2)
  misc_feature (1)..(109): NCBI GI NO: 1084415 NR Description: RNA-binding protein - wood tobacco
  misc_feature (1)..(114): NCBI GI NO: 7439994 NR Description: glycine-rich RNA-binding protein - garden pea
  misc_feature (1)..(112): NCBI GI NO: 15822703 NR Description: RNA-binding protein precursor [Nicotiana tabacum]
  misc_feature (1)..(115): NCBI GI NO: 7439995 NR Description: RNA binding protein 3 - wood tobacco
  misc_feature (1)..(115): NCBI GI NO: 7489099 NR Description: RNA-binding protein RGP-3 - wood tobacco
  misc_feature (1)..(95): NCBI GI NO: 19881711 NR Description: Putative RNA-binding protein [Oryza sativa]
MALANKLGGLLKKATSSNLSVYQAIRCMSSKLFVGGISYQTDDHSLRDEFAKYGQVIEARIIIDLESGRSRGFGFVTYTSSEEASAAITALDGKTLDGRSIRVNHANEKTGAPRARRVARGRC

SEQ ID NO: 40228 - protein, 101 aa, Zea mays subsp. mays
  peptide (1)..(101): Ceres Seq. ID no. 12637899
HSRPPPPPPFVPAPKPFSIPLISLAQWHWLISLVVCSRKPQVQICLSTKQSDACHPSSLLEGFLIKLMITVSGTSLPNMGKSLKLGLSLTLNLGGLEVLAL

SEQ ID NO: 40229 - protein, 96 aa, Zea mays subsp. mays
  peptide (1)..(96): Ceres Seq. ID no. 12637900
  misc_feature (5)..(76): Pfam Name: a.k.a. RRM, RBD, or RNP domain Pfam Description: RNA recognition motif.
  misc_feature (1)..(83): NCBI GI NO: 15239505 NR Description: glycine-rich RNA-binding protein
  misc_feature (1)..(88): NCBI GI NO: 2826811 NR Description: AtGRP2 [Arabidopsis thaliana]
  misc_feature (1)..(88): NCBI GI NO: 15236359 NR Description: glycine-rich RNA-binding protein AtGRP2
  misc_feature (1)..(88): NCBI GI NO: 30682622 NR Description: glycine-rich RNA-binding protein (AtGRP2)
  misc_feature (1)..(82): NCBI GI NO: 1084415 NR Description: RNA-binding protein - wood tobacco
  misc_feature (1)..(87): NCBI GI NO: 7439994 NR Description: glycine-rich RNA-binding protein - garden pea
  misc_feature (1)..(85): NCBI GI NO: 15822703 NR Description: RNA-binding protein precursor [Nicotiana tabacum]
  misc_feature (1)..(88): NCBI GI NO: 7439995 NR Description: RNA binding protein 3 - wood tobacco
  misc_feature (1)..(88): NCBI GI NO: 7489099 NR Description: RNA-binding protein RGP-3 - wood tobacco
  misc_feature (1)..(68): NCBI GI NO: 19881711 NR Description: Putative RNA-binding protein [Oryza sativa]
MSSKLFVGGISYQTDDHSLRDEFAKYGQVIEARIIIDLESGRSRGFGFVTYTSSEEASAAITALDGKTLDGRSIRVNHANEKTGAPRARRVARGRC

SEQ ID NO: 40230 - DNA, 1481 bp, Zea mays subsp. mays
  misc_feature (1)..(1481): Ceres Seq. ID no. 12381705
gcacgagaccattacctagaacatcctaatcgaaaaattgccatctctacccacacgccacacacgcccaccgcatcggagcagaacccaccaaaccctacgtcgccgcggcggtcggagcgggcagggaccctggactggaggatggtggcgatctcgatgtaccgcggcaacctccacattggcggccccgacagcggcgcctctgccccgcgccgatgggaggcgccccggccgaccctcgacgtgaagcggttccgccgcctcctgcgcaaccgcttccgtgctgtcgcgcgcctcgccgggacgccgctggggcaggcctccccgtcctcctcgggcatggatggcggccgtggcgccgcggaccccgagcgggaggcaccggacgaggagggaggagcgggcgacgggggagaagaggagcaggagcagttgcagcacgaccaggaccaggaccagcaacatcaggaggagcaggggaacgtggaggcggaggcggaggatccggaacagcaggaggaagaagaggagggggcggtggaggacgcggacatggaagatgcgggggaggtagtcgttgatggcgatgcggaagaaggtcagggtgaaagtgaaggtgttgacccaaagccggaggaggaggcgagttatcctgatggaattgatgacaagaacagaaaacttaatgaaaagctggacgccctaaataaaaagaagcatggccttgtgcagatgctgaagcaggtcttaaatgctgaagaagaaatccgaaggcgcaacatgcaggcttcattgcgcgctgccatgccccagccatcagaaaacgcaacagatggaagttctgtttctaggttggcccctagaatgactgttgatgtcaattttggtgatgttgctggcgattcagatgctggttccaaccagggcactcctggacgccccttgcatcacttccacagtatctctccttcaacagcctcttttgcgaggtcaccgtttggttctctacagggccacactccaaggagtccggcaacattctctacggcaagtccatcacgcttcgccacaaatatacacccaggacaacctcctgctctttattcagcatcgttgccaggaagtaactatgtagccacatcaccttccccggccgcatctggtggttcctcctcggtgttcagggaccctcggccacctaactctacataggttctatgctttgctcggagttctactcattggtaatgttgctaaattctctacccagggatttaggtaatgtcgtgcttcgggcaacactagtgttaaaacaaattcgtgtctctgtgaacggtaaataacgtgatagcactgaaattcaaaattagtatattaatttcacaattatattatattaaaaacaaggcttgtactcggtctaggggaaagatcacctccaatcgttgccccgactaattgcaaacttcccttttccc

SEQ ID NO: 40231 - protein, 404 aa, Zea mays subsp. mays
  peptide (1)..(404): Ceres Seq. ID no. 12381706
  misc_feature (140)..(231): Pfam Name: Pfam Description:  Prothymosin/parathymosin family
  misc_feature (171)..(399): NCBI GI NO: 15228266 NR Description: putative protein; protein id: At3g47850
  misc_feature (171)..(399): NCBI GI NO: 21592503 NR Description: unknown [Arabidopsis thaliana]
  misc_feature (125)..(314): NCBI GI NO: 29828894 NR Description: hypothetical protein
  misc_feature (106)..(271): NCBI GI NO: 30348579 NR Description: hypothetical protein [Saimiriine herpesvirus 2]
  misc_feature (99)..(232): NCBI GI NO: 9631239 NR Description: orf 48 [Ateline herpesvirus 3]
  misc_feature (106)..(271): NCBI GI NO: 30526291 NR Description: latency associated nuclear antigen
  misc_feature (117)..(221): NCBI GI NO: 15705840 NR Description: latency associated antigen [Ovine herpesvirus 2]
  misc_feature (104)..(220): NCBI GI NO: 15705840 NR Description: latency associated antigen [Ovine herpesvirus 2]
ARDHYLEHPNRKIAISTHTPHTPTASEQNPPNPTSPRRSERAGTLDWRMVAISMYRGNLHIGGPDSGASAPRRWEAPRPTLDVKRFRRLLRNRFRAVARLAGTPLGQASPSSSGMDGGRGAADPEREAPDEEGGAGDGGEEEQEQLQHDQDQDQQHQEEQGNVEAEAEDPEQQEEEEEGAVEDADMEDAGEVVVDGDAEEGQGESEGVDPKPEEEASYPDGIDDKNRKLNEKLDALNKKKHGLVQMLKQVLNAEEEIRRRNMQASLRAAMPQPSENATDGSSVSRLAPRMTVDVNFGDVAGDSDAGSNQGTPGRPLHHFHSISPSTASFARSPFGSLQGHTPRSPATFSTASPSRFATNIHPGQPPALYSASLPGSNYVATSPSPAASGGSSSVFRDPRPPNST

SEQ ID NO: 40232 - protein, 356 aa, Zea mays subsp. mays
  peptide (1)..(356): Ceres Seq. ID no. 12381707
  misc_feature (92)..(183): Pfam Name: Pfam Description:  Prothymosin/parathymosin family
  misc_feature (123)..(351): NCBI GI NO: 15228266 NR Description: putative protein; protein id: At3g47850
  misc_feature (123)..(351): NCBI GI NO: 21592503 NR Description: unknown [Arabidopsis thaliana]
  misc_feature (77)..(266): NCBI GI NO: 29828894 NR Description: hypothetical protein
  misc_feature (58)..(223): NCBI GI NO: 30348579 NR Description: hypothetical protein [Saimiriine herpesvirus 2]
  misc_feature (51)..(184): NCBI GI NO: 9631239 NR Description: orf 48 [Ateline herpesvirus 3]
  misc_feature (58)..(223): NCBI GI NO: 30526291 NR Description: latency associated nuclear antigen
  misc_feature (69)..(173): NCBI GI NO: 15705840 NR Description: latency associated antigen [Ovine herpesvirus 2]
  misc_feature (56)..(172): NCBI GI NO: 15705840 NR Description: latency associated antigen [Ovine herpesvirus 2]
MVAISMYRGNLHIGGPDSGASAPRRWEAPRPTLDVKRFRRLLRNRFRAVARLAGTPLGQASPSSSGMDGGRGAADPEREAPDEEGGAGDGGEEEQEQLQHDQDQDQQHQEEQGNVEAEAEDPEQQEEEEEGAVEDADMEDAGEVVVDGDAEEGQGESEGVDPKPEEEASYPDGIDDKNRKLNEKLDALNKKKHGLVQMLKQVLNAEEEIRRRNMQASLRAAMPQPSENATDGSSVSRLAPRMTVDVNFGDVAGDSDAGSNQGTPGRPLHHFHSISPSTASFARSPFGSLQGHTPRSPATFSTASPSRFATNIHPGQPPALYSASLPGSNYVATSPSPAASGGSSSVFRDPRPPNST

SEQ ID NO: 40233 - protein, 351 aa, Zea mays subsp. mays
  peptide (1)..(351): Ceres Seq. ID no. 12381708
  misc_feature (87)..(178): Pfam Name: Pfam Description:  Prothymosin/parathymosin family
  misc_feature (118)..(346): NCBI GI NO: 15228266 NR Description: putative protein; protein id: At3g47850
  misc_feature (118)..(346): NCBI GI NO: 21592503 NR Description: unknown [Arabidopsis thaliana]
  misc_feature (72)..(261): NCBI GI NO: 29828894 NR Description: hypothetical protein
  misc_feature (53)..(218): NCBI GI NO: 30348579 NR Description: hypothetical protein [Saimiriine herpesvirus 2]
  misc_feature (46)..(179): NCBI GI NO: 9631239 NR Description: orf 48 [Ateline herpesvirus 3]
  misc_feature (53)..(218): NCBI GI NO: 30526291 NR Description: latency associated nuclear antigen
  misc_feature (64)..(168): NCBI GI NO: 15705840 NR Description: latency associated antigen [Ovine herpesvirus 2]
  misc_feature (51)..(167): NCBI GI NO: 15705840 NR Description: latency associated antigen [Ovine herpesvirus 2]
MYRGNLHIGGPDSGASAPRRWEAPRPTLDVKRFRRLLRNRFRAVARLAGTPLGQASPSSSGMDGGRGAADPEREAPDEEGGAGDGGEEEQEQLQHDQDQDQQHQEEQGNVEAEAEDPEQQEEEEEGAVEDADMEDAGEVVVDGDAEEGQGESEGVDPKPEEEASYPDGIDDKNRKLNEKLDALNKKKHGLVQMLKQVLNAEEEIRRRNMQASLRAAMPQPSENATDGSSVSRLAPRMTVDVNFGDVAGDSDAGSNQGTPGRPLHHFHSISPSTASFARSPFGSLQGHTPRSPATFSTASPSRFATNIHPGQPPALYSASLPGSNYVATSPSPAASGGSSSVFRDPRPPNST

SEQ ID NO: 40234 - DNA, 534 bp, Zea mays subsp. mays
  misc_feature (1)..(534): Ceres Seq. ID no. 12417822
ccgaggcctaagatgtccaacgctgacctgggcaggatcatcaactctgacgaggtgcagtctgtggtgaagccactcaacaaggaagtgaagcgcagggagaagaggaagaacccactcaagaacatggctgctgtgctcaaactcaacccctacctcggcactgcccggaagatggccacccttgctgaggctgctcgtgtgaaggccaggaaggcgaagctcgactccaagaggaccaagcttaccccggagactgccaaggttaaggctgctggcaaggcatggtacaagaccatggtctcggacagcgactacaccgagtttgagaacttctcaaagtggctcggcgtgactcagtgagcggcaagggtagttaagttttgagtagctcagcttatgttgagaggaaagaggatccatcaaatctgttttatcctgcatcatcataacaagttgctacaagtcttgcatgttcgtgttgtttgtgcatttccgcgagaacatagtatttttatattcgaaccagttgtc

SEQ ID NO: 40235 - protein, 120 aa, Zea mays subsp. mays
  peptide (1)..(120): Ceres Seq. ID no. 12417823
  misc_feature (1)..(120): NCBI GI NO: 34393487 NR Description: putative 60S ribosomal protein L4/L1
  misc_feature (1)..(120): NCBI GI NO: 34897236 NR Description: putative 60S ribosomal protein L1
  misc_feature (1)..(120): NCBI GI NO: 15232723 NR Description: putative 60S ribosomal protein L1
  misc_feature (1)..(120): NCBI GI NO: 21593543 NR Description: 60S ribosomal protein L4-B (L1)
  misc_feature (1)..(120): NCBI GI NO: 17367847 NR Description: 60S ribosomal protein L4 (L1)
  misc_feature (1)..(120): NCBI GI NO: 13605831 NR Description: AT5g02870/F9G14_180 [Arabidopsis thaliana]
  misc_feature (1)..(120): NCBI GI NO: 15242558 NR Description: 60S ribosomal protein - like; protein id:At5g02870
  misc_feature (1)..(120): NCBI GI NO: 26450328 NR Description: putative 60S ribosomal protein
  misc_feature (1)..(120): NCBI GI NO: 6441068 NR Description: 60S ribosomal protein L4 [Chlamydomonas sp. HS-5]
  misc_feature (26)..(120): NCBI GI NO: 25403525 NR Description: probable 60S ribosomal protein
PRPKMSNADLGRIINSDEVQSVVKPLNKEVKRREKRKNPLKNMAAVLKLNPYLGTARKMATLAEAARVKARKAKLDSKRTKLTPETAKVKAAGKAWYKTMVSDSDYTEFENFSKWLGVTQ

SEQ ID NO: 40236 - protein, 116 aa, Zea mays subsp. mays
  peptide (1)..(116): Ceres Seq. ID no. 12417824
  misc_feature (1)..(116): NCBI GI NO: 34393487 NR Description: putative 60S ribosomal protein L4/L1
  misc_feature (1)..(116): NCBI GI NO: 34897236 NR Description: putative 60S ribosomal protein L1
  misc_feature (1)..(116): NCBI GI NO: 15232723 NR Description: putative 60S ribosomal protein L1
  misc_feature (1)..(116): NCBI GI NO: 21593543 NR Description: 60S ribosomal protein L4-B (L1)
  misc_feature (1)..(116): NCBI GI NO: 17367847 NR Description: 60S ribosomal protein L4 (L1)
  misc_feature (1)..(116): NCBI GI NO: 13605831 NR Description: AT5g02870/F9G14_180 [Arabidopsis thaliana]
  misc_feature (1)..(116): NCBI GI NO: 15242558 NR Description: 60S ribosomal protein - like; protein id:At5g02870
  misc_feature (1)..(116): NCBI GI NO: 26450328 NR Description: putative 60S ribosomal protein
  misc_feature (1)..(116): NCBI GI NO: 6441068 NR Description: 60S ribosomal protein L4 [Chlamydomonas sp. HS-5]
  misc_feature (22)..(116): NCBI GI NO: 25403525 NR Description: probable 60S ribosomal protein
MSNADLGRIINSDEVQSVVKPLNKEVKRREKRKNPLKNMAAVLKLNPYLGTARKMATLAEAARVKARKAKLDSKRTKLTPETAKVKAAGKAWYKTMVSDSDYTEFENFSKWLGVTQ

SEQ ID NO: 40237 - protein, 78 aa, Zea mays subsp. mays
  peptide (1)..(78): Ceres Seq. ID no. 12417825
  misc_feature (1)..(78): NCBI GI NO: 34393487 NR Description: putative 60S ribosomal protein L4/L1
  misc_feature (1)..(78): NCBI GI NO: 34897236 NR Description: putative 60S ribosomal protein L1
  misc_feature (1)..(78): NCBI GI NO: 15232723 NR Description: putative 60S ribosomal protein L1
  misc_feature (1)..(78): NCBI GI NO: 21593543 NR Description: 60S ribosomal protein L4-B (L1)
  misc_feature (1)..(78): NCBI GI NO: 17367847 NR Description: 60S ribosomal protein L4 (L1)
  misc_feature (1)..(78): NCBI GI NO: 13605831 NR Description: AT5g02870/F9G14_180 [Arabidopsis thaliana]
  misc_feature (1)..(78): NCBI GI NO: 15242558 NR Description: 60S ribosomal protein - like; protein id:At5g02870
  misc_feature (1)..(78): NCBI GI NO: 26450328 NR Description: putative 60S ribosomal protein
  misc_feature (1)..(78): NCBI GI NO: 6441068 NR Description: 60S ribosomal protein L4 [Chlamydomonas sp. HS-5]
  misc_feature (1)..(78): NCBI GI NO: 25403525 NR Description: probable 60S ribosomal protein
MAAVLKLNPYLGTARKMATLAEAARVKARKAKLDSKRTKLTPETAKVKAAGKAWYKTMVSDSDYTEFENFSKWLGVTQ

SEQ ID NO: 40238 - DNA, 1022 bp, Zea mays subsp. mays
  misc_feature (1)..(1022): Ceres Seq. ID no. 12355114
aataccagagcattagacgatcgtactttgtgaggcgctggtctcttgcacagactcggagcaagataggcctagctggttacaagccaagaacaagtagagcggtagagggaaaatatatctggagagggaaacaatggcgggcgaggagggtcttaaggtcctcggcctgcaggtgagcccgttcgtgctccgcgtgtgcttggcgctgaacatgaaaggagtgagttacgagtacgtcgaggaggacatatccaacaagagtgagctcctgctcaagtccaacccggtgcacaagaaggtgcccgtgctcatccacaacggtaagcccatctgcgagtcactcgtcatcatgcagtacgtcgacgagctgttcgccggccggccgatcctcccaaccgacccctacgagcgcgccactgctcgcttctgggctgcctacgccgacgacaagttgtttccagcgtggtacggcatggtgaaggcccagccggaggaggagagggcggagaaggcgaaggagacgctcgccgccatcgagcacatggaagtgaccttcgccaagtgctccggcggcaacgccttcttcggtggcgactccatcggctacgtcgacatcgtgctgacgtgctcggctccttcttgttctggttcgaggcggtgcgcagggttttcgacctggagatcattaacgctagcaagactccgctgttggctgcgtgggcggagcggtttgtagggactgtagaagcgaaggaggtggtgccgttgcccacggcggacatggcggtacagtacatcaataagcttcatgcccccctgccgccgccatgagttcacaatgagtcgtgtaagtgtaaccaagcagggaaaaaggtaaatggtgcggtgctttggtccaaattccaaccgaataatgttcaaagcttatattgataggcttgggttgttgtcatcaaatattgtggttcagtcgtctcctctgcaataaatataaatatgattattactttctttgccgt

SEQ ID NO: 40239 - protein, 200 aa, Zea mays subsp. mays
  peptide (1)..(200): Ceres Seq. ID no. 12355115
  misc_feature (86)..(163): Pfam Name: Pfam Description:  Glutathione S-transferase, C-terminal domain
  misc_feature (1)..(163): NCBI GI NO: 11385517 NR Description: glutathione S-transferase GST 33 [Zea mays]
  misc_feature (1)..(200): NCBI GI NO: 11385529 NR Description: glutathione S-transferase GST 39 [Zea mays]
  misc_feature (1)..(166): NCBI GI NO: 22022398 NR Description: glutathione-S-transferase Cla47
  misc_feature (1)..(178): NCBI GI NO: 37536352 NR Description: putative glutathione S-transferase
  misc_feature (5)..(178): NCBI GI NO: 11385503 NR Description: glutathione S-transferase GST 26 [Zea mays]
  misc_feature (3)..(163): NCBI GI NO: 37536280 NR Description: putative glutathione S-transferase
  misc_feature (2)..(163): NCBI GI NO: 37536308 NR Description: putative glutathione S-transferase
  misc_feature (3)..(163): NCBI GI NO: 37536250 NR Description: putative glutathione S-transferase
  misc_feature (1)..(163): NCBI GI NO: 11385535 NR Description: glutathione S-transferase GST 42 [Zea mays]
  misc_feature (1)..(163): NCBI GI NO: 20067421 NR Description: glutathione transferase [Triticum aestivum]
MAGEEGLKVLGLQVSPFVLRVCLALNMKGVSYEYVEEDISNKSELLLKSNPVHKKVPVLIHNGKPICESLVIMQYVDELFAGRPILPTDPYERATARFWAAYADDKLFPAWYGMVKAQPEEERAEKAKETLAAIEHMEVTFAKCSGGNAFFGGDSIGYVDIVLTCSAPSCSGSRRCAGFSTWRSLTLARLRCWLRGRSGL

SEQ ID NO: 40240 - protein, 174 aa, Zea mays subsp. mays
  peptide (1)..(174): Ceres Seq. ID no. 12355116
  misc_feature (60)..(137): Pfam Name: Pfam Description:  Glutathione S-transferase, C-terminal domain
  misc_feature (1)..(137): NCBI GI NO: 11385517 NR Description: glutathione S-transferase GST 33 [Zea mays]
  misc_feature (1)..(174): NCBI GI NO: 11385529 NR Description: glutathione S-transferase GST 39 [Zea mays]
  misc_feature (1)..(140): NCBI GI NO: 22022398 NR Description: glutathione-S-transferase Cla47
  misc_feature (1)..(152): NCBI GI NO: 37536352 NR Description: putative glutathione S-transferase
  misc_feature (1)..(152): NCBI GI NO: 11385503 NR Description: glutathione S-transferase GST 26 [Zea mays]
  misc_feature (1)..(137): NCBI GI NO: 37536280 NR Description: putative glutathione S-transferase
  misc_feature (1)..(137): NCBI GI NO: 37536308 NR Description: putative glutathione S-transferase
  misc_feature (1)..(137): NCBI GI NO: 37536250 NR Description: putative glutathione S-transferase
  misc_feature (1)..(137): NCBI GI NO: 11385535 NR Description: glutathione S-transferase GST 42 [Zea mays]
  misc_feature (1)..(137): NCBI GI NO: 20067421 NR Description: glutathione transferase [Triticum aestivum]
MKGVSYEYVEEDISNKSELLLKSNPVHKKVPVLIHNGKPICESLVIMQYVDELFAGRPILPTDPYERATARFWAAYADDKLFPAWYGMVKAQPEEERAEKAKETLAAIEHMEVTFAKCSGGNAFFGGDSIGYVDIVLTCSAPSCSGSRRCAGFSTWRSLTLARLRCWLRGRSGL

SEQ ID NO: 40241 - protein, 128 aa, Zea mays subsp. mays
  peptide (1)..(128): Ceres Seq. ID no. 12355117
  misc_feature (14)..(91): Pfam Name: Pfam Description:  Glutathione S-transferase, C-terminal domain
  misc_feature (1)..(91): NCBI GI NO: 11385517 NR Description: glutathione S-transferase GST 33 [Zea mays]
  misc_feature (1)..(128): NCBI GI NO: 11385529 NR Description: glutathione S-transferase GST 39 [Zea mays]
  misc_feature (1)..(94): NCBI GI NO: 22022398 NR Description: glutathione-S-transferase Cla47
  misc_feature (1)..(106): NCBI GI NO: 37536352 NR Description: putative glutathione S-transferase
  misc_feature (1)..(106): NCBI GI NO: 11385503 NR Description: glutathione S-transferase GST 26 [Zea mays]
  misc_feature (1)..(91): NCBI GI NO: 37536280 NR Description: putative glutathione S-transferase
  misc_feature (1)..(91): NCBI GI NO: 37536308 NR Description: putative glutathione S-transferase
  misc_feature (1)..(91): NCBI GI NO: 37536250 NR Description: putative glutathione S-transferase
  misc_feature (1)..(91): NCBI GI NO: 11385535 NR Description: glutathione S-transferase GST 42 [Zea mays]
  misc_feature (1)..(91): NCBI GI NO: 20067421 NR Description: glutathione transferase [Triticum aestivum]
MQYVDELFAGRPILPTDPYERATARFWAAYADDKLFPAWYGMVKAQPEEERAEKAKETLAAIEHMEVTFAKCSGGNAFFGGDSIGYVDIVLTCSAPSCSGSRRCAGFSTWRSLTLARLRCWLRGRSGL

SEQ ID NO: 40242 - DNA, 635 bp, Zea mays subsp. mays
  misc_feature (1)..(635): Ceres Seq. ID no. 12417963
ggactgcgatggctcgtgcgctcggcgcttgcgtgctgctcgccgtcctgctcggtgccctggcggcggcggccgcgcgcggcccacgacgaccagggcagcggggccggcatacggcagccgagcggcgagtaccgcgggaggaaggtgggggccaggacggaggtgcgggacgtggagggcgacggcgaggtgcaggagctcggccggttctccgtcgccgagtacaaccggcagctccgagaaggcggcggcaggctcgagttcggcagggtggtggcggcgcagcggcaggtggtgtcggggctcaagtactacctccgcgtcgtggccgtggaggagggcggcggcgcggggaacggcggcgagcgcgtgttcgacgccgtcgtcgtcgtcaagccctggctcgactcgcgcaccctgctcacgttcgcgccggcggccgccaagtaagcgcggcgctaccgccggtgtagacgtctagtgtagtatctctggtctgcccttctcggagaccatggacgctgaataaagtcttgtgtgttttgtataagcgaagcgtactagagagtgaagatggacgaactctgcgctgccgcgcgcagatcgatgttttttttttcaaaggctgttgc

SEQ ID NO: 40243 - protein, 160 aa, Zea mays subsp. mays
  peptide (1)..(160): Ceres Seq. ID no. 12417964
DCDGSCARRLRAARRPARCPGGGGRARPTTTRAAGPAYGSRAASTAGGRWGPGRRCGTWRATARCRSSAGSPSPSTTGSSEKAAAGSSSAGWWRRSGRWCRGSSTTSASWPWRRAAARGTAASACSTPSSSSSPGSTRAPCSRSRRRPPSKRGATAGVDV

SEQ ID NO: 40244 - protein, 157 aa, Zea mays subsp. mays
  peptide (1)..(157): Ceres Seq. ID no. 12417965
  misc_feature (19)..(149): NCBI GI NO: 37533408 NR Description: hypothetical protein
  misc_feature (19)..(154): NCBI GI NO: 34393960 NR Description: hypothetical protein
  misc_feature (19)..(147): NCBI GI NO: 34914486 NR Description: B1080D07.24
  misc_feature (27)..(156): NCBI GI NO: 16127179 NR Description: hypothetical protein [Caulobacter crescentus CB15]
TAMARALGACVLLAVLLGALAAAAARGPRRPGQRGRHTAAERRVPREEGGGQDGGAGRGGRRRGAGARPVLRRRVQPAAPRRRRQARVRQGGGGAAAGGVGAQVLPPRRGRGGGRRRGERRRARVRRRRRRQALARLAHPAHVRAGGRQVSAALPPV

SEQ ID NO: 40245 - protein, 155 aa, Zea mays subsp. mays
  peptide (1)..(155): Ceres Seq. ID no. 12417966
  misc_feature (17)..(147): NCBI GI NO: 37533408 NR Description: hypothetical protein
  misc_feature (17)..(152): NCBI GI NO: 34393960 NR Description: hypothetical protein
  misc_feature (17)..(145): NCBI GI NO: 34914486 NR Description: B1080D07.24
  misc_feature (25)..(154): NCBI GI NO: 16127179 NR Description: hypothetical protein [Caulobacter crescentus CB15]
MARALGACVLLAVLLGALAAAAARGPRRPGQRGRHTAAERRVPREEGGGQDGGAGRGGRRRGAGARPVLRRRVQPAAPRRRRQARVRQGGGGAAAGGVGAQVLPPRRGRGGGRRRGERRRARVRRRRRRQALARLAHPAHVRAGGRQVSAALPPV

SEQ ID NO: 40246 - protein, 150 aa, Zea mays subsp. mays
  peptide (1)..(150): Ceres Seq. ID no. 12417967
  misc_feature (28)..(148): NCBI GI NO: 34906946 NR Description: cysteine proteinase inhibitor Scb-like protein
  misc_feature (27)..(149): NCBI GI NO: 32489926 NR Description: OSJNBa0038P21.11
  misc_feature (47)..(150): NCBI GI NO: 27728729 NR Description: cystatin [Malus x domestica]
  misc_feature (51)..(147): NCBI GI NO: 1706277 NR Description: CYSTEINE PROTEINASE INHIBITOR B (CYSTATIN B) (SCB)
  misc_feature (51)..(147): NCBI GI NO: 7438236 NR Description: cysteine proteinase inhibitor - common sunflower
  misc_feature (38)..(147): NCBI GI NO: 7438233 NR Description: cysteine proteinase inhibitor
  misc_feature (50)..(149): NCBI GI NO: 15225164 NR Description: putative cysteine proteinase inhibitor B
  misc_feature (50)..(149): NCBI GI NO: 21593036 NR Description: putative cysteine proteinase inhibitor B
  misc_feature (57)..(147): NCBI GI NO: 18874516 NR Description: cystatin [Sandersonia aurantiaca]
  misc_feature (50)..(146): NCBI GI NO: 22001329 NR Description: cysteine proteinase inhibitor
GLRWLVRSALACCSPSCSVPWRRRPRAAHDDQGSGAGIRQPSGEYRGRKVGARTEVRDVEGDGEVQELGRFSVAEYNRQLREGGGRLEFGRVVAAQRQVVSGLKYYLRVVAVEEGGGAGNGGERVFDAVVVVKPWLDSRTLLTFAPAAAK

SEQ ID NO: 40247 - DNA, 456 bp, Zea mays subsp. mays; identical to SEQ ID NO: 37253
  misc_feature (1)..(456): Ceres Seq. ID no. 12595566

SEQ ID NO: 40248 - protein, 151 aa, Zea mays subsp. mays; identical to SEQ ID NO: 37254
  peptide (1)..(151): Ceres Seq. ID no. 12595567
  misc_feature (80)..(113): Pfam Name: Pfam Description:  KOW motif
  misc_feature (32)..(150): NCBI GI NO: 3747050 NR Description: ribosomal protein L26 [Zea mays]
  misc_feature (32)..(150): NCBI GI NO: 34895672 NR Description: putative ribosomal protein L26
  misc_feature (32)..(150): NCBI GI NO: 15229631 NR Description: 60S RIBOSOMAL PROTEIN - like; protein id:At3g49910
  misc_feature (32)..(150): NCBI GI NO: 15240766 NR Description: 60S ribosomal protein L26; protein id: At5g67510
  misc_feature (32)..(150): NCBI GI NO: 3914740 NR Description: 60S ribosomal protein L26
  misc_feature (32)..(150): NCBI GI NO: 33585605 NR Description: Unknown (protein for MGC:66190) [Danio rerio]
  misc_feature (32)..(150): NCBI GI NO: 7705813 NR Description: ribosomal protein L26-like 1
  misc_feature (32)..(150): NCBI GI NO: 15293919 NR Description: ribosomal protein L26 [Ictalurus punctatus]
  misc_feature (32)..(150): NCBI GI NO: 292435 NR Description: ribosomal protein L26
  misc_feature (32)..(150): NCBI GI NO: 28189641 NR Description: similar to ribosomal protein L26 [Bos taurus]

SEQ ID NO: 40249 - protein, 120 aa, Zea mays subsp. mays; identical to SEQ ID NO: 37255
  peptide (1)..(120): Ceres Seq. ID no. 12595568
  misc_feature (49)..(82): Pfam Name: Pfam Description:  KOW motif
  misc_feature (1)..(119): NCBI GI NO: 3747050 NR Description: ribosomal protein L26 [Zea mays]
  misc_feature (1)..(119): NCBI GI NO: 34895672 NR Description: putative ribosomal protein L26
  misc_feature (1)..(119): NCBI GI NO: 15229631 NR Description: 60S RIBOSOMAL PROTEIN - like; protein id:At3g49910
  misc_feature (1)..(119): NCBI GI NO: 15240766 NR Description: 60S ribosomal protein L26; protein id: At5g67510
  misc_feature (1)..(119): NCBI GI NO: 3914740 NR Description: 60S ribosomal protein L26
  misc_feature (1)..(119): NCBI GI NO: 33585605 NR Description: Unknown (protein for MGC:66190) [Danio rerio]
  misc_feature (1)..(119): NCBI GI NO: 7705813 NR Description: ribosomal protein L26-like 1
  misc_feature (1)..(119): NCBI GI NO: 15293919 NR Description: ribosomal protein L26 [Ictalurus punctatus]
  misc_feature (1)..(119): NCBI GI NO: 292435 NR Description: ribosomal protein L26
  misc_feature (1)..(119): NCBI GI NO: 28189641 NR Description: similar to ribosomal protein L26 [Bos taurus]

SEQ ID NO: 40250 - protein, 96 aa, Zea mays subsp. mays; identical to SEQ ID NO: 37256
  peptide (1)..(96): Ceres Seq. ID no. 12595569

SEQ ID NO: 40251 - DNA, 992 bp, Zea mays subsp. mays
  misc_feature (1)..(992): Ceres Seq. ID no. 12391473
gcacgagaccattacctagaacatcctaatcgaaaagatcgaagtgtgcttgcgtcctgatcccaccaaccgcagaggacagaggaccatggagagcggcacggagcggcggcggcaccacttcgtgctggtgcacggcacctgccacggcgcgtggtgctggtacaaggtggccaccctcctgtcatccgcgggccaccgcgtgacggcgctggacatggccgcgtgcggcgccagccccgggcgcgccgaggaggtgccgtcctttgaggagtacagccgcccgctcctggccacggtggccggcctggcgcccgaggagaaggtggtcctcgtcggccacagcttcggcggggtcagcctcgcgctggccatggagcagtacccggacagggtcgccgtcgccgtcttcgtcgcgaccggcatgccctccgctgggaagccgatggcgttcgtcttcgagcagtttttgcaagaagagtacccagcggaccgctacatggactgcgaattcgaaaccagcggcgacccccagcgtcccgtggagacatttcggttcgggccacagtacctgaagcagagactgtaccagctcagccccccagaggatttgaccctggcaatggcgatgttgaggccgtcacagcggttccgagacgacgcgacgatgaaggggggcgtcctgacggcggagcggtacggcggcgtgaggcgggtgtgcgtcgtcgccgaggacgacgcgtcagtgccggcaggcttcctgcggcggatggcgtcgtggaaccccggcacggaggtgagggggttgcagggagccgatcatatgtccatgctctcgaaaccaggggagctgtcagaacttctcatggaggttgccaacaagtacagctgaaacttgtatcatgtaaatggctatcagcaaaatggttgttcaggtacgcttgtttcagatgaacaaatggagacggaagtttgaagtaacacgatgaaat

SEQ ID NO: 40252 - protein, 267 aa, Zea mays subsp. mays
  peptide (1)..(267): Ceres Seq. ID no. 12391474
  misc_feature (37)..(261): Pfam Name: Pfam Description:  alpha/beta hydrolase fold
  misc_feature (1)..(266): NCBI GI NO: 34907176 NR Description: pir7b protein (Pseudomonas inducible protein)
  misc_feature (9)..(266): NCBI GI NO: 498747 NR Description: Pir7b [Oryza sativa]
  misc_feature (11)..(266): NCBI GI NO: 34907178 NR Description: pir7a protein (Pseudomonas inducible protein)
  misc_feature (11)..(266): NCBI GI NO: 2498778 NR Description: PIR7A PROTEIN
  misc_feature (11)..(267): NCBI GI NO: 40549303 NR Description: salicylic acid-binding protein 2
  misc_feature (1)..(118): NCBI GI NO: 34907174 NR Description: putative pir7b (Pseudomonas inducible protein)
  misc_feature (172)..(266): NCBI GI NO: 34907174 NR Description: putative pir7b (Pseudomonas inducible protein)
  misc_feature (7)..(264): NCBI GI NO: 6651393 NR Description: polyneuridine aldehyde esterase
  misc_feature (6)..(266): NCBI GI NO: 15227867 NR Description: putative acetone-cyanohydrin lyase
  misc_feature (6)..(266): NCBI GI NO: 27754457 NR Description: putative acetone-cyanohydrin lyase
MESGTERRRHHFVLVHGTCHGAWCWYKVATLLSSAGHRVTALDMAACGASPGRAEEVPSFEEYSRPLLATVAGLAPEEKVVLVGHSFGGVSLALAMEQYPDRVAVAVFVATGMPSAGKPMAFVFEQFLQEEYPADRYMDCEFETSGDPQRPVETFRFGPQYLKQRLYQLSPPEDLTLAMAMLRPSQRFRDDATMKGGVLTAERYGGVRRVCVVAEDDASVPAGFLRRMASWNPGTEVRGLQGADHMSMLSKPGELSELLMEVANKYS

SEQ ID NO: 40253 - protein, 224 aa, Zea mays subsp. mays
  peptide (1)..(224): Ceres Seq. ID no. 12391475
  misc_feature (1)..(218): Pfam Name: Pfam Description:  alpha/beta hydrolase fold
  misc_feature (1)..(223): NCBI GI NO: 34907176 NR Description: pir7b protein (Pseudomonas inducible protein)
  misc_feature (1)..(223): NCBI GI NO: 498747 NR Description: Pir7b [Oryza sativa]
  misc_feature (1)..(223): NCBI GI NO: 34907178 NR Description: pir7a protein (Pseudomonas inducible protein)
  misc_feature (1)..(223): NCBI GI NO: 2498778 NR Description: PIR7A PROTEIN
  misc_feature (1)..(224): NCBI GI NO: 40549303 NR Description: salicylic acid-binding protein 2
  misc_feature (1)..(75): NCBI GI NO: 34907174 NR Description: putative pir7b (Pseudomonas inducible protein)
  misc_feature (129)..(223): NCBI GI NO: 34907174 NR Description: putative pir7b (Pseudomonas inducible protein)
  misc_feature (1)..(221): NCBI GI NO: 6651393 NR Description: polyneuridine aldehyde esterase
  misc_feature (1)..(223): NCBI GI NO: 15227867 NR Description: putative acetone-cyanohydrin lyase
  misc_feature (1)..(223): NCBI GI NO: 27754457 NR Description: putative acetone-cyanohydrin lyase
MAACGASPGRAEEVPSFEEYSRPLLATVAGLAPEEKVVLVGHSFGGVSLALAMEQYPDRVAVAVFVATGMPSAGKPMAFVFEQFLQEEYPADRYMDCEFETSGDPQRPVETFRFGPQYLKQRLYQLSPPEDLTLAMAMLRPSQRFRDDATMKGGVLTAERYGGVRRVCVVAEDDASVPAGFLRRMASWNPGTEVRGLQGADHMSMLSKPGELSELLMEVANKYS

SEQ ID NO: 40254 - protein, 172 aa, Zea mays subsp. mays
  peptide (1)..(172): Ceres Seq. ID no. 12391476
  misc_feature (1)..(166): Pfam Name: Pfam Description:  alpha/beta hydrolase fold
  misc_feature (1)..(171): NCBI GI NO: 34907176 NR Description: pir7b protein (Pseudomonas inducible protein)
  misc_feature (1)..(171): NCBI GI NO: 498747 NR Description: Pir7b [Oryza sativa]
  misc_feature (1)..(171): NCBI GI NO: 34907178 NR Description: pir7a protein (Pseudomonas inducible protein)
  misc_feature (1)..(171): NCBI GI NO: 2498778 NR Description: PIR7A PROTEIN
  misc_feature (1)..(172): NCBI GI NO: 40549303 NR Description: salicylic acid-binding protein 2
  misc_feature (1)..(23): NCBI GI NO: 34907174 NR Description: putative pir7b (Pseudomonas inducible protein)
  misc_feature (77)..(171): NCBI GI NO: 34907174 NR Description: putative pir7b (Pseudomonas inducible protein)
  misc_feature (1)..(169): NCBI GI NO: 6651393 NR Description: polyneuridine aldehyde esterase
  misc_feature (1)..(171): NCBI GI NO: 15227867 NR Description: putative acetone-cyanohydrin lyase
  misc_feature (1)..(171): NCBI GI NO: 27754457 NR Description: putative acetone-cyanohydrin lyase
MEQYPDRVAVAVFVATGMPSAGKPMAFVFEQFLQEEYPADRYMDCEFETSGDPQRPVETFRFGPQYLKQRLYQLSPPEDLTLAMAMLRPSQRFRDDATMKGGVLTAERYGGVRRVCVVAEDDASVPAGFLRRMASWNPGTEVRGLQGADHMSMLSKPGELSELLMEVANKYS

SEQ ID NO: 40255 - DNA, 717 bp, Zea mays subsp. mays
  misc_feature (1)..(717): Ceres Seq. ID no. 12384292
gcacgagaccattacctagaacatcctaatcaaaaacagaagtgtgctcgaaggtcgggctctgcacgttcgatgggacacgcggagtaagtgctgctggcatcgagagtgtaccgggatccgtagacggcatggcggaagctctatgcaacgcgtgcgagatagtagtgttctggacgcaaagcgagctgagcccgaacaggagcaacgagggcacgctggagtacgtggacaggctctgcgaaagcatgcccgatccggtggggtcgcgcgtggactgcggacgcgtgggttccctgcagaccgttgcgttcagcatcggtggaagggcgttcgagctccggcctgaccagtacgtcctcaaggtcggcgaggggttcgccgcgcactgcatcagcgggttcacggctctggacgtgccccctccggtaggccctctgtggatactgggtgacgtcttcatggagcctaccataccatctttgactacggcaagatgaggatcgggttcgcagattccgcgtgagacacgggcgttcttccactaatgaccgcgaccactatagctgcagtatgttcctcagagaagccctgcgtggtgtagtgctggattttcactactacgccctgcagagcttttctcgagcttctgtagagcacatacactacgcgcaggacaaatgtgtatcgctgcatcgagaaagaaataaaggaaac

SEQ ID NO: 40256 - protein, 122 aa, Zea mays subsp. mays
  peptide (1)..(122): Ceres Seq. ID no. 12384293
  misc_feature (1)..(111): Pfam Name: Pfam Description:  Eukaryotic aspartyl protease
  misc_feature (1)..(111): NCBI GI NO: 34912970 NR Description: putative aspartic protease
  misc_feature (1)..(113): NCBI GI NO: 1168536 NR Description: Phytepsin precursor (Aspartic proteinase)
  misc_feature (1)..(113): NCBI GI NO: 5822248 NR Description: Chain A
  misc_feature (1)..(111): NCBI GI NO: 2499819 NR Description: Aspartic proteinase oryzasin 1 precursor
  misc_feature (1)..(111): NCBI GI NO: 12231176 NR Description: aspartic proteinase 3 [Nepenthes alata]
  misc_feature (1)..(111): NCBI GI NO: 12231174 NR Description: aspartic proteinase 2 [Nepenthes alata]
  misc_feature (1)..(111): NCBI GI NO: 34912092 NR Description: putative aspartic protease
  misc_feature (1)..(111): NCBI GI NO: 15186732 NR Description: aspartic proteinase 1 [Glycine max]
  misc_feature (1)..(111): NCBI GI NO: 21616051 NR Description: aspartic proteinase [Theobroma cacao]
  misc_feature (1)..(111): NCBI GI NO: 2811025 NR Description: Aspartic proteinase precursor
MAEALCNACEIVVFWTQSELSPNRSNEGTLEYVDRLCESMPDPVGSRVDCGRVGSLQTVAFSIGGRAFELRPDQYVLKVGEGFAAHCISGFTALDVPPPVGPLWILGDVFMEPTIPSLTTAR

SEQ ID NO: 40257 - protein, 83 aa, Zea mays subsp. mays
  peptide (1)..(83): Ceres Seq. ID no. 12384294
  misc_feature (1)..(72): Pfam Name: Pfam Description:  Eukaryotic aspartyl protease
  misc_feature (1)..(72): NCBI GI NO: 34912970 NR Description: putative aspartic protease
  misc_feature (1)..(74): NCBI GI NO: 1168536 NR Description: Phytepsin precursor (Aspartic proteinase)
  misc_feature (1)..(74): NCBI GI NO: 5822248 NR Description: Chain A
  misc_feature (1)..(72): NCBI GI NO: 2499819 NR Description: Aspartic proteinase oryzasin 1 precursor
  misc_feature (1)..(72): NCBI GI NO: 12231176 NR Description: aspartic proteinase 3 [Nepenthes alata]
  misc_feature (1)..(72): NCBI GI NO: 12231174 NR Description: aspartic proteinase 2 [Nepenthes alata]
  misc_feature (1)..(72): NCBI GI NO: 34912092 NR Description: putative aspartic protease
  misc_feature (1)..(72): NCBI GI NO: 15186732 NR Description: aspartic proteinase 1 [Glycine max]
  misc_feature (1)..(72): NCBI GI NO: 21616051 NR Description: aspartic proteinase [Theobroma cacao]
  misc_feature (1)..(72): NCBI GI NO: 2811025 NR Description: Aspartic proteinase precursor
MPDPVGSRVDCGRVGSLQTVAFSIGGRAFELRPDQYVLKVGEGFAAHCISGFTALDVPPPVGPLWILGDVFMEPTIPSLTTAR

SEQ ID NO: 40258 - protein, 67 aa, Zea mays subsp. mays
  peptide (1)..(67): Ceres Seq. ID no. 12384295
MQRVRDSSVLDAKRAEPEQEQRGHAGVRGQALRKHARSGGVARGLRTRGFPADRCVQHRWKGVRAPA

SEQ ID NO: 40259 - DNA, 1047 bp, Zea mays subsp. mays; identical to SEQ ID NO: 27429
  misc_feature (1)..(1047): Ceres Seq. ID no. 12565996

SEQ ID NO: 40260 - protein, 282 aa, Zea mays subsp. mays; identical to SEQ ID NO: 27430
  peptide (1)..(282): Ceres Seq. ID no. 12565997
  misc_feature (96)..(259): Pfam Name: DUF985 Pfam Description: Protein of unknown function
  misc_feature (89)..(277): NCBI GI NO: 26449699 NR Description: unknown protein [Arabidopsis thaliana]
  misc_feature (89)..(277): NCBI GI NO: 25402881 NR Description: protein F14D16.29
  misc_feature (89)..(175): NCBI GI NO: 18394699 NR Description: expressed protein; protein id: At1g19130
  misc_feature (96)..(216): NCBI GI NO: 39995284 NR Description: conserved hypothetical protein
  misc_feature (239)..(263): NCBI GI NO: 39995284 NR Description: conserved hypothetical protein
  misc_feature (103)..(211): NCBI GI NO: 16329452 NR Description: hypothetical protein [Synechocystis sp. PCC 6803]
  misc_feature (239)..(277): NCBI GI NO: 16329452 NR Description: hypothetical protein [Synechocystis sp. PCC 6803]
  misc_feature (98)..(224): NCBI GI NO: 22986010 NR Description: hypothetical protein [Burkholderia fungorum]
  misc_feature (234)..(280): NCBI GI NO: 22986010 NR Description: hypothetical protein [Burkholderia fungorum]
  misc_feature (103)..(227): NCBI GI NO: 18310898 NR Description: conserved hypothetical protein

SEQ ID NO: 40261 - protein, 194 aa, Zea mays subsp. mays; identical to SEQ ID NO: 27431
  peptide (1)..(194): Ceres Seq. ID no. 12565998
  misc_feature (8)..(171): Pfam Name: DUF985 Pfam Description: Protein of unknown function
  misc_feature (1)..(189): NCBI GI NO: 26449699 NR Description: unknown protein [Arabidopsis thaliana]
  misc_feature (1)..(189): NCBI GI NO: 25402881 NR Description: protein F14D16.29
  misc_feature (1)..(87): NCBI GI NO: 18394699 NR Description: expressed protein; protein id: At1g19130
  misc_feature (8)..(128): NCBI GI NO: 39995284 NR Description: conserved hypothetical protein
  misc_feature (151)..(175): NCBI GI NO: 39995284 NR Description: conserved hypothetical protein
  misc_feature (15)..(123): NCBI GI NO: 16329452 NR Description: hypothetical protein [Synechocystis sp. PCC 6803]
  misc_feature (151)..(189): NCBI GI NO: 16329452 NR Description: hypothetical protein [Synechocystis sp. PCC 6803]
  misc_feature (10)..(136): NCBI GI NO: 22986010 NR Description: hypothetical protein [Burkholderia fungorum]
  misc_feature (146)..(192): NCBI GI NO: 22986010 NR Description: hypothetical protein [Burkholderia fungorum]
  misc_feature (15)..(139): NCBI GI NO: 18310898 NR Description: conserved hypothetical protein

SEQ ID NO: 40262 - protein, 189 aa, Zea mays subsp. mays; identical to SEQ ID NO: 27432
  peptide (1)..(189): Ceres Seq. ID no. 12565999
  misc_feature (3)..(166): Pfam Name: DUF985 Pfam Description: Protein of unknown function
  misc_feature (1)..(184): NCBI GI NO: 26449699 NR Description: unknown protein [Arabidopsis thaliana]
  misc_feature (1)..(184): NCBI GI NO: 25402881 NR Description: protein F14D16.29
  misc_feature (1)..(82): NCBI GI NO: 18394699 NR Description: expressed protein; protein id: At1g19130
  misc_feature (3)..(123): NCBI GI NO: 39995284 NR Description: conserved hypothetical protein
  misc_feature (146)..(170): NCBI GI NO: 39995284 NR Description: conserved hypothetical protein
  misc_feature (10)..(118): NCBI GI NO: 16329452 NR Description: hypothetical protein [Synechocystis sp. PCC 6803]
  misc_feature (146)..(184): NCBI GI NO: 16329452 NR Description: hypothetical protein [Synechocystis sp. PCC 6803]
  misc_feature (5)..(131): NCBI GI NO: 22986010 NR Description: hypothetical protein [Burkholderia fungorum]
  misc_feature (141)..(187): NCBI GI NO: 22986010 NR Description: hypothetical protein [Burkholderia fungorum]
  misc_feature (10)..(134): NCBI GI NO: 18310898 NR Description: conserved hypothetical protein

SEQ ID NO: 40263 - DNA, 651 bp, Zea mays subsp. mays
  misc_feature (1)..(651): Ceres Seq. ID no. 12381563
  misc_feature (646)..(646): n is a, c, t, g, unknown, or other
acacaactgatgagaatgagccgttacaggcaatgatgaaagaccagttcgcaaactatgtggtgcagaaggttctggagatatgtgatgaccagaaccgtgaattgattctttcccgtatcaaggtccacttgaatgcactgaaaagatacacctatgggaagcatatcgtggcacgtgttgagaagcttattgctgcaggagaacgggcgcattggtgccccatcctcttgctgagatggcaataaagctatatacaggtcgcagaataacacctgtacagacagacagggatagcgaggcctagctttttaccattactagtagtcggtaatattgagcgacggagaggttaaaaaaggctcccaaatcctttgatgtaaataaaggatagccgctggaaataaataaaaagaatgagaaaagatgaagagattttgcttgtccttgagggaagagttgtatatttgtgtggtttattttcccctcttgaagcagatggataaatgttttaggatcatagatgatgggaagcaagggcagctgtagattatcctttctttttttccttgggtttcattagtcaatgtataatgtattaatgttcatggtgatgctaatctctgtaaagcctgccttgagtttnctgac

SEQ ID NO: 40264 - protein, 81 aa, Zea mays subsp. mays
  peptide (1)..(81): Ceres Seq. ID no. 12381564
  misc_feature (3)..(37): Pfam Name: Pfam Description:  Pumilio-family RNA binding repeat
  misc_feature (1)..(69): NCBI GI NO: 15227038 NR Description: pumilio-family RNA-binding protein, putative
  misc_feature (1)..(69): NCBI GI NO: 15227051 NR Description: pumilio-family RNA-binding protein, putative
  misc_feature (1)..(69): NCBI GI NO: 20465637 NR Description: putative pumilio/Mpt5 family RNA-binding protein
  misc_feature (1)..(69): NCBI GI NO: 15227052 NR Description: pumilio-family RNA-binding protein, putative
  misc_feature (1)..(69): NCBI GI NO: 34908236 NR Description: putative pumilio/Mpt5 family RNA-binding protein
  misc_feature (2)..(69): NCBI GI NO: 26450884 NR Description: putative RNA binding protein
  misc_feature (2)..(69): NCBI GI NO: 22330960 NR Description: pumilio-family RNA-binding protein, putative
  misc_feature (1)..(69): NCBI GI NO: 20513851 NR Description: BPM [Hordeum vulgare]
  misc_feature (2)..(67): NCBI GI NO: 6056191 NR Description: putative RNA binding protein
  misc_feature (1)..(69): NCBI GI NO: 14719326 NR Description: putative pumilio/Mpt5 family RNA-binding protein
TTDENEPLQAMMKDQFANYVVQKVLEICDDQNRELILSRIKVHLNALKRYTYGKHIVARVEKLIAAGERAHWCPILLLRWQ

SEQ ID NO: 40265 - protein, 71 aa, Zea mays subsp. mays
  peptide (1)..(71): Ceres Seq. ID no. 12381565
  misc_feature (1)..(27): Pfam Name: Pfam Description:  Pumilio-family RNA binding repeat
  misc_feature (1)..(59): NCBI GI NO: 15227038 NR Description: pumilio-family RNA-binding protein, putative
  misc_feature (1)..(59): NCBI GI NO: 15227051 NR Description: pumilio-family RNA-binding protein, putative
  misc_feature (1)..(59): NCBI GI NO: 20465637 NR Description: putative pumilio/Mpt5 family RNA-binding protein
  misc_feature (1)..(59): NCBI GI NO: 15227052 NR Description: pumilio-family RNA-binding protein, putative
  misc_feature (1)..(59): NCBI GI NO: 34908236 NR Description: putative pumilio/Mpt5 family RNA-binding protein
  misc_feature (1)..(59): NCBI GI NO: 26450884 NR Description: putative RNA binding protein
  misc_feature (1)..(59): NCBI GI NO: 22330960 NR Description: pumilio-family RNA-binding protein, putative
  misc_feature (1)..(59): NCBI GI NO: 20513851 NR Description: BPM [Hordeum vulgare]
  misc_feature (1)..(57): NCBI GI NO: 6056191 NR Description: putative RNA binding protein
  misc_feature (1)..(59): NCBI GI NO: 14719326 NR Description: putative pumilio/Mpt5 family RNA-binding protein
MMKDQFANYVVQKVLEICDDQNRELILSRIKVHLNALKRYTYGKHIVARVEKLIAAGERAHWCPILLLRWQ

SEQ ID NO: 40266 - protein, 70 aa, Zea mays subsp. mays
  peptide (1)..(70): Ceres Seq. ID no. 12381566
  misc_feature (1)..(26): Pfam Name: Pfam Description:  Pumilio-family RNA binding repeat
  misc_feature (1)..(58): NCBI GI NO: 15227038 NR Description: pumilio-family RNA-binding protein, putative
  misc_feature (1)..(58): NCBI GI NO: 15227051 NR Description: pumilio-family RNA-binding protein, putative
  misc_feature (1)..(58): NCBI GI NO: 20465637 NR Description: putative pumilio/Mpt5 family RNA-binding protein
  misc_feature (1)..(58): NCBI GI NO: 15227052 NR Description: pumilio-family RNA-binding protein, putative
  misc_feature (1)..(58): NCBI GI NO: 34908236 NR Description: putative pumilio/Mpt5 family RNA-binding protein
  misc_feature (1)..(58): NCBI GI NO: 26450884 NR Description: putative RNA binding protein
  misc_feature (1)..(58): NCBI GI NO: 22330960 NR Description: pumilio-family RNA-binding protein, putative
  misc_feature (1)..(58): NCBI GI NO: 20513851 NR Description: BPM [Hordeum vulgare]
  misc_feature (1)..(56): NCBI GI NO: 6056191 NR Description: putative RNA binding protein
  misc_feature (1)..(58): NCBI GI NO: 14719326 NR Description: putative pumilio/Mpt5 family RNA-binding protein
MKDQFANYVVQKVLEICDDQNRELILSRIKVHLNALKRYTYGKHIVARVEKLIAAGERAHWCPILLLRWQ

SEQ ID NO: 40267 - DNA, 929 bp, Zea mays subsp. mays
  misc_feature (1)..(929): Ceres Seq. ID no. 12418011
tgttctgatgctacagttgttcttggtgctgttggtaaggtagtaaaagtggagcattgtgaaagagtgcatatcattgcagctgcaaaacggatttgtattgccaactgccgggaatgcatcttctacataggagtaaatcaccaacctcttgtgttgggggacaaccataaattacaagttgctccattcaatacgtgctacccacaactgcatgaacatatgatacaagtggctgtcgatcccagtgtcaacaaatgggaccaaccttttgtgttgggagttgttgatccacatgattcattatcccatcctgctggagtttcagatgttaaagctgaatcagcaacatgtctggatcctgatctattcaccaattttttgattcctagttggtttggggatgaaaatcaagggcctacaaactgcaatcctttcccactgcctgaaatttatgggacatcccaaagcaaaaagcgttctgctctggaagatatccaaaaaggatgattcgggagctgcagcttgatgagaaccggaaaagggaattggcaactgcccttcacgttcagttcaaggattggttatacgcttcaggcaatatccgccagctctactgtctacagggcgattaacgatgggatttgcaagactgactatccttttgccgactccaaaacattcgacaattgtcgaaagctgaccttccttccctgggagagaggattcccacccgcgcagaaggatgtgaagatgtactgttacctacttttttacagattcatttgggtattccctttgctgcgagttggaggtactaattaggatgtaatctccaagcctactcatttttttggcccttgataacgtccacgagtatgtaatagggggactgatggatcatacgttgttgaataaacatttcttct

SEQ ID NO: 40268 - protein, 169 aa, Zea mays subsp. mays
  peptide (1)..(169): Ceres Seq. ID no. 12418012
  misc_feature (1)..(168): NCBI GI NO: 18410836 NR Description: putative protein; protein id: At3g57890
  misc_feature (1)..(168): NCBI GI NO: 30688947 NR Description: expressed protein [Arabidopsis thaliana]
  misc_feature (1)..(168): NCBI GI NO: 11280529 NR Description: hypothetical protein T10K17
  misc_feature (1)..(168): NCBI GI NO: 7452467 NR Description: hypothetical protein At2g42230
  misc_feature (1)..(93): NCBI GI NO: 8922517 NR Description: hypothetical protein FLJ10560 [Homo sapiens]
  misc_feature (1)..(94): NCBI GI NO: 34869310 NR Description: similar to hypothetical protein FLJ10560
CSDATVVLGAVGKVVKVEHCERVHIIAAAKRICIANCRECIFYIGVNHQPLVLGDNHKLQVAPFNTCYPQLHEHMIQVAVDPSVNKWDQPFVLGVVDPHDSLSHPAGVSDVKAESATCLDPDLFTNFLIPSWFGDENQGPTNCNPFPLPEIYGTSQSKKRSALEDIQKG

SEQ ID NO: 40269 - protein, 98 aa, Zea mays subsp. mays
  peptide (1)..(98): Ceres Seq. ID no. 12418013
MRTGKGNWQLPFTFSSRIGYTLQAISASSTVYRAINDGICKTDYPFADSKTFDNCRKLTFLPWERGFPPAQKDVKMYCYLLFYRFIWVFPLLRVGGTN

SEQ ID NO: 40270 - protein, 95 aa, Zea mays subsp. mays
  peptide (1)..(95): Ceres Seq. ID no. 12418014
  misc_feature (1)..(94): NCBI GI NO: 18410836 NR Description: putative protein; protein id: At3g57890
  misc_feature (1)..(94): NCBI GI NO: 30688947 NR Description: expressed protein [Arabidopsis thaliana]
  misc_feature (1)..(94): NCBI GI NO: 11280529 NR Description: hypothetical protein T10K17
  misc_feature (1)..(94): NCBI GI NO: 7452467 NR Description: hypothetical protein At2g42230
  misc_feature (1)..(19): NCBI GI NO: 8922517 NR Description: hypothetical protein FLJ10560 [Homo sapiens]
  misc_feature (1)..(20): NCBI GI NO: 34869310 NR Description: similar to hypothetical protein FLJ10560
MIQVAVDPSVNKWDQPFVLGVVDPHDSLSHPAGVSDVKAESATCLDPDLFTNFLIPSWFGDENQGPTNCNPFPLPEIYGTSQSKKRSALEDIQKG

SEQ ID NO: 40271 - DNA, 783 bp, Zea mays subsp. mays
  misc_feature (1)..(783): Ceres Seq. ID no. 12379672
agattccaactctgcgagaaaagctaaaataatcggacccatctcttggaccgtgcgatcgcccccctccgccgccgcccacggatcaacgccacgccaccacgccggaagaccgggatcgtgacggccacatggacatggctacggcggccgccgcgttgccatggggaggcggttccccggcgtggatcgacgtgcctgagcggagcaagagcgcgttcatggagctgaagcggaggaaggtccaccggtatgtgatcttcaagatcgacgacagtagagaggaggtcgtcgtcgacaagatcggcgcgcccggggagagctacgacgacttcacggcgtcgctaccgaccgatgattgccggtacgccgtctacgatctggatttcgtaagcgacgacaactgccggaaaagcaagattttcttcatctcctggtctccttcagattctcgcatccgtgccaagaccatatatgccgtgtcaaggaaccaattccgtcatgagcttgacggagtgcacttcgagatccaagccaccgatcccgatgacatgaatctagaagttctcagggggcgtgctaacagaacctgattcactagcgagcaacccaaaatgcagctcggaggtcgctgatctgatgaggcatgacgtagaagtataggctgccgatcacacccgggcatgcattgtttctttttacttcttcctttccttttggagttatacttccgtgatgtttgcctaactacataggttccctctaatatgatgtggactgtgg

SEQ ID NO: 40272 - protein, 153 aa, Zea mays subsp. mays
  peptide (1)..(153): Ceres Seq. ID no. 12379673
  misc_feature (24)..(151): Pfam Name: Pfam Description:  Cofilin/tropomyosin-type actin-binding protein
  misc_feature (3)..(153): NCBI GI NO: 37536154 NR Description: putative actin depolymerizing factor
  misc_feature (13)..(153): NCBI GI NO: 34394310 NR Description: putative actin depolymerizing factor
  misc_feature (22)..(150): NCBI GI NO: 7330254 NR Description: actin depolymerizing factor [Elaeis guineensis]
  misc_feature (22)..(151): NCBI GI NO: 4566614 NR Description: actin depolymerizing factor [Populus x canescens]
  misc_feature (13)..(150): NCBI GI NO: 24745620 NR Description: actin depolymerizing factor 6 [Solanum tuberosum]
  misc_feature (22)..(151): NCBI GI NO: 21554405 NR Description: Actin-depolymerizing factor ADF-6
  misc_feature (22)..(151): NCBI GI NO: 18402587 NR Description: actin depolymerizing factor 6
  misc_feature (22)..(151): NCBI GI NO: 25295741 NR Description: actin depolymerizing factor 6
  misc_feature (16)..(151): NCBI GI NO: 18411410 NR Description: putative actin-depolymerizing factor
  misc_feature (16)..(151): NCBI GI NO: 15223471 NR Description: actin depolymerizing factor, putative
MDMATAAAALPWGGGSPAWIDVPERSKSAFMELKRRKVHRYVIFKIDDSREEVVVDKIGAPGESYDDFTASLPTDDCRYAVYDLDFVSDDNCRKSKIFFISWSPSDSRIRAKTIYAVSRNQFRHELDGVHFEIQATDPDDMNLEVLRGRANRT

SEQ ID NO: 40273 - protein, 151 aa, Zea mays subsp. mays
  peptide (1)..(151): Ceres Seq. ID no. 12379674
  misc_feature (22)..(149): Pfam Name: Pfam Description:  Cofilin/tropomyosin-type actin-binding protein
  misc_feature (1)..(151): NCBI GI NO: 37536154 NR Description: putative actin depolymerizing factor
  misc_feature (11)..(151): NCBI GI NO: 34394310 NR Description: putative actin depolymerizing factor
  misc_feature (20)..(148): NCBI GI NO: 7330254 NR Description: actin depolymerizing factor [Elaeis guineensis]
  misc_feature (20)..(149): NCBI GI NO: 4566614 NR Description: actin depolymerizing factor [Populus x canescens]
  misc_feature (11)..(148): NCBI GI NO: 24745620 NR Description: actin depolymerizing factor 6 [Solanum tuberosum]
  misc_feature (20)..(149): NCBI GI NO: 21554405 NR Description: Actin-depolymerizing factor ADF-6
  misc_feature (20)..(149): NCBI GI NO: 18402587 NR Description: actin depolymerizing factor 6
  misc_feature (20)..(149): NCBI GI NO: 25295741 NR Description: actin depolymerizing factor 6
  misc_feature (14)..(149): NCBI GI NO: 18411410 NR Description: putative actin-depolymerizing factor
  misc_feature (14)..(149): NCBI GI NO: 15223471 NR Description: actin depolymerizing factor, putative
MATAAAALPWGGGSPAWIDVPERSKSAFMELKRRKVHRYVIFKIDDSREEVVVDKIGAPGESYDDFTASLPTDDCRYAVYDLDFVSDDNCRKSKIFFISWSPSDSRIRAKTIYAVSRNQFRHELDGVHFEIQATDPDDMNLEVLRGRANRT

SEQ ID NO: 40274 - protein, 123 aa, Zea mays subsp. mays
  peptide (1)..(123): Ceres Seq. ID no. 12379675
  misc_feature (1)..(121): Pfam Name: Pfam Description:  Cofilin/tropomyosin-type actin-binding protein
  misc_feature (1)..(123): NCBI GI NO: 37536154 NR Description: putative actin depolymerizing factor
  misc_feature (1)..(123): NCBI GI NO: 34394310 NR Description: putative actin depolymerizing factor
  misc_feature (1)..(120): NCBI GI NO: 7330254 NR Description: actin depolymerizing factor [Elaeis guineensis]
  misc_feature (1)..(121): NCBI GI NO: 4566614 NR Description: actin depolymerizing factor [Populus x canescens]
  misc_feature (1)..(120): NCBI GI NO: 24745620 NR Description: actin depolymerizing factor 6 [Solanum tuberosum]
  misc_feature (1)..(121): NCBI GI NO: 21554405 NR Description: Actin-depolymerizing factor ADF-6
  misc_feature (1)..(121): NCBI GI NO: 18402587 NR Description: actin depolymerizing factor 6
  misc_feature (1)..(121): NCBI GI NO: 25295741 NR Description: actin depolymerizing factor 6
  misc_feature (1)..(121): NCBI GI NO: 18411410 NR Description: putative actin-depolymerizing factor
  misc_feature (1)..(121): NCBI GI NO: 15223471 NR Description: actin depolymerizing factor, putative
MELKRRKVHRYVIFKIDDSREEVVVDKIGAPGESYDDFTASLPTDDCRYAVYDLDFVSDDNCRKSKIFFISWSPSDSRIRAKTIYAVSRNQFRHELDGVHFEIQATDPDDMNLEVLRGRANRT

SEQ ID NO: 40275 - DNA, 464 bp, Zea mays subsp. mays
  misc_feature (1)..(464): Ceres Seq. ID no. 2789088
gacttccctgggcgcgtccgtgcaggtcgggatggagttctgggcgcggtgggcgcaccgggcgctatggcacgcctccctgtggcacatgcacgagtcgcaccaccggtcgtgcgagggcccattcgagctcaacgacgtgttcgccatcgtcaacgccgtgccggccatctccctcctcggtgacgtcgcgagcagatacaccatatggacaattttgagggcgtcccgtatgggctcttcctgggaccaaaggagctggaggaggtcggtggcctggacgagctggaaaaggagctcgcgcgaatcggccagaccatctgatggatttgtccggattccggcgcggcgatctccgctccgctccgtgattccggcgcagcctcatggttggggagccgacgaccagaacctccagaagggatttggtttggatgcgcgagcgtagatcttgacctgcattt

SEQ ID NO: 40276 - protein, 148 aa, Zea mays subsp. mays
  peptide (1)..(148): Ceres Seq. ID no. 2789089
  misc_feature (2)..(60): Pfam Name: Pfam Description:  Carotene hydroxylase
  misc_feature (2)..(60): NCBI GI NO: 32488500 NR Description: OSJNBa0011J08.7
  misc_feature (2)..(60): NCBI GI NO: 33145986 NR Description: beta-carotene hydroxylase [Crocus sativus]
  misc_feature (2)..(60): NCBI GI NO: 9988836 NR Description: beta-carotene hydroxylase [Citrus unshiu]
  misc_feature (2)..(60): NCBI GI NO: 11245486 NR Description: beta-carotene hydroxylase [Citrus unshiu]
  misc_feature (2)..(60): NCBI GI NO: 21734857 NR Description: beta-carotene hydroxylase [Vitis vinifera]
  misc_feature (2)..(60): NCBI GI NO: 5870600 NR Description: beta-carotene hydroxylase
  misc_feature (2)..(60): NCBI GI NO: 37536402 NR Description: putative beta-carotene hydroxylase
  misc_feature (2)..(60): NCBI GI NO: 2956717 NR Description: beta-carotene hydroxylase 2 [Capsicum annuum]
  misc_feature (2)..(60): NCBI GI NO: 1575296 NR Description: beta-carotene hydroxylase [Arabidopsis thaliana]
  misc_feature (2)..(60): NCBI GI NO: 9968545 NR Description: beta-carotene hydroxylase
TSLGASVQVGMEFWARWAHRALWHASLWHMHESHHRSCEGPFELNDVFAIVNAVPAISLLGDVASRYTIWTILRASRMGSSWDQRSWRRSVAWTSWKRSSRESARPSDGFVRIPARRSPLRSVIPAQPHGWGADDQNLQKGFGLDARA

SEQ ID NO: 40277 - protein, 138 aa, Zea mays subsp. mays
  peptide (1)..(138): Ceres Seq. ID no. 2789090
  misc_feature (1)..(50): NCBI GI NO: 32488500 NR Description: OSJNBa0011J08.7
  misc_feature (1)..(50): NCBI GI NO: 33145986 NR Description: beta-carotene hydroxylase [Crocus sativus]
  misc_feature (1)..(50): NCBI GI NO: 9988836 NR Description: beta-carotene hydroxylase [Citrus unshiu]
  misc_feature (1)..(50): NCBI GI NO: 11245486 NR Description: beta-carotene hydroxylase [Citrus unshiu]
  misc_feature (1)..(50): NCBI GI NO: 21734857 NR Description: beta-carotene hydroxylase [Vitis vinifera]
  misc_feature (1)..(50): NCBI GI NO: 5870600 NR Description: beta-carotene hydroxylase
  misc_feature (1)..(50): NCBI GI NO: 37536402 NR Description: putative beta-carotene hydroxylase
  misc_feature (1)..(50): NCBI GI NO: 2956717 NR Description: beta-carotene hydroxylase 2 [Capsicum annuum]
  misc_feature (1)..(50): NCBI GI NO: 1575296 NR Description: beta-carotene hydroxylase [Arabidopsis thaliana]
  misc_feature (1)..(50): NCBI GI NO: 15235959 NR Description: beta-carotene hydroxylase; protein id: At4g25700
MEFWARWAHRALWHASLWHMHESHHRSCEGPFELNDVFAIVNAVPAISLLGDVASRYTIWTILRASRMGSSWDQRSWRRSVAWTSWKRSSRESARPSDGFVRIPARRSPLRSVIPAQPHGWGADDQNLQKGFGLDARA

SEQ ID NO: 40278 - protein, 119 aa, Zea mays subsp. mays
  peptide (1)..(119): Ceres Seq. ID no. 2789091
  misc_feature (1)..(31): NCBI GI NO: 32488500 NR Description: OSJNBa0011J08.7
  misc_feature (1)..(31): NCBI GI NO: 33145986 NR Description: beta-carotene hydroxylase [Crocus sativus]
  misc_feature (1)..(31): NCBI GI NO: 9988836 NR Description: beta-carotene hydroxylase [Citrus unshiu]
  misc_feature (1)..(31): NCBI GI NO: 11245486 NR Description: beta-carotene hydroxylase [Citrus unshiu]
  misc_feature (1)..(31): NCBI GI NO: 21734857 NR Description: beta-carotene hydroxylase [Vitis vinifera]
  misc_feature (1)..(31): NCBI GI NO: 5870600 NR Description: beta-carotene hydroxylase
  misc_feature (1)..(31): NCBI GI NO: 37536402 NR Description: putative beta-carotene hydroxylase
  misc_feature (1)..(31): NCBI GI NO: 2956717 NR Description: beta-carotene hydroxylase 2 [Capsicum annuum]
  misc_feature (1)..(31): NCBI GI NO: 1575296 NR Description: beta-carotene hydroxylase [Arabidopsis thaliana]
  misc_feature (1)..(31): NCBI GI NO: 15235959 NR Description: beta-carotene hydroxylase; protein id: At4g25700
MHESHHRSCEGPFELNDVFAIVNAVPAISLLGDVASRYTIWTILRASRMGSSWDQRSWRRSVAWTSWKRSSRESARPSDGFVRIPARRSPLRSVIPAQPHGWGADDQNLQKGFGLDARA

SEQ ID NO: 40279 - DNA, 1036 bp, Zea mays subsp. mays
  misc_feature (1)..(1036): Ceres Seq. ID no. 12350771
  misc_feature (1033)..(1033): n is a, c, t, g, unknown, or other
ctaaacccaatcccccttccaccccaccgacaaggagatcttccgcggcagtagtccccgccgcgtgctcgtcggcatgaagaagacgctcgtcttctacacgggccgcgcgccgcgcggaggcaagacgccgtgggtcatgcacgagtaccgcctcgagggcagcctgccgcccaacctccaccgcggggccaaggacgaatgggctgtgtgtaaggtgatcaacaaagacttggcgggcaaggctgggcagcaacaaatggcgccgccgcacgccgtgtccgtgggcatggagcgcagcgactcgctggccttcctcgacgacctggtgctcgacaacgccgacgacctgcccccgctcatcgactcgacaacgtacgccgcggcggggacgaccacgacgacgaacgacgacagcggcgggtaccaacaagccaccaaggcggagccgcagccgcatctgcccgcgccgagcaacagcccgtaccagcagcaggccatacggaggcactgcaaggcggaggcgccggcgccggcgatggttctgagcccgtcgcgcgagacgccgggcgcggacatgttccagctccagcatgtggacgagctgctccagctggacggcggcttcatggaggactactacaacatgaacatgtggaaggtctagttaggccgctcggatcgtcggttgcctggcggatgatggattgattagttggttgattggattaacctgttattagacgaagaggagtggaaaggccggccgcgccgattggcatggacgaggtctgtctgacgaagatgtgtcgagacctcgccggcggtgtggtttgtgataattggttagttagctaatcttcattagctagctagctagctagctactgattagaacagctagcagtagtgtgtaaccgcgcgcgtgtcgttgcctctgctggtcgagaggattgaagcacgcatgtgtacataataataggtaggagtcgtcgtcgttgagtgatgagaaaaatgaatgaaacatactatntgt

SEQ ID NO: 40280 - protein, 196 aa, Zea mays subsp. mays
  peptide (1)..(196): Ceres Seq. ID no. 12350772
  misc_feature (1)..(141): NCBI GI NO: 4218537 NR Description: GRAB2 protein [Triticum sp.]
  misc_feature (1)..(195): NCBI GI NO: 34394523 NR Description: putative GRAB2 protein(Geminivirus Rep A-binding)
  misc_feature (1)..(166): NCBI GI NO: 34902148 NR Description: Putative NAM (no apical meristem) protein
  misc_feature (1)..(196): NCBI GI NO: 27529808 NR Description: OsNAC1 protein [Oryza sativa]
  misc_feature (1)..(137): NCBI GI NO: 15229219 NR Description: NAM-like protein
  misc_feature (1)..(97): NCBI GI NO: 9758909 NR Description: NAM (no apical meristem)-like protein
  misc_feature (1)..(97): NCBI GI NO: 30686737 NR Description: NAM (no apical meristem)-related protein
  misc_feature (1)..(56): NCBI GI NO: 30682054 NR Description: NAM (no apical meristem)-related protein
  misc_feature (1)..(66): NCBI GI NO: 15241819 NR Description: NAM / CUC2 - like protein; protein id: At5g39610
  misc_feature (1)..(66): NCBI GI NO: 21536866 NR Description: NAM / CUC2-like protein [Arabidopsis thaliana]
MKKTLVFYTGRAPRGGKTPWVMHEYRLEGSLPPNLHRGAKDEWAVCKVINKDLAGKAGQQQMAPPHAVSVGMERSDSLAFLDDLVLDNADDLPPLIDSTTYAAAGTTTTTNDDSGGYQQATKAEPQPHLPAPSNSPYQQQAIRRHCKAEAPAPAMVLSPSRETPGADMFQLQHVDELLQLDGGFMEDYYNMNMWKV

SEQ ID NO: 40281 - protein, 175 aa, Zea mays subsp. mays
  peptide (1)..(175): Ceres Seq. ID no. 12350773
  misc_feature (1)..(120): NCBI GI NO: 4218537 NR Description: GRAB2 protein [Triticum sp.]
  misc_feature (1)..(174): NCBI GI NO: 34394523 NR Description: putative GRAB2 protein(Geminivirus Rep A-binding)
  misc_feature (1)..(145): NCBI GI NO: 34902148 NR Description: Putative NAM (no apical meristem) protein
  misc_feature (1)..(175): NCBI GI NO: 27529808 NR Description: OsNAC1 protein [Oryza sativa]
  misc_feature (1)..(116): NCBI GI NO: 15229219 NR Description: NAM-like protein
  misc_feature (1)..(76): NCBI GI NO: 9758909 NR Description: NAM (no apical meristem)-like protein
  misc_feature (1)..(76): NCBI GI NO: 30686737 NR Description: NAM (no apical meristem)-related protein
  misc_feature (1)..(35): NCBI GI NO: 30682054 NR Description: NAM (no apical meristem)-related protein
  misc_feature (1)..(45): NCBI GI NO: 15241819 NR Description: NAM / CUC2 - like protein; protein id: At5g39610
  misc_feature (1)..(45): NCBI GI NO: 21536866 NR Description: NAM / CUC2-like protein [Arabidopsis thaliana]
MHEYRLEGSLPPNLHRGAKDEWAVCKVINKDLAGKAGQQQMAPPHAVSVGMERSDSLAFLDDLVLDNADDLPPLIDSTTYAAAGTTTTTNDDSGGYQQATKAEPQPHLPAPSNSPYQQQAIRRHCKAEAPAPAMVLSPSRETPGADMFQLQHVDELLQLDGGFMEDYYNMNMWKV

SEQ ID NO: 40282 - protein, 135 aa, Zea mays subsp. mays
  peptide (1)..(135): Ceres Seq. ID no. 12350774
  misc_feature (1)..(80): NCBI GI NO: 4218537 NR Description: GRAB2 protein [Triticum sp.]
  misc_feature (1)..(134): NCBI GI NO: 34394523 NR Description: putative GRAB2 protein(Geminivirus Rep A-binding)
  misc_feature (1)..(105): NCBI GI NO: 34902148 NR Description: Putative NAM (no apical meristem) protein
  misc_feature (1)..(135): NCBI GI NO: 27529808 NR Description: OsNAC1 protein [Oryza sativa]
  misc_feature (1)..(76): NCBI GI NO: 15229219 NR Description: NAM-like protein
  misc_feature (1)..(36): NCBI GI NO: 9758909 NR Description: NAM (no apical meristem)-like protein
  misc_feature (1)..(36): NCBI GI NO: 30686737 NR Description: NAM (no apical meristem)-related protein
  misc_feature (1)..(60): NCBI GI NO: 21105757 NR Description: nam-like protein 14 [Petunia x hybrida]
  misc_feature (1)..(44): NCBI GI NO: 27529810 NR Description: OsNAC2 protein [Oryza sativa]
  misc_feature (1)..(36): NCBI GI NO: 21389172 NR Description: nam-like protein 17 [Petunia x hybrida]
MAPPHAVSVGMERSDSLAFLDDLVLDNADDLPPLIDSTTYAAAGTTTTTNDDSGGYQQATKAEPQPHLPAPSNSPYQQQAIRRHCKAEAPAPAMVLSPSRETPGADMFQLQHVDELLQLDGGFMEDYYNMNMWKV

SEQ ID NO: 40283 - DNA, 699 bp, Zea mays subsp. mays
  misc_feature (1)..(699): Ceres Seq. ID no. 12381542
  misc_feature (481)..(481): n is a, c, t, g, unknown, or other
agaggaaaacgcactgccaacggagtcaggtgcggcgggaggtagcatgagggagcagcaggattccggcgacgtgacggggcgccggggcggggtcatcaggtcgctgctgggcgtcgagcgccggcttgcggagggcgacgcggacgccgagggggcgctcggagcctcctcggagaagcagcatttggccgcggacagcggcgaggagaggaaggcggtggtgagggtggtggcggctgacatgccgcccgcgctgcagcgccgcgcgttccgctgcgcccgcgacgagctcgcggcgatgccgcacttcccgcgccggctcgagcccaagcgcctcgcgctggcgctcaagaaggagtttgatactgcttacgggccagcttggcactgcatcgtggggacgagtttcggttcgtatgtcacgcacgcccggggtggtttcttgtatttttccgtcgataaggtctacatcctgctnttcaggacagccgtggagccctcgaatcattgacggccaccggcctgccagcaatggaccaatggctcataaaaacgcgcagttcttgggacagcttgcaccaaattcagttgttcagtcagctaggccgagcccttgtaacttgtaaatcgcattgtttcttggtaggcaaatgtaaactactccttatgcttctgataaaatttaacatttcagtc

SEQ ID NO: 40284 - protein, 170 aa, Zea mays subsp. mays
  peptide (1)..(170): Ceres Seq. ID no. 12381543
  misc_feature (75)..(164): Pfam Name: Pfam Description:  Dynein light chain type 1
  misc_feature (67)..(170): NCBI GI NO: 38567715 NR Description: B1358B12.13
  misc_feature (54)..(167): NCBI GI NO: 15220678 NR Description: dynein light subunit lc6, flagellar outer arm
  misc_feature (40)..(169): NCBI GI NO: 15241269 NR Description: dynein light chain - like protein
  misc_feature (75)..(165): NCBI GI NO: 34913978 NR Description: dynein light chain - like protein
  misc_feature (70)..(163): NCBI GI NO: 2811014 NR Description: DYNEIN LIGHT CHAIN LC6, FLAGELLAR OUTER ARM
  misc_feature (70)..(163): NCBI GI NO: 34785679 NR Description: Unknown (protein for MGC:68763) [Xenopus laevis]
  misc_feature (70)..(163): NCBI GI NO: 30961847 NR Description: neuronal nitric oxidse synthase protein inhibitor
  misc_feature (41)..(163): NCBI GI NO: 34902908 NR Description: unnamed protein product
  misc_feature (70)..(163): NCBI GI NO: 18087731 NR Description: dynein light chain 2; RIKEN cDNA 1700064A15 gene
  misc_feature (72)..(162): NCBI GI NO: 28829295 NR Description: similar to Anthocidaris crassispina (Sea urchin)
  misc_feature (160)..(160): Xaa is any aa, unknown or other
EENALPTESGAAGGSMREQQDSGDVTGRRGGVIRSLLGVERRLAEGDADAEGALGASSEKQHLAADSGEERKAVVRVVAADMPPALQRRAFRCARDELAAMPHFPRRLEPKRLALALKKEFDTAYGPAWHCIVGTSFGSYVTHARGGFLYFSVDKVYILXFRTAVEPSNH

SEQ ID NO: 40285 - protein, 155 aa, Zea mays subsp. mays
  peptide (1)..(155): Ceres Seq. ID no. 12381544
  misc_feature (60)..(149): Pfam Name: Pfam Description:  Dynein light chain type 1
  misc_feature (52)..(155): NCBI GI NO: 38567715 NR Description: B1358B12.13
  misc_feature (39)..(152): NCBI GI NO: 15220678 NR Description: dynein light subunit lc6, flagellar outer arm
  misc_feature (25)..(154): NCBI GI NO: 15241269 NR Description: dynein light chain - like protein
  misc_feature (60)..(150): NCBI GI NO: 34913978 NR Description: dynein light chain - like protein
  misc_feature (55)..(148): NCBI GI NO: 2811014 NR Description: DYNEIN LIGHT CHAIN LC6, FLAGELLAR OUTER ARM
  misc_feature (55)..(148): NCBI GI NO: 34785679 NR Description: Unknown (protein for MGC:68763) [Xenopus laevis]
  misc_feature (55)..(148): NCBI GI NO: 30961847 NR Description: neuronal nitric oxidse synthase protein inhibitor
  misc_feature (26)..(148): NCBI GI NO: 34902908 NR Description: unnamed protein product
  misc_feature (55)..(148): NCBI GI NO: 18087731 NR Description: dynein light chain 2; RIKEN cDNA 1700064A15 gene
  misc_feature (57)..(147): NCBI GI NO: 28829295 NR Description: similar to Anthocidaris crassispina (Sea urchin)
  misc_feature (145)..(145): Xaa is any aa, unknown or other
MREQQDSGDVTGRRGGVIRSLLGVERRLAEGDADAEGALGASSEKQHLAADSGEERKAVVRVVAADMPPALQRRAFRCARDELAAMPHFPRRLEPKRLALALKKEFDTAYGPAWHCIVGTSFGSYVTHARGGFLYFSVDKVYILXFRTAVEPSNH

SEQ ID NO: 40286 - protein, 89 aa, Zea mays subsp. mays
  peptide (1)..(89): Ceres Seq. ID no. 12381545
  misc_feature (1)..(83): Pfam Name: Pfam Description:  Dynein light chain type 1
  misc_feature (1)..(89): NCBI GI NO: 38567715 NR Description: B1358B12.13
  misc_feature (1)..(86): NCBI GI NO: 15220678 NR Description: dynein light subunit lc6, flagellar outer arm
  misc_feature (1)..(88): NCBI GI NO: 15241269 NR Description: dynein light chain - like protein
  misc_feature (1)..(84): NCBI GI NO: 34913978 NR Description: dynein light chain - like protein
  misc_feature (1)..(82): NCBI GI NO: 2811014 NR Description: DYNEIN LIGHT CHAIN LC6, FLAGELLAR OUTER ARM
  misc_feature (1)..(82): NCBI GI NO: 34785679 NR Description: Unknown (protein for MGC:68763) [Xenopus laevis]
  misc_feature (1)..(82): NCBI GI NO: 30961847 NR Description: neuronal nitric oxidse synthase protein inhibitor
  misc_feature (1)..(82): NCBI GI NO: 34902908 NR Description: unnamed protein product
  misc_feature (1)..(82): NCBI GI NO: 18087731 NR Description: dynein light chain 2; RIKEN cDNA 1700064A15 gene
  misc_feature (1)..(81): NCBI GI NO: 28829295 NR Description: similar to Anthocidaris crassispina (Sea urchin)
  misc_feature (79)..(79): Xaa is any aa, unknown or other
MPPALQRRAFRCARDELAAMPHFPRRLEPKRLALALKKEFDTAYGPAWHCIVGTSFGSYVTHARGGFLYFSVDKVYILXFRTAVEPSNH

SEQ ID NO: 40287 - DNA, 941 bp, Zea mays subsp. mays
  misc_feature (1)..(941): Ceres Seq. ID no. 12369394
gttaacacgcaaacgcaagctcccaagcagctaccaaccagccgggagagggagcgcacgcactgcgagaatggccacggccggcggaggggccgggcatctgaagctgctgggcgcgtggccgagccccttcgtgaaccgtgtacgcatggcgctgcacctcaaggggctggagtacgagaacgtggaggaggacctcaccaacaagagcgacctgctcctcgcctccaaccccgtccacaagctcgttcccgtcctcctccacggcgacaagcccatctccgagtcactcgtcatcgtggagtacctcgacgacgccttccccggcgctggccaggccgtcctccccgccgacccctatgaacgcgccgtcgctcgcttctgggccaaatacgtcgacggcaagttgcacggcatgatggtgaaggcgctcatgggggcaacggaggaggagagggcgacggcgacggtggacgcgctggccgctatggacacgctggagggcgcgttcgccgagtgctccggcgggaaaaagttcttcgccggcgacgcgcccgggtacctggacgtcgcgctgggaggcttcatcggctggctgcgcgcctgggacaaggtggggggcgtcaagctgctggacgccggccgggtcccgcgcctggccacgtgggcggagcgcttcgccgcgctcgacgtagccaaggaggtcatcccggaccccgaccacatcgccgagtttgccaaggtgctgcaggcacgctccgcggcagctgccaccagcaactgagctcgcaagtgaatgctgctgctctgccttcctgataaaatcatatcatggtacccggtttgttcgtttaatctggcgcggaaaaaacatggtttgttgtcgtaccaaactaagagtatgcatgcatgcttgttcttaattatatgtacattcgttc

SEQ ID NO: 40288 - protein, 260 aa, Zea mays subsp. mays
  peptide (1)..(260): Ceres Seq. ID no. 12369395
  misc_feature (24)..(260): NCBI GI NO: 11385505 NR Description: glutathione S-transferase GST 27 [Zea mays]
  misc_feature (30)..(260): NCBI GI NO: 37536308 NR Description: putative glutathione S-transferase
  misc_feature (27)..(259): NCBI GI NO: 37536310 NR Description: putative glutathione S-transferase
  misc_feature (27)..(259): NCBI GI NO: 37536312 NR Description: putative glutathione S-transferase
  misc_feature (24)..(259): NCBI GI NO: 37536328 NR Description: putative glutathione S-transferase
  misc_feature (27)..(259): NCBI GI NO: 33304610 NR Description: tau class GST protein 4
  misc_feature (27)..(259): NCBI GI NO: 33304612 NR Description: tau class GST protein 3
  misc_feature (27)..(256): NCBI GI NO: 37536306 NR Description: putative glutathione S-transferase
  misc_feature (24)..(259): NCBI GI NO: 15430711 NR Description: putative glutathione S-transferase OsGSTU7
  misc_feature (27)..(260): NCBI GI NO: 11385531 NR Description: glutathione S-transferase GST 40 [Zea mays]
LTRKRKLPSSYQPAGRGSARTARMATAGGGAGHLKLLGAWPSPFVNRVRMALHLKGLEYENVEEDLTNKSDLLLASNPVHKLVPVLLHGDKPISESLVIVEYLDDAFPGAGQAVLPADPYERAVARFWAKYVDGKLHGMMVKALMGATEEERATATVDALAAMDTLEGAFAECSGGKKFFAGDAPGYLDVALGGFIGWLRAWDKVGGVKLLDAGRVPRLATWAERFAALDVAKEVIPDPDHIAEFAKVLQARSAAAATSN

SEQ ID NO: 40289 - protein, 237 aa, Zea mays subsp. mays
  peptide (1)..(237): Ceres Seq. ID no. 12369396
  misc_feature (1)..(237): NCBI GI NO: 11385505 NR Description: glutathione S-transferase GST 27 [Zea mays]
  misc_feature (7)..(237): NCBI GI NO: 37536308 NR Description: putative glutathione S-transferase
  misc_feature (4)..(236): NCBI GI NO: 37536310 NR Description: putative glutathione S-transferase
  misc_feature (4)..(236): NCBI GI NO: 37536312 NR Description: putative glutathione S-transferase
  misc_feature (1)..(236): NCBI GI NO: 37536328 NR Description: putative glutathione S-transferase
  misc_feature (4)..(236): NCBI GI NO: 33304610 NR Description: tau class GST protein 4
  misc_feature (4)..(236): NCBI GI NO: 33304612 NR Description: tau class GST protein 3
  misc_feature (4)..(233): NCBI GI NO: 37536306 NR Description: putative glutathione S-transferase
  misc_feature (1)..(236): NCBI GI NO: 15430711 NR Description: putative glutathione S-transferase OsGSTU7
  misc_feature (4)..(237): NCBI GI NO: 11385531 NR Description: glutathione S-transferase GST 40 [Zea mays]
MATAGGGAGHLKLLGAWPSPFVNRVRMALHLKGLEYENVEEDLTNKSDLLLASNPVHKLVPVLLHGDKPISESLVIVEYLDDAFPGAGQAVLPADPYERAVARFWAKYVDGKLHGMMVKALMGATEEERATATVDALAAMDTLEGAFAECSGGKKFFAGDAPGYLDVALGGFIGWLRAWDKVGGVKLLDAGRVPRLATWAERFAALDVAKEVIPDPDHIAEFAKVLQARSAAAATSN

SEQ ID NO: 40290 - protein, 211 aa, Zea mays subsp. mays
  peptide (1)..(211): Ceres Seq. ID no. 12369397
  misc_feature (1)..(211): NCBI GI NO: 11385505 NR Description: glutathione S-transferase GST 27 [Zea mays]
  misc_feature (1)..(211): NCBI GI NO: 37536308 NR Description: putative glutathione S-transferase
  misc_feature (1)..(210): NCBI GI NO: 37536310 NR Description: putative glutathione S-transferase
  misc_feature (1)..(210): NCBI GI NO: 37536312 NR Description: putative glutathione S-transferase
  misc_feature (1)..(210): NCBI GI NO: 37536328 NR Description: putative glutathione S-transferase
  misc_feature (1)..(210): NCBI GI NO: 33304610 NR Description: tau class GST protein 4
  misc_feature (1)..(210): NCBI GI NO: 33304612 NR Description: tau class GST protein 3
  misc_feature (1)..(207): NCBI GI NO: 37536306 NR Description: putative glutathione S-transferase
  misc_feature (1)..(210): NCBI GI NO: 15430711 NR Description: putative glutathione S-transferase OsGSTU7
  misc_feature (1)..(211): NCBI GI NO: 11385531 NR Description: glutathione S-transferase GST 40 [Zea mays]
MALHLKGLEYENVEEDLTNKSDLLLASNPVHKLVPVLLHGDKPISESLVIVEYLDDAFPGAGQAVLPADPYERAVARFWAKYVDGKLHGMMVKALMGATEEERATATVDALAAMDTLEGAFAECSGGKKFFAGDAPGYLDVALGGFIGWLRAWDKVGGVKLLDAGRVPRLATWAERFAALDVAKEVIPDPDHIAEFAKVLQARSAAAATSN

SEQ ID NO: 40291 - DNA, 1288 bp, Zea mays subsp. mays
  misc_feature (1)..(1288): Ceres Seq. ID no. 12360617
gcacgagaccattacctagaacatcctaatcgaaaaaagctctctcatccagctaactaatggaagtagctagcaaacgtacgtattcttcttcaccatctgtttcttggggaaattaaaccccagtacgcgtacgtcacaatcgcgcgcaatggagaaggagaaggagaagtccagggccaggccgtcgaggggccactggcggcccggcgaggacgacaagctgcggcagctcgtcgacaagtacggcccgcggaactggaactccattgctgagagtctggaggggagatcaggcaagagctgccggctacgatggttcaaccagcttgacccgcggatcaaccggcggcccttcacggtggcggaggaggagctgctcctgcgggcgcaccgcgcccacggcaaccgctgggcgatcatctcccgcctcttcccgggccgcaccgacaacgccgtcaagaaccactggcacgtcgtcatggcgcgccgccgccgccgtaccctcgtcggcgaggccgcagccatcggctctgtcgttgtaccgcctcgtcatcagtacttccattttggaagctgctcgccgccgccgccgacccgctcgctgtgcttcgcggtgcctgcaggtttcggtccgctcggactcagcagaccagctgcaagttgcggtgtcaggaactgcaatgtgcccactgccgtcgcattactggacgacggccatcgtcatgacatgagcaaagaccttggtggcgacgatgacaatggcggtgatgcgcttgcaaagaggaaggacgtgcaattcttcgacttcttgggcgtcgggatctaaagcaaaataatgatgctactaatggtacattaattagtacactacatttcaacgatacactattggggtcttcttttccgtcgaagattcttttaaaaaacatcttcgacaaaatgatacaaaggatcaccgaagccaccttcagtctcgatttatctcctcaagacgaagactctgtatagagccgacagtgcaagatgccgaagctcaatggcctcagcccacatcaagcaaggaaggaaaaaggactagataggccttattggttttaattacttgtaaacaagtgttcaagggcatggatgtaattttaccgggctgcgtcccgtgactataaatagatgaacagtaccccgaccgtactattcacgctggattgtaatcactctcgcatcatcctcgttctctcaccttttggcaagccgaaagtaccaatataatatgaatattgttgatgtt

SEQ ID NO: 40292 - protein, 225 aa, Zea mays subsp. mays
  peptide (1)..(225): Ceres Seq. ID no. 12360618
  misc_feature (14)..(60): Pfam Name: Pfam Description:  Myb-like DNA-binding domain
  misc_feature (1)..(171): NCBI GI NO: 6979341 NR Description: myb-like protein [Oryza sativa]
  misc_feature (13)..(223): NCBI GI NO: 21321780 NR Description: putative Myb/Myb-related protein
  misc_feature (13)..(116): NCBI GI NO: 31980093 NR Description: MYB transcription factor R2R3 type
  misc_feature (13)..(118): NCBI GI NO: 11358543 NR Description: myb-related transcription factor MYB54
  misc_feature (13)..(118): NCBI GI NO: 15219462 NR Description: myb family transcription factor
  misc_feature (13)..(116): NCBI GI NO: 15220910 NR Description: myb family trnscription factor
  misc_feature (13)..(116): NCBI GI NO: 21554916 NR Description: myb-like protein, putative [Arabidopsis thaliana]
  misc_feature (13)..(116): NCBI GI NO: 25513679 NR Description: F2H15.17 protein - Arabidopsis thaliana
  misc_feature (13)..(116): NCBI GI NO: 11358541 NR Description: myb-related transcription factor MYB52
  misc_feature (13)..(116): NCBI GI NO: 34903242 NR Description: unnamed protein product
MEKEKEKSRARPSRGHWRPGEDDKLRQLVDKYGPRNWNSIAESLEGRSGKSCRLRWFNQLDPRINRRPFTVAEEELLLRAHRAHGNRWAIISRLFPGRTDNAVKNHWHVVMARRRRRTLVGEAAAIGSVVVPPRHQYFHFGSCSPPPPTRSLCFAVPAGFGPLGLSRPAASCGVRNCNVPTAVALLDDGHRHDMSKDLGGDDDNGGDALAKRKDVQFFDFLGVGI

SEQ ID NO: 40293 - protein, 115 aa, Zea mays subsp. mays
  peptide (1)..(115): Ceres Seq. ID no. 12360619
  misc_feature (1)..(61): NCBI GI NO: 6979341 NR Description: myb-like protein [Oryza sativa]
  misc_feature (1)..(113): NCBI GI NO: 21321780 NR Description: putative Myb/Myb-related protein
  misc_feature (1)..(15): NCBI GI NO: 15234199 NR Description: myb family transcription factor
  misc_feature (1)..(19): NCBI GI NO: 18421897 NR Description: myb family transcription factor
  misc_feature (1)..(35): NCBI GI NO: 9954112 NR Description: tuber-specific and sucrose-responsive elementbinding factor
  misc_feature (1)..(17): NCBI GI NO: 15235484 NR Description: myb DNA-binding protein
  misc_feature (1)..(21): NCBI GI NO: 15232609 NR Description: myb family transcription factor
  misc_feature (1)..(42): NCBI GI NO: 107957 NR Description: transforming protein myb
  misc_feature (1)..(42): NCBI GI NO: 180658 NR Description: c-myb protein
  misc_feature (1)..(42): NCBI GI NO: 1872204 NR Description: alternatively spliced product using exon 9A
MARRRRRTLVGEAAAIGSVVVPPRHQYFHFGSCSPPPPTRSLCFAVPAGFGPLGLSRPAASCGVRNCNVPTAVALLDDGHRHDMSKDLGGDDDNGGDALAKRKDVQFFDFLGVGI

SEQ ID NO: 40294 - DNA, 1260 bp, Zea mays subsp. mays
  misc_feature (1)..(1260): Ceres Seq. ID no. 12368126
agtcaaacaaattgtttactagcctaagtgtaagagcagcacgatggtgcatcaggctcagggacagatggtgcaggaggtggccgccgccggcctccccgcgctgccgagccggtacgtgctgagggaggaggaccgcccaactggtgacgtcgcggcacccgagttggccttccccaccgtggacgtcaatgtcttgccgaccccggtgacgtggaggaggccagcaagctccggtcggcgctcgaatcctggggcctcttcaaggtgaccggccacggcatgccggtatccctgctggacggcatccgggacgccgggctggagttcttccacctgccagcggcggagaagctgaagcacgccaaccgggacgacgccggcgagttccagcccgagggttacggcatcgaccgcgtggacaccgacggtcaggtgctggactggtgcgaccggctgtacctgacggtgcagccggaggaggagcggcggatgcagttctggcccgcgcggccggcgtcgctcgtggggctcctgcacgagtacgccctgggcagcgagcaggtggccaggcgcgtgctccgggccatggcgcgggtgctggggttcggcgaggggttcttcctcgggcacgtgggcgagaagggcggcacgtacgcgcggttcacctactaccctccctgcccgcgcccggacctcgtgtacgggctgaagccccacacggacaactccgtcgtcaccgtgctcctcctcgaccgcgacgtcggcggcctccaggtgctgctcagggggcctggccccggcccggtgggtggacgtgcccgtgctcgcccgcgacgagctgctcgtcgtcgtcggcgaggagatggagatcatgagcaacgcggtgttcagggcgcccacgcaccgcgtggtcaccagcggcagggagaggatgtcgctcgtgctcttctaccagccggagccgcacaaggacctgcagcccgcggaggagctggtgagcgaggaccggcccgcgatttacaggaggctcaaggccaagaccttcggcgacgggttctgggatgcgttcgcgctcggcgagcgcaccatcgacttcctcaacatcaaggtcgacgacaaggagcatggaggcggattagtaacctcagcgccagcttgacgccatgcatgtgaacgaactactgtacacgatgtatcactggtagtgtaatgtaataagagacatggagcggttttccatgcaatataatctagttt

SEQ ID NO: 40295 - protein, 297 aa, Zea mays subsp. mays
  peptide (1)..(297): Ceres Seq. ID no. 12368127
  misc_feature (1)..(170): NCBI GI NO: 34898464 NR Description: Similar to Prunus armeniaca ethylene-forming-enzyme-like dioxygenase
  misc_feature (1)..(166): NCBI GI NO: 24413982 NR Description: ethylene-forming-enzyme-like dioxygenase-like
  misc_feature (1)..(166): NCBI GI NO: 34898470 NR Description: ESTs D47168
  misc_feature (1)..(166): NCBI GI NO: 33115140 NR Description: iron/ascorbate-dependent oxidoreductase
  misc_feature (1)..(170): NCBI GI NO: 34898468 NR Description: Similar to Prunus armeniaca ethylene-forming-enzyme-like dioxygenase
  misc_feature (1)..(170): NCBI GI NO: 24413984 NR Description: ethylene-forming-enzyme-like dioxygenase-like
  misc_feature (1)..(170): NCBI GI NO: 15241383 NR Description: ethylene-forming-enzyme-like dioxygenase - like
  misc_feature (1)..(167): NCBI GI NO: 2688828 NR Description: ethylene-forming-enzyme-like dioxygenase
  misc_feature (1)..(165): NCBI GI NO: 15241348 NR Description: ethylene-forming-enzyme-like dioxygenase-like
  misc_feature (1)..(165): NCBI GI NO: 21593366 NR Description: ethylene-forming-enzyme-like dioxygenase-like
MPVSLLDGIRDAGLEFFHLPAAEKLKHANRDDAGEFQPEGYGIDRVDTDGQVLDWCDRLYLTVQPEEERRMQFWPARPASLVGLLHEYALGSEQVARRVLRAMARVLGFGEGFFLGHVGEKGGTYARFTYYPPCPRPDLVYGLKPHTDNSVVTVLLLDRDVGGLQVLLRGPGPGPVGGRARARPRRAARRRRRGDGDHEQRGVQGAHAPRGHQRQGEDVARALLPAGAAQGPAARGGAGERGPARDLQEAQGQDLRRRVLGCVRARRAHHRLPQHQGRRQGAWRRISNLSASLTPCM

SEQ ID NO: 40296 - protein, 227 aa, Zea mays subsp. mays
  peptide (1)..(227): Ceres Seq. ID no. 12368128
  misc_feature (1)..(100): NCBI GI NO: 34898464 NR Description: Similar to Prunus armeniaca ethylene-forming-enzyme-like dioxygenase
  misc_feature (1)..(96): NCBI GI NO: 24413982 NR Description: ethylene-forming-enzyme-like dioxygenase-like
  misc_feature (1)..(96): NCBI GI NO: 34898470 NR Description: ESTs D47168
  misc_feature (1)..(96): NCBI GI NO: 33115140 NR Description: iron/ascorbate-dependent oxidoreductase
  misc_feature (1)..(100): NCBI GI NO: 34898468 NR Description: Similar to Prunus armeniaca ethylene-forming-enzyme-like dioxygenase
  misc_feature (1)..(100): NCBI GI NO: 24413984 NR Description: ethylene-forming-enzyme-like dioxygenase-like
  misc_feature (1)..(100): NCBI GI NO: 15241383 NR Description: ethylene-forming-enzyme-like dioxygenase - like
  misc_feature (1)..(97): NCBI GI NO: 2688828 NR Description: ethylene-forming-enzyme-like dioxygenase
  misc_feature (1)..(95): NCBI GI NO: 15241348 NR Description: ethylene-forming-enzyme-like dioxygenase-like
  misc_feature (1)..(95): NCBI GI NO: 21593366 NR Description: ethylene-forming-enzyme-like dioxygenase-like
MQFWPARPASLVGLLHEYALGSEQVARRVLRAMARVLGFGEGFFLGHVGEKGGTYARFTYYPPCPRPDLVYGLKPHTDNSVVTVLLLDRDVGGLQVLLRGPGPGPVGGRARARPRRAARRRRRGDGDHEQRGVQGAHAPRGHQRQGEDVARALLPAGAAQGPAARGGAGERGPARDLQEAQGQDLRRRVLGCVRARRAHHRLPQHQGRRQGAWRRISNLSASLTPCM

SEQ ID NO: 40297 - protein, 195 aa, Zea mays subsp. mays
  peptide (1)..(195): Ceres Seq. ID no. 12368129
  misc_feature (1)..(68): NCBI GI NO: 34898464 NR Description: Similar to Prunus armeniaca ethylene-forming-enzyme-like dioxygenase
  misc_feature (1)..(64): NCBI GI NO: 24413982 NR Description: ethylene-forming-enzyme-like dioxygenase-like
  misc_feature (1)..(64): NCBI GI NO: 34898470 NR Description: ESTs D47168
  misc_feature (1)..(64): NCBI GI NO: 33115140 NR Description: iron/ascorbate-dependent oxidoreductase
  misc_feature (1)..(68): NCBI GI NO: 34898468 NR Description: Similar to Prunus armeniaca ethylene-forming-enzyme-like dioxygenase
  misc_feature (1)..(68): NCBI GI NO: 24413984 NR Description: ethylene-forming-enzyme-like dioxygenase-like
  misc_feature (1)..(68): NCBI GI NO: 15241383 NR Description: ethylene-forming-enzyme-like dioxygenase - like
  misc_feature (1)..(65): NCBI GI NO: 2688828 NR Description: ethylene-forming-enzyme-like dioxygenase
  misc_feature (1)..(63): NCBI GI NO: 15241348 NR Description: ethylene-forming-enzyme-like dioxygenase-like
  misc_feature (1)..(63): NCBI GI NO: 21593366 NR Description: ethylene-forming-enzyme-like dioxygenase-like
MARVLGFGEGFFLGHVGEKGGTYARFTYYPPCPRPDLVYGLKPHTDNSVVTVLLLDRDVGGLQVLLRGPGPGPVGGRARARPRRAARRRRRGDGDHEQRGVQGAHAPRGHQRQGEDVARALLPAGAAQGPAARGGAGERGPARDLQEAQGQDLRRRVLGCVRARRAHHRLPQHQGRRQGAWRRISNLSASLTPCM

SEQ ID NO: 40298 - DNA, 1487 bp, Zea mays subsp. mays
  misc_feature (1)..(1487): Ceres Seq. ID no. 12363475
  misc_feature (1030)..(1030): n is a, c, t, g, unknown, or other
  misc_feature (979)..(979): n is a, c, t, g, unknown, or other
gcacgagaccattacctagaacatcctaatcgaaaaatgtgtgtgtatatatatgcacaaataaataaataaataaataatataaagaacaatcgtctacgcgcaggaccgcgccggctggggcgccgccaccgtcgcgctcgccgccgtcatggccgcctcgctcgccgtcttcctcgccggccgccggtactaccgctacagggtgcccgagggcagcccgctcacgccgctgctccaggtcctcgtcgccgccttccggaataggcggctcccgttgccggacgacgacgccgagctgtacgaggtcaggcggccgcagagtagcaagaggaggctgctttgccacacctaccagctgaggttcctcgacaaggcagccatagtggagcccggcgccggcgaggacgcctgcgggccgtggcggctggcgacggtgacgcaggtggaggagacgaagctggtgctggcgatggtgcccatctgggtgtgcacgctgcccttcgggcatggcggtggcgcaggtgtccaccttcttcatcaagcagggcagcgtgatggaccgtcgcctgggcccgcacttggaggccccggcggcgtcggtgttcgcgctgtcggcggtggccatgatcgccacggtggcggcctacgacaaggcgctggtgccgtacctgcggcgcgccacgggaggggagcgcgggatcagcatccttgggcgcgtgggcatcggcatggcgttcgccatcgcggggctgggcgtggcggcggcggtggagcggcggcgcctgctgtcggcgggcgccgcgcggccgtcgacgtcggtgctgtggctggtgccgcagttcgcgctgatgggcgtggccgacgggttcgcgctggtgggcctgcaggagtacttctacgagcaggtccccgacggcatgcgcagcctgggcatcggcctctacctcagcgtcattggcgccgggagcttcctgancagcctggtgatcaacggcggcggaccgcgccagctcccgcggagggcgcnccggctggttcgccaaggacctcaaccgcagcaggctggacctcttctactggctgctggcgtgcatcagcgccgtcaacctggcattctacgcgctggtcgccaccaagtgctcgtacaagcagaccgtcagggccggcagggtcggcgacgaggtcgagtgcgccgccgcgtagctgctgctgtacgtggtggtcatgaaaccaaccatgcatcagccgcacgaccatgtgtattattattattattataggggctaatagtaactagctactcgttgatcgtgttgttgttctagctagcttgggtacaagtagtacattcatgccacgtcgtgttgtatatgctgctcgtagacgttggtgtatatatgtgtactggcgcgtcgtcgaaacaatacgtgtacaagtactgtttggttcgttgtagcagcgatttatcagctaaattaattact

SEQ ID NO: 40299 - protein, 359 aa, Zea mays subsp. mays
  peptide (1)..(359): Ceres Seq. ID no. 12363476
  misc_feature (1)..(119): Pfam Name: Pfam Description:  POT family
  misc_feature (1)..(119): NCBI GI NO: 34897398 NR Description: putative peptide transport protein
  misc_feature (1)..(119): NCBI GI NO: 15224397 NR Description: putative peptide/amino acid transporter
  misc_feature (1)..(119): NCBI GI NO: 15232380 NR Description: transporter-like protein; protein id: At3g53960.1
  misc_feature (71)..(119): NCBI GI NO: 13605523 NR Description: AT3g53960/F5K20_260 [Arabidopsis thaliana]
  misc_feature (1)..(112): NCBI GI NO: 37530472 NR Description: putative peptide transporter
  misc_feature (1)..(118): NCBI GI NO: 37533590 NR Description: putative proton-dependent oligopeptide transport
  misc_feature (1)..(118): NCBI GI NO: 37530498 NR Description: putative LeOPT1 - oligopeptide transporter
  misc_feature (1)..(116): NCBI GI NO: 15226687 NR Description: putative PTR2 family peptide transporter
  misc_feature (1)..(115): NCBI GI NO: 37535270 NR Description: putative peptide transport protein
  misc_feature (1)..(116): NCBI GI NO: 17380882 NR Description: putative PTR2 family peptide transporter protein
  misc_feature (276)..(276): Xaa is any aa, unknown or other
  misc_feature (293)..(293): Xaa is any aa, unknown or other
MAASLAVFLAGRRYYRYRVPEGSPLTPLLQVLVAAFRNRRLPLPDDDAELYEVRRPQSSKRRLLCHTYQLRFLDKAAIVEPGAGEDACGPWRLATVTQVEETKLVLAMVPIWVCTLPFGHGGGAGVHLLHQAGQRDGPSPGPALGGPGGVGVRAVGGGHDRHGGGLRQGAGAVPAARHGRGARDQHPWARGHRHGVRHRGAGRGGGGGAAAPAVGGRRAAVDVGAVAGAAVRADGRGRRVRAGGPAGVLLRAGPRRHAQPGHRPLPQRHWRRELPXQPGDQRRRTAPAPAEGXPAGSPRTSTAAGWTSSTGCWRASAPSTWHSTRWSPPSARTSRPSGPAGSATRSSAPPRSCCCTWWS

SEQ ID NO: 40300 - protein, 257 aa, Zea mays subsp. mays
  peptide (1)..(257): Ceres Seq. ID no. 12363477
  misc_feature (1)..(150): Pfam Name: Pfam Description:  POT family
  misc_feature (1)..(161): NCBI GI NO: 34897398 NR Description: putative peptide transport protein
  misc_feature (1)..(161): NCBI GI NO: 15224397 NR Description: putative peptide/amino acid transporter
  misc_feature (1)..(161): NCBI GI NO: 15232380 NR Description: transporter-like protein; protein id: At3g53960.1
  misc_feature (1)..(161): NCBI GI NO: 13605523 NR Description: AT3g53960/F5K20_260 [Arabidopsis thaliana]
  misc_feature (1)..(161): NCBI GI NO: 37530472 NR Description: putative peptide transporter
  misc_feature (1)..(158): NCBI GI NO: 37533590 NR Description: putative proton-dependent oligopeptide transport
  misc_feature (1)..(170): NCBI GI NO: 37530498 NR Description: putative LeOPT1 - oligopeptide transporter
  misc_feature (4)..(161): NCBI GI NO: 15226687 NR Description: putative PTR2 family peptide transporter
  misc_feature (1)..(162): NCBI GI NO: 37535270 NR Description: putative peptide transport protein
  misc_feature (4)..(161): NCBI GI NO: 17380882 NR Description: putative PTR2 family peptide transporter protein
  misc_feature (157)..(157): Xaa is any aa, unknown or other
  misc_feature (174)..(174): Xaa is any aa, unknown or other
MAVAQVSTFFIKQGSVMDRRLGPHLEAPAASVFALSAVAMIATVAAYDKALVPYLRRATGGERGISILGRVGIGMAFAIAGLGVAAAVERRRLLSAGAARPSTSVLWLVPQFALMGVADGFALVGLQEYFYEQVPDGMRSLGIGLYLSVIGAGSFLXSLVINGGGPRQLPRRAXRLVRQGPQPQQAGPLLLAAGVHQRRQPGILRAGRHQVLVQADRQGRQGRRRGRVRRRVAAAVRGGHETNHASAARPCVLLLLL

SEQ ID NO: 40301 - protein, 252 aa, Zea mays subsp. mays
  peptide (1)..(252): Ceres Seq. ID no. 12363478
  misc_feature (1)..(12): NCBI GI NO: 34897398 NR Description: putative peptide transport protein
  misc_feature (1)..(12): NCBI GI NO: 15224397 NR Description: putative peptide/amino acid transporter
  misc_feature (1)..(12): NCBI GI NO: 15232380 NR Description: transporter-like protein; protein id: At3g53960.1
  misc_feature (1)..(12): NCBI GI NO: 13605523 NR Description: AT3g53960/F5K20_260 [Arabidopsis thaliana]
  misc_feature (1)..(11): NCBI GI NO: 37533590 NR Description: putative proton-dependent oligopeptide transport
  misc_feature (1)..(11): NCBI GI NO: 37530498 NR Description: putative LeOPT1 - oligopeptide transporter
  misc_feature (1)..(11): NCBI GI NO: 11358594 NR Description: oligopeptide transporter-like protein
  misc_feature (1)..(11): NCBI GI NO: 21741984 NR Description: OSJNBa0060P14.5
  misc_feature (1)..(11): NCBI GI NO: 4102839 NR Description: LeOPT1 [Lycopersicon esculentum]
  misc_feature (1)..(11): NCBI GI NO: 28273096 NR Description: nitrate transporter [Nicotiana tabacum]
  misc_feature (169)..(169): Xaa is any aa, unknown or other
  misc_feature (186)..(186): Xaa is any aa, unknown or other
MVPIWVCTLPFGHGGGAGVHLLHQAGQRDGPSPGPALGGPGGVGVRAVGGGHDRHGGGLRQGAGAVPAARHGRGARDQHPWARGHRHGVRHRGAGRGGGGGAAAPAVGGRRAAVDVGAVAGAAVRADGRGRRVRAGGPAGVLLRAGPRRHAQPGHRPLPQRHWRRELPXQPGDQRRRTAPAPAEGXPAGSPRTSTAAGWTSSTGCWRASAPSTWHSTRWSPPSARTSRPSGPAGSATRSSAPPRSCCCTWWS

SEQ ID NO: 40302 - DNA, 1573 bp, Zea mays subsp. mays
  misc_feature (1)..(1573): Ceres Seq. ID no. 12391535
atccatcactcacgagcaggatcgagtcgaggcctcagctccctcctcggcgtcctcgcaacgaaggaaaggaacaatgtcagcggctcgtcgtcggtccccaatccccgttctcctcttcttcctcctcctccactccgcgtcgccgagccccatcaagacggtggtggtgctggtgatggagaaccgctccttcgaccacattctggggtggatgaagcggctgaacccggagatcgacggcgtgacggggcgggagtggaacccggccaacgcgtcggacccggcggcggggcgcgtctacttccgcgacggcgccgcgtacgtggacccggacccgggccactcgttccaggagatccggcagcaggtcttcggctccgacgacgacgccgcggacaacccgccccgcatggacggcttcgcgcagcaggcgcgctccatcggcggcggcgccatgtccgacgccgtcatgcgcggcttcaaccccgccgacgtcgccgtctaccgcgagctcgtctcgcagttcgccgtctgcgaccgatggttcgcgtccgtgccgtcgtccacgcagcccaaccgcctgttcgtgcactccggaacgtccggcggcgccaccagcaacaacccgacgctgctggcggagggctacccgcagcggaccatcttcgacaacctccacgacgccggcctctccttcggcgtctacttccaggacgtgccggcggtgctcttctaccggaacctccgcaagctcaagtacctgctggacttccacccgctgcgcccctccttcgccgaccacgcccgccgcgggacgctccccaactacgccgtcatcacctacgacgagcacggcggcttcttcgaccacgtgcccacgcccgtcgccggcgtgcccagccccgacggcatcgtcggcccgccgccctacaacttcaccttcgaccgcctcggcgtccgcgtcccggccatcctcgtgtccccctggatcgacaggggcaccgtcgtccacgggccccacggccccacgcccacgtcgcagtacgagcactcgtccatcccggccactgtcaagaagatcttcggcctgccgcaggacttcctcacgaggcgggacgcgtgggcggggaccttcgagggcgtggtgcaggggaggaccgagccacgcaccgactgccccgagcagctgcccacgccgacgaggatcaggcagacggaggcggacgaggaggccaagcttagcgagttccagcaggagatcatccagctcgcctccgtgctcaacggcgaccaccacctcgccaccctgcaggaccggatcaagaacgacatgaacgtcagggaaggcatcgactacatgaaggccgccgtcaaacgctacttccaggccggcgcgtccgccagaaggatgggcgtcgacggcgaccagatcgtcaagatgagaccctccctcaccaccaggatccaacgcccatagacagactgtctaatcaaagcgggatcggttatgttcacaaacaggattggactacatatatatattctaaaaatacagatcacattcagtgct

SEQ ID NO: 40303 - protein, 492 aa, Zea mays subsp. mays
  peptide (1)..(492): Ceres Seq. ID no. 12391536
  misc_feature (52)..(285): Pfam Name: Pfam Description:  Phosphoesterase family
  misc_feature (28)..(285): NCBI GI NO: 20161866 NR Description: B1139B11.7
  misc_feature (279)..(488): NCBI GI NO: 20161866 NR Description: B1139B11.7
  misc_feature (45)..(280): NCBI GI NO: 15225806 NR Description: putative phospholipase C; protein id: At2g26870.1
  misc_feature (279)..(492): NCBI GI NO: 15225806 NR Description: putative phospholipase C; protein id: At2g26870.1
  misc_feature (51)..(280): NCBI GI NO: 21703147 NR Description: At1g07230/F10K1_4 [Arabidopsis thaliana]
  misc_feature (279)..(488): NCBI GI NO: 21703147 NR Description: At1g07230/F10K1_4 [Arabidopsis thaliana]
  misc_feature (51)..(280): NCBI GI NO: 15222342 NR Description: unknown protein; protein id: At1g07230.1
  misc_feature (279)..(488): NCBI GI NO: 15222342 NR Description: unknown protein; protein id: At1g07230.1
  misc_feature (50)..(280): NCBI GI NO: 34897344 NR Description: putative phospholipase [Oryza sativa]
  misc_feature (279)..(488): NCBI GI NO: 34897344 NR Description: putative phospholipase [Oryza sativa]
SITHEQDRVEASAPSSASSQRRKGTMSAARRRSPIPVLLFFLLLHSASPSPIKTVVVLVMENRSFDHILGWMKRLNPEIDGVTGREWNPANASDPAAGRVYFRDGAAYVDPDPGHSFQEIRQQVFGSDDDAADNPPRMDGFAQQARSIGGGAMSDAVMRGFNPADVAVYRELVSQFAVCDRWFASVPSSTQPNRLFVHSGTSGGATSNNPTLLAEGYPQRTIFDNLHDAGLSFGVYFQDVPAVLFYRNLRKLKYLLDFHPLRPSFADHARRGTLPNYAVITYDEHGGFFDHVPTPVAGVPSPDGIVGPPPYNFTFDRLGVRVPAILVSPWIDRGTVVHGPHGPTPTSQYEHSSIPATVKKIFGLPQDFLTRRDAWAGTFEGVVQGRTEPRTDCPEQLPTPTRIRQTEADEEAKLSEFQQEIIQLASVLNGDHHLATLQDRIKNDMNVREGIDYMKAAVKRYFQAGASARRMGVDGDQIVKMRPSLTTRIQRP

SEQ ID NO: 40304 - protein, 467 aa, Zea mays subsp. mays
  peptide (1)..(467): Ceres Seq. ID no. 12391537
  misc_feature (27)..(260): Pfam Name: Pfam Description:  Phosphoesterase family
  misc_feature (3)..(260): NCBI GI NO: 20161866 NR Description: B1139B11.7
  misc_feature (254)..(463): NCBI GI NO: 20161866 NR Description: B1139B11.7
  misc_feature (20)..(255): NCBI GI NO: 15225806 NR Description: putative phospholipase C; protein id: At2g26870.1
  misc_feature (254)..(467): NCBI GI NO: 15225806 NR Description: putative phospholipase C; protein id: At2g26870.1
  misc_feature (26)..(255): NCBI GI NO: 21703147 NR Description: At1g07230/F10K1_4 [Arabidopsis thaliana]
  misc_feature (254)..(463): NCBI GI NO: 21703147 NR Description: At1g07230/F10K1_4 [Arabidopsis thaliana]
  misc_feature (26)..(255): NCBI GI NO: 15222342 NR Description: unknown protein; protein id: At1g07230.1
  misc_feature (254)..(463): NCBI GI NO: 15222342 NR Description: unknown protein; protein id: At1g07230.1
  misc_feature (25)..(255): NCBI GI NO: 34897344 NR Description: putative phospholipase [Oryza sativa]
  misc_feature (254)..(463): NCBI GI NO: 34897344 NR Description: putative phospholipase [Oryza sativa]
MSAARRRSPIPVLLFFLLLHSASPSPIKTVVVLVMENRSFDHILGWMKRLNPEIDGVTGREWNPANASDPAAGRVYFRDGAAYVDPDPGHSFQEIRQQVFGSDDDAADNPPRMDGFAQQARSIGGGAMSDAVMRGFNPADVAVYRELVSQFAVCDRWFASVPSSTQPNRLFVHSGTSGGATSNNPTLLAEGYPQRTIFDNLHDAGLSFGVYFQDVPAVLFYRNLRKLKYLLDFHPLRPSFADHARRGTLPNYAVITYDEHGGFFDHVPTPVAGVPSPDGIVGPPPYNFTFDRLGVRVPAILVSPWIDRGTVVHGPHGPTPTSQYEHSSIPATVKKIFGLPQDFLTRRDAWAGTFEGVVQGRTEPRTDCPEQLPTPTRIRQTEADEEAKLSEFQQEIIQLASVLNGDHHLATLQDRIKNDMNVREGIDYMKAAVKRYFQAGASARRMGVDGDQIVKMRPSLTTRIQRP

SEQ ID NO: 40305 - protein, 433 aa, Zea mays subsp. mays
  peptide (1)..(433): Ceres Seq. ID no. 12391538
  misc_feature (1)..(226): Pfam Name: Pfam Description:  Phosphoesterase family
  misc_feature (1)..(226): NCBI GI NO: 20161866 NR Description: B1139B11.7
  misc_feature (220)..(429): NCBI GI NO: 20161866 NR Description: B1139B11.7
  misc_feature (1)..(221): NCBI GI NO: 15225806 NR Description: putative phospholipase C; protein id: At2g26870.1
  misc_feature (220)..(433): NCBI GI NO: 15225806 NR Description: putative phospholipase C; protein id: At2g26870.1
  misc_feature (1)..(221): NCBI GI NO: 21703147 NR Description: At1g07230/F10K1_4 [Arabidopsis thaliana]
  misc_feature (220)..(429): NCBI GI NO: 21703147 NR Description: At1g07230/F10K1_4 [Arabidopsis thaliana]
  misc_feature (1)..(221): NCBI GI NO: 15222342 NR Description: unknown protein; protein id: At1g07230.1
  misc_feature (220)..(429): NCBI GI NO: 15222342 NR Description: unknown protein; protein id: At1g07230.1
  misc_feature (1)..(221): NCBI GI NO: 34897344 NR Description: putative phospholipase [Oryza sativa]
  misc_feature (220)..(429): NCBI GI NO: 34897344 NR Description: putative phospholipase [Oryza sativa]
MENRSFDHILGWMKRLNPEIDGVTGREWNPANASDPAAGRVYFRDGAAYVDPDPGHSFQEIRQQVFGSDDDAADNPPRMDGFAQQARSIGGGAMSDAVMRGFNPADVAVYRELVSQFAVCDRWFASVPSSTQPNRLFVHSGTSGGATSNNPTLLAEGYPQRTIFDNLHDAGLSFGVYFQDVPAVLFYRNLRKLKYLLDFHPLRPSFADHARRGTLPNYAVITYDEHGGFFDHVPTPVAGVPSPDGIVGPPPYNFTFDRLGVRVPAILVSPWIDRGTVVHGPHGPTPTSQYEHSSIPATVKKIFGLPQDFLTRRDAWAGTFEGVVQGRTEPRTDCPEQLPTPTRIRQTEADEEAKLSEFQQEIIQLASVLNGDHHLATLQDRIKNDMNVREGIDYMKAAVKRYFQAGASARRMGVDGDQIVKMRPSLTTRIQRP

SEQ ID NO: 40306 - DNA, 1673 bp, Zea mays subsp. mays
  misc_feature (1)..(1673): Ceres Seq. ID no. 12418201
  misc_feature (399)..(399): n is a, c, t, g, unknown, or other
  misc_feature (403)..(403): n is a, c, t, g, unknown, or other
gcacgagaccattacctagaacatcctaatcgaaaacgcctccccgagagcccccgttttctgtcacaaatcgccactaaaaccctagccttccgccatggccacctcccctgccgcctcgtcctcctccgctccgaccgcctccgcggtggctgcggctacgatggctgttgaggccaccgacgggccggtgctcagcgtagtatcgaagcgtctccgcgcactgcggaagaagtacaaccgaatcacgcagattgaggagtcgctcgccgccggcaagacgctcaaccgagagcaggaggaggttctccgctccaagcccgtcgtcgccgctctgatcgacgagctcgagcgcctccgccctccgctcgcctccgccctcgcggaggagctcttctnccgncccgcccccgccccctccgccgcttcctcctccgactcagattcgtcagtccaggacttgcttgcgctcgtctacttcggctccctctttgacgtcaagcagcaaagcgacttcgtctctttggtttacacgcgcgaactcgagcggagcagctgcctcacttatgactacgtcggggatgatccggaggacagtctcgcggagaccgatctgaacgcggtttctgcccttgcctccctcgccgcgttgcgccctcctgctgcagccggagtctcgcaccgtgacgcccttcaggcttgtgctcatcacgcccgcctctggctctgccgtgcggatgaacccatccatcctgactccaccatcacatatgctggggtgagggcaaagctggataggatcatggcatcgggctacttcacagcgcagctagaaatgaggacaccattggatctggctgctgcagtggcaagttttggagctggaggtgtgcaggtgcaagagagcatggttgtgtcacctcaggcaccggaagcagtggaggagagccaggctgttgaaggacacaagaatgagaaggaagattctcaggctacagaaatctacaatgatcatcctgttgttgactctgaacatgtggaggatgaagtcctggtgcatccaactgatgaagttcctccagctgagacagagcaggagcaggagacatttgatgctgatgtgaaggatcaggagcaaaaggaccaacaattcatccagcggcggtcttaccagaaccagcgtggtggtggtcgtggtggcagcaggagaggctatcctaatggtcgtggaggacgtggtggccgaggtggcgggtaccagaatggccgtggtggataccagaatggtcgtggcggtgctggcgggtactactacgaatctggatactaccagccgaggaactacaacagaggccggggtggtcgctccggcggtggcaactcttactacaacagccatggtggaggtgcacaggggcatcatcctgggagtgttgagctgggcgcaaacgcctagcttcgctgactgttctgtttgataatgaggagcgagtgagtcgtgccattttgttattatagaactaacttagcctgttattacgtcaccgttggtcccatccgtgagtctttttgctgctcgagtgactgcatatggtcggtcggtattgaggaaatactctgggaaagtagtttcaggtcatattcgttttctaagttacgtttttttttgtgtt

SEQ ID NO: 40307 - protein, 452 aa, Zea mays subsp. mays
  peptide (1)..(452): Ceres Seq. ID no. 12418202
  misc_feature (354)..(445): Pfam Name: Pfam Description:  Dehydrin
  misc_feature (20)..(434): NCBI GI NO: 15223426 NR Description: unknown protein; protein id: At1g27090
  misc_feature (27)..(98): NCBI GI NO: 15230159 NR Description: unknown protein; protein id: At3g24690.1
  misc_feature (343)..(451): NCBI GI NO: 3893085 NR Description: glycine-rich protein 2 [Cicer arietinum]
  misc_feature (358)..(435): NCBI GI NO: 1170023 NR Description: ABSCISIC ACID AND ENVIRONMENTAL STRESS INDUCIBLE PROTEIN
  misc_feature (359)..(444): NCBI GI NO: 25009944 NR Description: GH03391p [Drosophila melanogaster]
  misc_feature (363)..(449): NCBI GI NO: 7488799 NR Description: dormancy-associated protein 2 - garden pea
  misc_feature (363)..(447): NCBI GI NO: 1170023 NR Description: ABSCISIC ACID AND ENVIRONMENTAL STRESS INDUCIBLE PROTEIN
  misc_feature (331)..(440): NCBI GI NO: 21388660 NR Description: glycine-rich RNA-binding protein
  misc_feature (359)..(444): NCBI GI NO: 15234010 NR Description: glycine-rich protein 2
  misc_feature (281)..(451): NCBI GI NO: 1710626 NR Description: Heterogeneous nuclear ribonucleo protein A3 homolog2
  misc_feature (101)..(101): Xaa is any aa, unknown or other
  misc_feature (102)..(102): Xaa is any aa, unknown or other
MATSPAASSSSAPTASAVAAATMAVEATDGPVLSVVSKRLRALRKKYNRITQIEESLAAGKTLNREQEEVLRSKPVVAALIDELERLRPPLASALAEELFXXPAPAPSAASSSDSDSSVQDLLALVYFGSLFDVKQQSDFVSLVYTRELERSSCLTYDYVGDDPEDSLAETDLNAVSALASLAALRPPAAAGVSHRDALQACAHHARLWLCRADEPIHPDSTITYAGVRAKLDRIMASGYFTAQLEMRTPLDLAAAVASFGAGGVQVQESMVVSPQAPEAVEESQAVEGHKNEKEDSQATEIYNDHPVVDSEHVEDEVLVHPTDEVPPAETEQEQETFDADVKDQEQKDQQFIQRRSYQNQRGGGRGGSRRGYPNGRGGRGGRGGGYQNGRGGYQNGRGGAGGYYYESGYYQPRNYNRGRGGRSGGGNSYYNSHGGGAQGHHPGSVELGANA

SEQ ID NO: 40308 - protein, 430 aa, Zea mays subsp. mays
  peptide (1)..(430): Ceres Seq. ID no. 12418203
  misc_feature (332)..(423): Pfam Name: Pfam Description:  Dehydrin
  misc_feature (1)..(412): NCBI GI NO: 15223426 NR Description: unknown protein; protein id: At1g27090
  misc_feature (5)..(76): NCBI GI NO: 15230159 NR Description: unknown protein; protein id: At3g24690.1
  misc_feature (321)..(429): NCBI GI NO: 3893085 NR Description: glycine-rich protein 2 [Cicer arietinum]
  misc_feature (336)..(413): NCBI GI NO: 1170023 NR Description: ABSCISIC ACID AND ENVIRONMENTAL STRESS INDUCIBLE PROTEIN
  misc_feature (337)..(422): NCBI GI NO: 25009944 NR Description: GH03391p [Drosophila melanogaster]
  misc_feature (341)..(427): NCBI GI NO: 7488799 NR Description: dormancy-associated protein 2 - garden pea
  misc_feature (341)..(425): NCBI GI NO: 1170023 NR Description: ABSCISIC ACID AND ENVIRONMENTAL STRESS INDUCIBLE PROTEIN
  misc_feature (309)..(418): NCBI GI NO: 21388660 NR Description: glycine-rich RNA-binding protein
  misc_feature (337)..(422): NCBI GI NO: 15234010 NR Description: glycine-rich protein 2
  misc_feature (259)..(429): NCBI GI NO: 1710626 NR Description: Heterogeneous nuclear ribonucleo protein A3 homolog2
  misc_feature (79)..(79): Xaa is any aa, unknown or other
  misc_feature (80)..(80): Xaa is any aa, unknown or other
MAVEATDGPVLSVVSKRLRALRKKYNRITQIEESLAAGKTLNREQEEVLRSKPVVAALIDELERLRPPLASALAEELFXXPAPAPSAASSSDSDSSVQDLLALVYFGSLFDVKQQSDFVSLVYTRELERSSCLTYDYVGDDPEDSLAETDLNAVSALASLAALRPPAAAGVSHRDALQACAHHARLWLCRADEPIHPDSTITYAGVRAKLDRIMASGYFTAQLEMRTPLDLAAAVASFGAGGVQVQESMVVSPQAPEAVEESQAVEGHKNEKEDSQATEIYNDHPVVDSEHVEDEVLVHPTDEVPPAETEQEQETFDADVKDQEQKDQQFIQRRSYQNQRGGGRGGSRRGYPNGRGGRGGRGGGYQNGRGGYQNGRGGAGGYYYESGYYQPRNYNRGRGGRSGGGNSYYNSHGGGAQGHHPGSVELGANA

SEQ ID NO: 40309 - DNA, 489 bp, Zea mays subsp. mays
  misc_feature (1)..(489): Ceres Seq. ID no. 1850217
ctccctctgcaagtacaagttgtcctgtctttggtttagtttgcgcccctgtatttgttcagggttttggtcgcgtgttgaggaaagattcggggttcttaagtgaaacaaatggggtcatcaaggaatgtgccgcacaaagtgatgcaagatgagatcacacctcttctcccgatcaaagctgaggaggacgcagttcatgagttcgacggagcttctttctctggcgcggtcttcaatctgtcaacaaccattgtaggagctggaatcatggctctgcctgcgagtatcaagatgctaggccttatacctggtattctaatgatcatccttgtggcgctgctcaccgagacatccattgacatgctggtcaggtgcagccaccagggcaagattacatcctacggctggttgatgggtgacacatttggtcagtgggggagaattgcgctacaagcatcggtggtgataaacaatgtcggcgtgttg

SEQ ID NO: 40310 - protein, 126 aa, Zea mays subsp. mays
  peptide (1)..(126): Ceres Seq. ID no. 1850218
  misc_feature (14)..(125): NCBI GI NO: 18406463 NR Description: expressed protein; protein id: At3g30390
  misc_feature (2)..(125): NCBI GI NO: 9758059 NR Description: amino acid transporter-like protein
  misc_feature (14)..(125): NCBI GI NO: 15241555 NR Description: transporter -like protein; protein id: At5g38820.1
  misc_feature (7)..(125): NCBI GI NO: 34898706 NR Description: hypothetical protein
  misc_feature (33)..(125): NCBI GI NO: 24461850 NR Description: CTV.3 [Poncirus trifoliata]
  misc_feature (34)..(125): NCBI GI NO: 18412864 NR Description: expressed protein; protein id: At1g80510
  misc_feature (17)..(125): NCBI GI NO: 15228851 NR Description: putative protein; protein id: At3g56200
  misc_feature (18)..(124): NCBI GI NO: 30688270 NR Description: amino acid transporter family
  misc_feature (23)..(125): NCBI GI NO: 34907896 NR Description: P0439E11.12
  misc_feature (35)..(125): NCBI GI NO: 34907894 NR Description: P0439E11.11
MGSSRNVPHKVMQDEITPLLPIKAEEDAVHEFDGASFSGAVFNLSTTIVGAGIMALPASIKMLGLIPGILMIILVALLTETSIDMLVRCSHQGKITSYGWLMGDTFGQWGRIALQASVVINNVGVL

SEQ ID NO: 40311 - protein, 115 aa, Zea mays subsp. mays
  peptide (1)..(115): Ceres Seq. ID no. 1850219
  misc_feature (3)..(114): NCBI GI NO: 18406463 NR Description: expressed protein; protein id: At3g30390
  misc_feature (1)..(114): NCBI GI NO: 9758059 NR Description: amino acid transporter-like protein
  misc_feature (3)..(114): NCBI GI NO: 15241555 NR Description: transporter -like protein; protein id: At5g38820.1
  misc_feature (1)..(114): NCBI GI NO: 34898706 NR Description: hypothetical protein
  misc_feature (22)..(114): NCBI GI NO: 24461850 NR Description: CTV.3 [Poncirus trifoliata]
  misc_feature (23)..(114): NCBI GI NO: 18412864 NR Description: expressed protein; protein id: At1g80510
  misc_feature (6)..(114): NCBI GI NO: 15228851 NR Description: putative protein; protein id: At3g56200
  misc_feature (7)..(113): NCBI GI NO: 30688270 NR Description: amino acid transporter family
  misc_feature (12)..(114): NCBI GI NO: 34907896 NR Description: P0439E11.12
  misc_feature (24)..(114): NCBI GI NO: 34907894 NR Description: P0439E11.11
MQDEITPLLPIKAEEDAVHEFDGASFSGAVFNLSTTIVGAGIMALPASIKMLGLIPGILMIILVALLTETSIDMLVRCSHQGKITSYGWLMGDTFGQWGRIALQASVVINNVGVL

SEQ ID NO: 40312 - protein, 73 aa, Zea mays subsp. mays
  peptide (1)..(73): Ceres Seq. ID no. 1850220
  misc_feature (1)..(72): NCBI GI NO: 18406463 NR Description: expressed protein; protein id: At3g30390
  misc_feature (1)..(72): NCBI GI NO: 9758059 NR Description: amino acid transporter-like protein
  misc_feature (1)..(72): NCBI GI NO: 15241555 NR Description: transporter -like protein; protein id: At5g38820.1
  misc_feature (1)..(72): NCBI GI NO: 34898706 NR Description: hypothetical protein
  misc_feature (1)..(72): NCBI GI NO: 24461850 NR Description: CTV.3 [Poncirus trifoliata]
  misc_feature (1)..(72): NCBI GI NO: 18412864 NR Description: expressed protein; protein id: At1g80510
  misc_feature (1)..(72): NCBI GI NO: 15228851 NR Description: putative protein; protein id: At3g56200
  misc_feature (1)..(71): NCBI GI NO: 30688270 NR Description: amino acid transporter family
  misc_feature (1)..(72): NCBI GI NO: 34907896 NR Description: P0439E11.12
  misc_feature (1)..(72): NCBI GI NO: 34907894 NR Description: P0439E11.11
MALPASIKMLGLIPGILMIILVALLTETSIDMLVRCSHQGKITSYGWLMGDTFGQWGRIALQASVVINNVGVL

SEQ ID NO: 40313 - DNA, 1103 bp, Zea mays subsp. mays
  misc_feature (1)..(1103): Ceres Seq. ID no. 12368722
gcacgagaccattacctagaacatcctaatcgaaaaagagcgaagtgtaatttgaatggcaggcacaagacagagaagcaggtgggaagtcgacgcagttgtttgttgtggatgagttgcgtgtgttgctgctgccgcgcgtgcgtgtcccccgacggccccggaccacgactccctcctcccgccgccgccttctccttcgtcggggaccgaatgcagcgggtcgtcgtcatgcgccacggcgatcgcctcgaccattccgagcccatgtggcccgccaacaagccgcgcccctgggatccgcctctcgacgacgccggcctcctccgcgcctggaccgtcggcaagtgcatcagggccgccgccgccaagcagggatgggccctccaccgggtcctcgtctccccgttcctgcgatgccgacagaccgccgcgcgcgccgtcgccgcgctatgtgccgtccccgacgacgacgcgctgctcgcggtcggcgacccggccaatgtgcccctcgacacctcacgcgtcaaggtgtctatcgagtatggattgtctgagatgatgaacacccaagcaatgggcattactgttagcaagctggctcccaacgtcagcaagtggtttcctgacttgccagagcttgaagccgacttcccggctggaaccatcgaccattctgcagaaccaatctacccggagctaccaaagtgggaggaatccatcatggaggcaagaagcagatacgcaagcataatcaaagctcttgctgacaaatatcctcatgaaaacctgctattagtaacacacggtgagggcgttggtgcatccatttcctactttgagatgggactagagatctacgacgtggagtactgtgcgtactctgttctggagaggcaggtgactgcagagcctggtgatgagcatgggggctttacctttaccgcggatagcttcaaggtcatgaccaagagtggtagcacaggcatacgatacgccccggtgtgagagggctggtttcttggttgagcaatatttttttaaaagcatgaatacctggactgtctttttaatactttcaacttttttatgacgatcttttg

SEQ ID NO: 40314 - protein, 335 aa, Zea mays subsp. mays
  peptide (1)..(335): Ceres Seq. ID no. 12368723
  misc_feature (77)..(151): Pfam Name: Pfam Description:  Phosphoglycerate mutase family
  misc_feature (66)..(333): NCBI GI NO: 15232331 NR Description: putative protein; protein id: At3g60450
  misc_feature (66)..(333): NCBI GI NO: 21553703 NR Description: pRIB5 protein [Arabidopsis thaliana]
  misc_feature (70)..(332): NCBI GI NO: 15232328 NR Description: putative protein; protein id: At3g60440.1
  misc_feature (99)..(332): NCBI GI NO: 25347741 NR Description: pRIB5 protein [imported] - Ribes nigrum (fragment)
  misc_feature (70)..(334): NCBI GI NO: 15232326 NR Description: putative protein; protein id: At3g60430.1
  misc_feature (63)..(312): NCBI GI NO: 15232324 NR Description: putative protein; protein id: At3g60420
  misc_feature (78)..(312): NCBI GI NO: 21592687 NR Description: unknown [Arabidopsis thaliana]
  misc_feature (178)..(273): NCBI GI NO: 23042637 NR Description: hypothetical protein
  misc_feature (73)..(144): NCBI GI NO: 23042637 NR Description: hypothetical protein
ARDHYLEHPNRKRAKCNLNGRHKTEKQVGSRRSCLLWMSCVCCCCRACVSPDGPGPRLPPPAAAFSFVGDRMQRVVVMRHGDRLDHSEPMWPANKPRPWDPPLDDAGLLRAWTVGKCIRAAAAKQGWALHRVLVSPFLRCRQTAARAVAALCAVPDDDALLAVGDPANVPLDTSRVKVSIEYGLSEMMNTQAMGITVSKLAPNVSKWFPDLPELEADFPAGTIDHSAEPIYPELPKWEESIMEARSRYASIIKALADKYPHENLLLVTHGEGVGASISYFEMGLEIYDVEYCAYSVLERQVTAEPGDEHGGFTFTADSFKVMTKSGSTGIRYAPV

SEQ ID NO: 40315 - protein, 298 aa, Zea mays subsp. mays
  peptide (1)..(298): Ceres Seq. ID no. 12368724
  misc_feature (40)..(114): Pfam Name: Pfam Description:  Phosphoglycerate mutase family
  misc_feature (29)..(296): NCBI GI NO: 15232331 NR Description: putative protein; protein id: At3g60450
  misc_feature (29)..(296): NCBI GI NO: 21553703 NR Description: pRIB5 protein [Arabidopsis thaliana]
  misc_feature (33)..(295): NCBI GI NO: 15232328 NR Description: putative protein; protein id: At3g60440.1
  misc_feature (62)..(295): NCBI GI NO: 25347741 NR Description: pRIB5 protein [imported] - Ribes nigrum (fragment)
  misc_feature (33)..(297): NCBI GI NO: 15232326 NR Description: putative protein; protein id: At3g60430.1
  misc_feature (26)..(275): NCBI GI NO: 15232324 NR Description: putative protein; protein id: At3g60420
  misc_feature (41)..(275): NCBI GI NO: 21592687 NR Description: unknown [Arabidopsis thaliana]
  misc_feature (141)..(236): NCBI GI NO: 23042637 NR Description: hypothetical protein
  misc_feature (36)..(107): NCBI GI NO: 23042637 NR Description: hypothetical protein
MSCVCCCCRACVSPDGPGPRLPPPAAAFSFVGDRMQRVVVMRHGDRLDHSEPMWPANKPRPWDPPLDDAGLLRAWTVGKCIRAAAAKQGWALHRVLVSPFLRCRQTAARAVAALCAVPDDDALLAVGDPANVPLDTSRVKVSIEYGLSEMMNTQAMGITVSKLAPNVSKWFPDLPELEADFPAGTIDHSAEPIYPELPKWEESIMEARSRYASIIKALADKYPHENLLLVTHGEGVGASISYFEMGLEIYDVEYCAYSVLERQVTAEPGDEHGGFTFTADSFKVMTKSGSTGIRYAPV

SEQ ID NO: 40316 - protein, 264 aa, Zea mays subsp. mays
  peptide (1)..(264): Ceres Seq. ID no. 12368725
  misc_feature (6)..(80): Pfam Name: Pfam Description:  Phosphoglycerate mutase family
  misc_feature (1)..(262): NCBI GI NO: 15232331 NR Description: putative protein; protein id: At3g60450
  misc_feature (1)..(262): NCBI GI NO: 21553703 NR Description: pRIB5 protein [Arabidopsis thaliana]
  misc_feature (1)..(261): NCBI GI NO: 15232328 NR Description: putative protein; protein id: At3g60440.1
  misc_feature (28)..(261): NCBI GI NO: 25347741 NR Description: pRIB5 protein [imported] - Ribes nigrum (fragment)
  misc_feature (1)..(263): NCBI GI NO: 15232326 NR Description: putative protein; protein id: At3g60430.1
  misc_feature (1)..(241): NCBI GI NO: 15232324 NR Description: putative protein; protein id: At3g60420
  misc_feature (7)..(241): NCBI GI NO: 21592687 NR Description: unknown [Arabidopsis thaliana]
  misc_feature (107)..(202): NCBI GI NO: 23042637 NR Description: hypothetical protein
  misc_feature (2)..(73): NCBI GI NO: 23042637 NR Description: hypothetical protein
MQRVVVMRHGDRLDHSEPMWPANKPRPWDPPLDDAGLLRAWTVGKCIRAAAAKQGWALHRVLVSPFLRCRQTAARAVAALCAVPDDDALLAVGDPANVPLDTSRVKVSIEYGLSEMMNTQAMGITVSKLAPNVSKWFPDLPELEADFPAGTIDHSAEPIYPELPKWEESIMEARSRYASIIKALADKYPHENLLLVTHGEGVGASISYFEMGLEIYDVEYCAYSVLERQVTAEPGDEHGGFTFTADSFKVMTKSGSTGIRYAPV

SEQ ID NO: 40317 - DNA, 1703 bp, Zea mays subsp. mays
  misc_feature (1)..(1703): Ceres Seq. ID no. 12376841
  misc_feature (1692)..(1692): n is a, c, t, g, unknown, or other
  misc_feature (1691)..(1691): n is a, c, t, g, unknown, or other
gcacgagaccattacctagaacatcctaatcgaaaagaccgaataaccacccgtctgccgctgtgccgcacggcccgcaccccgcacgagacccgtccttgaggggcacgtcctagatcggtggcgccttcctctcgccgccgatacggtgcctctcgcggtctcgctccccctcgcaggtcttttggtttttttagttcctccctttgcttcttggaggtgtttgttgccgtctcacccgcagttcttgaggtacgcacgcagtaatccggcttctttctatgttccgatgtcttgctggttggatgaggagggtacgacgctctgtggagagatctaatcgcgctggtaaactggggcgatcggtgtgggggaatcggatagcgtggatgggatttgggattggaagagaagctggaggatgccttttttctggatgacggtgataatcgtggacgagctaagctcattgagtgtctggctgatgtgggattgggtggcatatgctggattgctaactgttccatctggtgcaccaagcaattggactgcactggggttgggattgggattgggatgggattgctttgcctttgattgtgtatatgcttattatgtgctcatccgctgtggctttggccggaactttgcagacatgcagagccagatagtgtgccacgggtgcaggacccttctgttctacccaagaggtgctccgagcgtgtgttgtgcggtatgccatgtggtcaccaatgtgccgcctccagcaatggagatggctcgacttatatgtggtggctgccagacattattgatgtatgctcgcagtgcaacaactgtaagatgctcatgttgtgacacagtcaatcttgtcagaccagtgagtagcatagctcatgtgaactgtggccagtgccaaacagtgttgatgtatccatacggagcaccgtctgtcaaatgtgctgtttgcaacttcattacaaatgttggcggggtgactcccatgatacctttgccaccaccagcactacctgcatcaagtggaacttcatatatcatcccgtcaatttccgtgccgacgaatcaaccgcggaatgtaactgttgtcgttgaaaacccaatgacagtagatgacaagggaaaattggtgagcaatgttgtagtaggggttacgagcggcgggaaaaagtgacggcatatcacaaccgtgtgtagctttgtccaaactatctaaaaagggtttaagaatacataccttgtatcatactgctgtttggcgatcggctgctcgacggaggaatccccctccctggagagcgtagtggcaaagcagcgaggctttcgccactgcgaacgagccaaaaaaaaacgaagtgcgggtgtgcatactcagagtatatctgtagcttgttaccccttgattcttttgtatgtaatatgggctctgcctgactttcactgtgtgatcaaatttccaagcccgtgggcgctgttgctgcgtgccttgttattagtgaataacaaacattgcaaatggctcttgaaatacagtgtgtgtgtgttttaatctctctgcatttatgttaatcagcaggtgccaccatttgctgttccagactgataatgcagagtttgtatccacgttctttggagaaaacatttgaggctcatacgctgtttcatgtcccatnngtatattttct

SEQ ID NO: 40318 - protein, 256 aa, Zea mays subsp. mays
  peptide (1)..(256): Ceres Seq. ID no. 12376842
  misc_feature (77)..(255): NCBI GI NO: 30685085 NR Description: zinc-finger protein Lsd1 [Arabidopsis thaliana]
  misc_feature (79)..(255): NCBI GI NO: 30685083 NR Description: zinc-finger protein Lsd1 [Arabidopsis thaliana]
  misc_feature (79)..(256): NCBI GI NO: 17981380 NR Description: zinc finger protein LSD2 [Brassica oleracea]
  misc_feature (80)..(193): NCBI GI NO: 18398482 NR Description: zinc-finger protein, putative
  misc_feature (80)..(190): NCBI GI NO: 30692719 NR Description: zinc-finger protein -related
  misc_feature (80)..(190): NCBI GI NO: 34905200 NR Description: P0672D01.2
  misc_feature (113)..(255): NCBI GI NO: 17981378 NR Description: zinc finger protein LSD1 [Brassica oleracea]
  misc_feature (79)..(198): NCBI GI NO: 29467531 NR Description: P0582D05.23
  misc_feature (80)..(150): NCBI GI NO: 25403154 NR Description: probable zinc-finger protein, 7043-7771
  misc_feature (113)..(208): NCBI GI NO: 34912604 NR Description: P0046B10.19
MPFFWMTVIIVDELSSLSVWLMWDWVAYAGLLTVPSGAPSNWTALGLGLGLGWDCFAFDCVYAYYVLIRCGFGRNFADMQSQIVCHGCRTLLFYPRGAPSVCCAVCHVVTNVPPPAMEMARLICGGCQTLLMYARSATTVRCSCCDTVNLVRPVSSIAHVNCGQCQTVLMYPYGAPSVKCAVCNFITNVGGVTPMIPLPPPALPASSGTSYIIPSISVPTNQPRNVTVVVENPMTVDDKGKLVSNVVVGVTSGGKK

SEQ ID NO: 40319 - protein, 251 aa, Zea mays subsp. mays
  peptide (1)..(251): Ceres Seq. ID no. 12376843
  misc_feature (72)..(250): NCBI GI NO: 30685085 NR Description: zinc-finger protein Lsd1 [Arabidopsis thaliana]
  misc_feature (74)..(250): NCBI GI NO: 30685083 NR Description: zinc-finger protein Lsd1 [Arabidopsis thaliana]
  misc_feature (74)..(251): NCBI GI NO: 17981380 NR Description: zinc finger protein LSD2 [Brassica oleracea]
  misc_feature (75)..(188): NCBI GI NO: 18398482 NR Description: zinc-finger protein, putative
  misc_feature (75)..(185): NCBI GI NO: 30692719 NR Description: zinc-finger protein -related
  misc_feature (75)..(185): NCBI GI NO: 34905200 NR Description: P0672D01.2
  misc_feature (108)..(250): NCBI GI NO: 17981378 NR Description: zinc finger protein LSD1 [Brassica oleracea]
  misc_feature (74)..(193): NCBI GI NO: 29467531 NR Description: P0582D05.23
  misc_feature (75)..(145): NCBI GI NO: 25403154 NR Description: probable zinc-finger protein, 7043-7771
  misc_feature (108)..(203): NCBI GI NO: 34912604 NR Description: P0046B10.19
MTVIIVDELSSLSVWLMWDWVAYAGLLTVPSGAPSNWTALGLGLGLGWDCFAFDCVYAYYVLIRCGFGRNFADMQSQIVCHGCRTLLFYPRGAPSVCCAVCHVVTNVPPPAMEMARLICGGCQTLLMYARSATTVRCSCCDTVNLVRPVSSIAHVNCGQCQTVLMYPYGAPSVKCAVCNFITNVGGVTPMIPLPPPALPASSGTSYIIPSISVPTNQPRNVTVVVENPMTVDDKGKLVSNVVVGVTSGGKK

SEQ ID NO: 40320 - protein, 235 aa, Zea mays subsp. mays
  peptide (1)..(235): Ceres Seq. ID no. 12376844
  misc_feature (56)..(234): NCBI GI NO: 30685085 NR Description: zinc-finger protein Lsd1 [Arabidopsis thaliana]
  misc_feature (58)..(234): NCBI GI NO: 30685083 NR Description: zinc-finger protein Lsd1 [Arabidopsis thaliana]
  misc_feature (58)..(235): NCBI GI NO: 17981380 NR Description: zinc finger protein LSD2 [Brassica oleracea]
  misc_feature (59)..(172): NCBI GI NO: 18398482 NR Description: zinc-finger protein, putative
  misc_feature (59)..(169): NCBI GI NO: 30692719 NR Description: zinc-finger protein -related
  misc_feature (59)..(169): NCBI GI NO: 34905200 NR Description: P0672D01.2
  misc_feature (92)..(234): NCBI GI NO: 17981378 NR Description: zinc finger protein LSD1 [Brassica oleracea]
  misc_feature (58)..(177): NCBI GI NO: 29467531 NR Description: P0582D05.23
  misc_feature (59)..(129): NCBI GI NO: 25403154 NR Description: probable zinc-finger protein, 7043-7771
  misc_feature (92)..(187): NCBI GI NO: 34912604 NR Description: P0046B10.19
MWDWVAYAGLLTVPSGAPSNWTALGLGLGLGWDCFAFDCVYAYYVLIRCGFGRNFADMQSQIVCHGCRTLLFYPRGAPSVCCAVCHVVTNVPPPAMEMARLICGGCQTLLMYARSATTVRCSCCDTVNLVRPVSSIAHVNCGQCQTVLMYPYGAPSVKCAVCNFITNVGGVTPMIPLPPPALPASSGTSYIIPSISVPTNQPRNVTVVVENPMTVDDKGKLVSNVVVGVTSGGKK

SEQ ID NO: 40321 - DNA, 1573 bp, Zea mays subsp. mays
  misc_feature (1)..(1573): Ceres Seq. ID no. 12435633
gcacgagaccattacctagaacatcctaatcgaaaagtaaactaaccaccaaagccgaagaaggcggcttgccctgcccgccgccttggtgccgcgcgcgccatggccaagagcaagtcgtccgccaaggccggccccccgctcctcggcaagtacgagctcggccacctcctcggccggggcaacttcgccaaggtataccacgcgcgctgcctcggcggaggcgaccccgtggccgtgaaggtgctggacaaggccgggctggccgccacgggcatggcgtcgcggctcctgcgcgaggtgtccgccatgcgccgcctgagccaccccaacgtgctccgcctccacgaggtgctggcgacgcgctccaaggtgtacctcgtgatggagctggccccgggcggggacctcctgtcccggctggcgtcgctgccgtcccgcaggctccccgagcacgcggcgcggcgcgtgttcctccagctggcgtcggcgctcatctacagccacgcgcgcggggtgttccaccgcgacgtgaagccgcagaacgtgctgctggacgccgagggcaacctcaaggtgtccgacttcggcctcgcggcgctcccggactcggtccgcgacgacgggcgcctgcacacggcgtgcggcaccccggcgttcgcggcgcccgaggtgctccggcgcagggcctacgacggcgccaaggcggacgcgtggtcctgcggggtcatcctcttcgtcctcctcgcgggccacctccccttcgacgacgccaacatcgccgacatgtgccgcagggcgcaccgccgggagtacacggtcccgcggtgggtgtcgcagccggcgcgccgcctcgtggcgcgcctgctggacccgaacccggcgacgcgcctcgccgtcgcggagctcgccggccacccctggttcaagcgctcgctcagcgtggactcccagctcggcggcctcctggacggccaggcggagcgcgagctggcgttccaggccccgccggcgctgaacgccttcgacatcatctccatgtccccagggctggacctgtcgggcctgttcggcgagggcaggcgccgccgcgagaagcggttcatgacgacggcgtccccggagcgggcggtggagcggctcgcgcaggccggcgcgaggctcggctacttcattgtggggaagaagggggccgagcgcctgccgctgggcgtcctgccgggcctcgtggccatgtcgatggagatgtcggaggtgtcgccggagctgatgctggtggagctgaggctggagggcggccacggccgacgaggacgaggcgttcgggtgggaggagctccgggttgagctgggggacgtggtaacagcatggcacgtgagtgaagaaggttaaaaattcgcaagaggaaatgcgagaacgatttcgcaggtgtatcagtgtagtatgtatagccgtatagcaagtgcgcatctcatctcgtgtacgtgaaattagttggttaggacgaacagcagcgtgtgatgttggggattaactagactggtagtttcaatcaaatgtgtgatgtgtggg

SEQ ID NO: 40322 - protein, 414 aa, Zea mays subsp. mays
  peptide (1)..(414): Ceres Seq. ID no. 12435634
  misc_feature (18)..(275): Pfam Name: Pfam Description:  Protein kinase domain
  misc_feature (5)..(396): NCBI GI NO: 15233500 NR Description: SNF1 like protein kinase; protein id: At4g14580
  misc_feature (3)..(398): NCBI GI NO: 15228920 NR Description: SNF1 related protein kinase
  misc_feature (3)..(398): NCBI GI NO: 15451212 NR Description: SNF1 related protein kinase [Arabidopsis thaliana]
  misc_feature (3)..(398): NCBI GI NO: 9798601 NR Description: serine/threonine protein kinase
  misc_feature (14)..(278): NCBI GI NO: 34909714 NR Description: OsPK4-like protein
  misc_feature (302)..(399): NCBI GI NO: 34909714 NR Description: OsPK4-like protein
  misc_feature (1)..(303): NCBI GI NO: 5821067 NR Description: OsPK4 [Oryza sativa]
  misc_feature (302)..(399): NCBI GI NO: 5821067 NR Description: OsPK4 [Oryza sativa]
  misc_feature (14)..(277): NCBI GI NO: 34903780 NR Description: unnamed protein product
  misc_feature (290)..(399): NCBI GI NO: 34903780 NR Description: unnamed protein product
MAKSKSSAKAGPPLLGKYELGHLLGRGNFAKVYHARCLGGGDPVAVKVLDKAGLAATGMASRLLREVSAMRRLSHPNVLRLHEVLATRSKVYLVMELAPGGDLLSRLASLPSRRLPEHAARRVFLQLASALIYSHARGVFHRDVKPQNVLLDAEGNLKVSDFGLAALPDSVRDDGRLHTACGTPAFAAPEVLRRRAYDGAKADAWSCGVILFVLLAGHLPFDDANIADMCRRAHRREYTVPRWVSQPARRLVARLLDPNPATRLAVAELAGHPWFKRSLSVDSQLGGLLDGQAERELAFQAPPALNAFDIISMSPGLDLSGLFGEGRRRREKRFMTTASPERAVERLAQAGARLGYFIVGKKGAERLPLGVLPGLVAMSMEMSEVSPELMLVELRLEGGHGRRGRGVRVGGAPG

SEQ ID NO: 40323 - protein, 356 aa, Zea mays subsp. mays
  peptide (1)..(356): Ceres Seq. ID no. 12435635
  misc_feature (1)..(217): Pfam Name: Pfam Description:  Protein kinase domain
  misc_feature (1)..(338): NCBI GI NO: 15233500 NR Description: SNF1 like protein kinase; protein id: At4g14580
  misc_feature (1)..(340): NCBI GI NO: 15228920 NR Description: SNF1 related protein kinase
  misc_feature (1)..(340): NCBI GI NO: 15451212 NR Description: SNF1 related protein kinase [Arabidopsis thaliana]
  misc_feature (1)..(340): NCBI GI NO: 9798601 NR Description: serine/threonine protein kinase
  misc_feature (1)..(220): NCBI GI NO: 34909714 NR Description: OsPK4-like protein
  misc_feature (244)..(341): NCBI GI NO: 34909714 NR Description: OsPK4-like protein
  misc_feature (1)..(245): NCBI GI NO: 5821067 NR Description: OsPK4 [Oryza sativa]
  misc_feature (244)..(341): NCBI GI NO: 5821067 NR Description: OsPK4 [Oryza sativa]
  misc_feature (1)..(219): NCBI GI NO: 34903780 NR Description: unnamed protein product
  misc_feature (232)..(341): NCBI GI NO: 34903780 NR Description: unnamed protein product
MASRLLREVSAMRRLSHPNVLRLHEVLATRSKVYLVMELAPGGDLLSRLASLPSRRLPEHAARRVFLQLASALIYSHARGVFHRDVKPQNVLLDAEGNLKVSDFGLAALPDSVRDDGRLHTACGTPAFAAPEVLRRRAYDGAKADAWSCGVILFVLLAGHLPFDDANIADMCRRAHRREYTVPRWVSQPARRLVARLLDPNPATRLAVAELAGHPWFKRSLSVDSQLGGLLDGQAERELAFQAPPALNAFDIISMSPGLDLSGLFGEGRRRREKRFMTTASPERAVERLAQAGARLGYFIVGKKGAERLPLGVLPGLVAMSMEMSEVSPELMLVELRLEGGHGRRGRGVRVGGAPG

SEQ ID NO: 40324 - protein, 345 aa, Zea mays subsp. mays
  peptide (1)..(345): Ceres Seq. ID no. 12435636
  misc_feature (1)..(206): Pfam Name: Pfam Description:  Protein kinase domain
  misc_feature (1)..(327): NCBI GI NO: 15233500 NR Description: SNF1 like protein kinase; protein id: At4g14580
  misc_feature (1)..(329): NCBI GI NO: 15228920 NR Description: SNF1 related protein kinase
  misc_feature (1)..(329): NCBI GI NO: 15451212 NR Description: SNF1 related protein kinase [Arabidopsis thaliana]
  misc_feature (1)..(329): NCBI GI NO: 9798601 NR Description: serine/threonine protein kinase
  misc_feature (1)..(209): NCBI GI NO: 34909714 NR Description: OsPK4-like protein
  misc_feature (233)..(330): NCBI GI NO: 34909714 NR Description: OsPK4-like protein
  misc_feature (1)..(234): NCBI GI NO: 5821067 NR Description: OsPK4 [Oryza sativa]
  misc_feature (233)..(330): NCBI GI NO: 5821067 NR Description: OsPK4 [Oryza sativa]
  misc_feature (1)..(208): NCBI GI NO: 34903780 NR Description: unnamed protein product
  misc_feature (221)..(330): NCBI GI NO: 34903780 NR Description: unnamed protein product
MRRLSHPNVLRLHEVLATRSKVYLVMELAPGGDLLSRLASLPSRRLPEHAARRVFLQLASALIYSHARGVFHRDVKPQNVLLDAEGNLKVSDFGLAALPDSVRDDGRLHTACGTPAFAAPEVLRRRAYDGAKADAWSCGVILFVLLAGHLPFDDANIADMCRRAHRREYTVPRWVSQPARRLVARLLDPNPATRLAVAELAGHPWFKRSLSVDSQLGGLLDGQAERELAFQAPPALNAFDIISMSPGLDLSGLFGEGRRRREKRFMTTASPERAVERLAQAGARLGYFIVGKKGAERLPLGVLPGLVAMSMEMSEVSPELMLVELRLEGGHGRRGRGVRVGGAPG

SEQ ID NO: 40325 - DNA, 912 bp, Zea mays subsp. mays; identical to SEQ ID NO: 27922
  misc_feature (1)..(912): Ceres Seq. ID no. 12414036

SEQ ID NO: 40326 - protein, 128 aa, Zea mays subsp. mays; identical to SEQ ID NO: 27923
  peptide (1)..(128): Ceres Seq. ID no. 12414037
  misc_feature (57)..(127): Pfam Name: AAA Pfam Description: ATPase family associated with various cellular activities
  misc_feature (1)..(127): NCBI GI NO: 34909678 NR Description: katanin p60 subunit A 1-like
  misc_feature (1)..(127): NCBI GI NO: 18403587 NR Description: putative katanin; protein id: At2g34560
  misc_feature (1)..(127): NCBI GI NO: 25408335 NR Description: probable katanin [imported] - Arabidopsis thaliana
  misc_feature (1)..(127): NCBI GI NO: 11071772 NR Description: probable AAA ATPase [Leishmania major]
  misc_feature (1)..(127): NCBI GI NO: 34911050 NR Description: putative katanin
  misc_feature (1)..(127): NCBI GI NO: 21313044 NR Description: RIKEN cDNA 4933439B08 [Mus musculus]
  misc_feature (1)..(127): NCBI GI NO: 34190544 NR Description: Unknown (protein for MGC:33211) [Homo sapiens]
  misc_feature (43)..(127): NCBI GI NO: 34932450 NR Description: similar to RIKEN cDNA 4933439B08
  misc_feature (1)..(44): NCBI GI NO: 34932450 NR Description: similar to RIKEN cDNA 4933439B08
  misc_feature (1)..(126): NCBI GI NO: 32478841 NR Description: katanin [Gossypium hirsutum]

SEQ ID NO: 40327 - protein, 89 aa, Zea mays subsp. mays; identical to SEQ ID NO: 27924
  peptide (1)..(89): Ceres Seq. ID no. 12414038
  misc_feature (18)..(88): Pfam Name: AAA Pfam Description: ATPase family associated with various cellular activities
  misc_feature (1)..(88): NCBI GI NO: 34909678 NR Description: katanin p60 subunit A 1-like
  misc_feature (1)..(88): NCBI GI NO: 18403587 NR Description: putative katanin; protein id: At2g34560
  misc_feature (1)..(88): NCBI GI NO: 25408335 NR Description: probable katanin [imported] - Arabidopsis thaliana
  misc_feature (1)..(88): NCBI GI NO: 11071772 NR Description: probable AAA ATPase [Leishmania major]
  misc_feature (1)..(88): NCBI GI NO: 34911050 NR Description: putative katanin
  misc_feature (1)..(88): NCBI GI NO: 21313044 NR Description: RIKEN cDNA 4933439B08 [Mus musculus]
  misc_feature (1)..(88): NCBI GI NO: 34190544 NR Description: Unknown (protein for MGC:33211) [Homo sapiens]
  misc_feature (4)..(88): NCBI GI NO: 34932450 NR Description: similar to RIKEN cDNA 4933439B08
  misc_feature (1)..(87): NCBI GI NO: 32478841 NR Description: katanin [Gossypium hirsutum]
  misc_feature (1)..(87): NCBI GI NO: 32478843 NR Description: katanin [Gossypium barbadense]

SEQ ID NO: 40328 - protein, 84 aa, Zea mays subsp. mays; identical to SEQ ID NO: 27925
  peptide (1)..(84): Ceres Seq. ID no. 12414039
  misc_feature (1)..(46): NCBI GI NO: 34909678 NR Description: katanin p60 subunit A 1-like
  misc_feature (46)..(65): NCBI GI NO: 34909678 NR Description: katanin p60 subunit A 1-like

SEQ ID NO: 40329 - DNA, 1637 bp, Zea mays subsp. mays
  misc_feature (1)..(1637): Ceres Seq. ID no. 12418899
  misc_feature (812)..(812): n is a, c, t, g, unknown, or other
  misc_feature (813)..(813): n is a, c, t, g, unknown, or other
  misc_feature (537)..(537): n is a, c, t, g, unknown, or other
  misc_feature (650)..(650): n is a, c, t, g, unknown, or other
  misc_feature (534)..(534): n is a, c, t, g, unknown, or other
  misc_feature (822)..(822): n is a, c, t, g, unknown, or other
  misc_feature (649)..(649): n is a, c, t, g, unknown, or other
  misc_feature (855)..(855): n is a, c, t, g, unknown, or other
gcacgagaccattacctagaacatcctaatcgaaaaccatttcactcgtattctatcagctagctacccactgtcgccaactcgccgcaacaaagaaccaccatcatgcacctgctgatgctcccttggctcgccttcggccacatcgtgccgttcgtgcagctggcgcggaggctgctgtcctccacctcctcctccgtccgcgtcacgttcctcacggccgctggcaacgtcccgcgcgtcgaggccatgctgtcctctccctcgtccaccggcgaggcggccgtcgtcgtgccgctgcgcctgccccacgtgccggggctgcccgaggacgccgccagcacggcggacctctcgcccgagggcgccgagcttcttaaggccgcgctggacgctgcccggccgcagtggccgcgctgctggccgagctccgcccggacgccgtgctgctcgacttcgccaccccgtgggccgccgaggacgccgcggcgctgggcgccaagtcgctccggttcagcgtcttctccgccgtcncangcgcctacctctccgtccccgcgcgccgccccgacgcggcgggccagctgccgtcggcgcgcgacctcatgtccgcccctgccggcttccccggctcctccccgctcgccgnngccggcgtcccggcgtaccaggcagccgacttcacctacatgttcaccagcttcggcggccagccctgcgtccacgaacgcgtggtggccggcatccgggcctgcgacggcctcgtgctcaagacctgcgccgagatggagggtgcctacatcgactacctnnccgcgcagnttcgcaagcccgtgctcgtggcggggcccctgntgcctggcccgccggcgggagatctcgacgaccactgggccacctggttgtccgcgttcccggacggcgccgtcgtcttcgcctcgttcggcagcgagacgttcctgccgcccgccgcggccacggagctgctcctggggctcgaggccacgggtcgcccgttcctcgccgtgctcaactccccggacggcgccgtcccgccgccggggttcgcggagagggtgtcggggagagggctcgttcatgccgggtgggtgccgcagcagcacatcctgcgccaccggagcgtggggtgctacctcacccacgccggcttcagctccgtcgtggagggcctcgtcgccggctgccgcctcgtactgctgcccatgaagggcgaccagttcctcaacgcggcgctgttcgcgcgcgagctccgcgtgggcgtggaggtggcgcgccgcgacgacgacggctggttcgggcgccaggacgtgtgcgacgcgatcgccgcagcggtggcggacgggggggaaagggacgccaggaagtgggccgactttttgacggacgacggcgtgcaagggaggttcgccgacgagttcgtccggcagctcagggagctcgtcggcgcggcctccagttgatttgagcgctcgacgacgtttctcgtggaacacgcggcaagtgcgattattgaagaaataattccacccacctatttatttgtacattaataacattgcccacccacctgtactgtatcattattgaagaaataattccagccatggatattgcac

SEQ ID NO: 40330 - protein, 373 aa, Zea mays subsp. mays
  peptide (1)..(373): Ceres Seq. ID no. 12418900
  misc_feature (2)..(98): Pfam Name: Pfam Description:  UDP-glucoronosyl and UDP-glucosyl transferase
  misc_feature (1)..(101): NCBI GI NO: 480314 NR Description: UDP rhamnose- anthocyanidin-3-glucosiderhamnosyltransferase
  misc_feature (1)..(101): NCBI GI NO: 2501497 NR Description: FLAVONOL 3-O-GLUCOSYLTRANSFERASE
  misc_feature (1)..(101): NCBI GI NO: 22759895 NR Description: rhamnosyl transferase [Nierembergia sp. NB17]
  misc_feature (1)..(101): NCBI GI NO: 7433907 NR Description: anthocyanin rhamnosyltransferase - garden petunia
  misc_feature (1)..(101): NCBI GI NO: 23955910 NR Description: UDP-glucosyltransferase [Stevia rebaudiana]
  misc_feature (1)..(101): NCBI GI NO: 15239543 NR Description: flavonol 3-O-glucosyltransferase-like
  misc_feature (2)..(101): NCBI GI NO: 15234196 NR Description: UDP rhamnose- -anthocyanidin-3-glucosiderhamnosyltransferase
  misc_feature (2)..(101): NCBI GI NO: 15217773 NR Description: rhamnosyltransferase, putative
  misc_feature (2)..(101): NCBI GI NO: 15234195 NR Description: UDP rhamnose- anthocyanidin-3-glucosiderhamnosyltransferase
  misc_feature (2)..(101): NCBI GI NO: 15239523 NR Description: flavonol 3-O-glucosyltransferase-like protein
  misc_feature (143)..(143): Xaa is any aa, unknown or other
  misc_feature (144)..(144): Xaa is any aa, unknown or other
  misc_feature (182)..(182): Xaa is any aa, unknown or other
  misc_feature (236)..(236): Xaa is any aa, unknown or other
  misc_feature (239)..(239): Xaa is any aa, unknown or other
  misc_feature (250)..(250): Xaa is any aa, unknown or other
MHLLMLPWLAFGHIVPFVQLARRLLSSTSSSVRVTFLTAAGNVPRVEAMLSSPSSTGEAAVVVPLRLPHVPGLPEDAASTADLSPEGAELLKAALDAARPQWPRCWPSSARTPCCSTSPPRGPPRTPRRWAPSRSGSASSPPXXAPTSPSPRAAPTRRASCRRRATSCPPLPASPAPPRSPXPASRRTRQPTSPTCSPASAASPASTNAWWPASGPATASCSRPAPRWRVPTSTTXPRXFASPCSWRGPXCLARRREISTTTGPPGCPRSRTAPSSSPRSAARRSCRPPRPRSCSWGSRPRVARSSPCSTPRTAPSRRRGSRRGCRGEGSFMPGGCRSSTSCATGAWGATSPTPASAPSWRASSPAAASYCCP

SEQ ID NO: 40331 - protein, 369 aa, Zea mays subsp. mays
  peptide (1)..(369): Ceres Seq. ID no. 12418901
  misc_feature (1)..(94): Pfam Name: Pfam Description:  UDP-glucoronosyl and UDP-glucosyl transferase
  misc_feature (1)..(97): NCBI GI NO: 480314 NR Description: UDP rhamnose- anthocyanidin-3-glucosiderhamnosyltransferase
  misc_feature (1)..(97): NCBI GI NO: 2501497 NR Description: FLAVONOL 3-O-GLUCOSYLTRANSFERASE
  misc_feature (1)..(97): NCBI GI NO: 22759895 NR Description: rhamnosyl transferase [Nierembergia sp. NB17]
  misc_feature (1)..(97): NCBI GI NO: 7433907 NR Description: anthocyanin rhamnosyltransferase - garden petunia
  misc_feature (1)..(97): NCBI GI NO: 23955910 NR Description: UDP-glucosyltransferase [Stevia rebaudiana]
  misc_feature (1)..(97): NCBI GI NO: 15239543 NR Description: flavonol 3-O-glucosyltransferase-like
  misc_feature (1)..(97): NCBI GI NO: 15234196 NR Description: UDP rhamnose- -anthocyanidin-3-glucosiderhamnosyltransferase
  misc_feature (1)..(97): NCBI GI NO: 15217773 NR Description: rhamnosyltransferase, putative
  misc_feature (1)..(97): NCBI GI NO: 15234195 NR Description: UDP rhamnose- anthocyanidin-3-glucosiderhamnosyltransferase
  misc_feature (1)..(97): NCBI GI NO: 15239523 NR Description: flavonol 3-O-glucosyltransferase-like protein
  misc_feature (139)..(139): Xaa is any aa, unknown or other
  misc_feature (140)..(140): Xaa is any aa, unknown or other
  misc_feature (178)..(178): Xaa is any aa, unknown or other
  misc_feature (232)..(232): Xaa is any aa, unknown or other
  misc_feature (235)..(235): Xaa is any aa, unknown or other
  misc_feature (246)..(246): Xaa is any aa, unknown or other
MLPWLAFGHIVPFVQLARRLLSSTSSSVRVTFLTAAGNVPRVEAMLSSPSSTGEAAVVVPLRLPHVPGLPEDAASTADLSPEGAELLKAALDAARPQWPRCWPSSARTPCCSTSPPRGPPRTPRRWAPSRSGSASSPPXXAPTSPSPRAAPTRRASCRRRATSCPPLPASPAPPRSPXPASRRTRQPTSPTCSPASAASPASTNAWWPASGPATASCSRPAPRWRVPTSTTXPRXFASPCSWRGPXCLARRREISTTTGPPGCPRSRTAPSSSPRSAARRSCRPPRPRSCSWGSRPRVARSSPCSTPRTAPSRRRGSRRGCRGEGSFMPGGCRSSTSCATGAWGATSPTPASAPSWRASSPAAASYCCP

SEQ ID NO: 40332 - protein, 325 aa, Zea mays subsp. mays
  peptide (1)..(325): Ceres Seq. ID no. 12418902
  misc_feature (60)..(325): Pfam Name: Pfam Description:  Equine herpesvirus glycoprotein gp2
  misc_feature (1)..(53): NCBI GI NO: 480314 NR Description: UDP rhamnose- anthocyanidin-3-glucosiderhamnosyltransferase
  misc_feature (1)..(53): NCBI GI NO: 2501497 NR Description: FLAVONOL 3-O-GLUCOSYLTRANSFERASE
  misc_feature (1)..(53): NCBI GI NO: 22759895 NR Description: rhamnosyl transferase [Nierembergia sp. NB17]
  misc_feature (1)..(53): NCBI GI NO: 7433907 NR Description: anthocyanin rhamnosyltransferase - garden petunia
  misc_feature (1)..(53): NCBI GI NO: 23955910 NR Description: UDP-glucosyltransferase [Stevia rebaudiana]
  misc_feature (1)..(53): NCBI GI NO: 15239543 NR Description: flavonol 3-O-glucosyltransferase-like
  misc_feature (1)..(53): NCBI GI NO: 15234196 NR Description: UDP rhamnose- -anthocyanidin-3-glucosiderhamnosyltransferase
  misc_feature (1)..(53): NCBI GI NO: 15217773 NR Description: rhamnosyltransferase, putative
  misc_feature (1)..(53): NCBI GI NO: 15234195 NR Description: UDP rhamnose- anthocyanidin-3-glucosiderhamnosyltransferase
  misc_feature (1)..(53): NCBI GI NO: 15239523 NR Description: flavonol 3-O-glucosyltransferase-like protein
  misc_feature (95)..(95): Xaa is any aa, unknown or other
  misc_feature (96)..(96): Xaa is any aa, unknown or other
  misc_feature (134)..(134): Xaa is any aa, unknown or other
  misc_feature (188)..(188): Xaa is any aa, unknown or other
  misc_feature (191)..(191): Xaa is any aa, unknown or other
  misc_feature (202)..(202): Xaa is any aa, unknown or other
MLSSPSSTGEAAVVVPLRLPHVPGLPEDAASTADLSPEGAELLKAALDAARPQWPRCWPSSARTPCCSTSPPRGPPRTPRRWAPSRSGSASSPPXXAPTSPSPRAAPTRRASCRRRATSCPPLPASPAPPRSPXPASRRTRQPTSPTCSPASAASPASTNAWWPASGPATASCSRPAPRWRVPTSTTXPRXFASPCSWRGPXCLARRREISTTTGPPGCPRSRTAPSSSPRSAARRSCRPPRPRSCSWGSRPRVARSSPCSTPRTAPSRRRGSRRGCRGEGSFMPGGCRSSTSCATGAWGATSPTPASAPSWRASSPAAASYCCP

SEQ ID NO: 40333 - protein, 291 aa, Zea mays subsp. mays
  peptide (1)..(291): Ceres Seq. ID no. 12418903
  misc_feature (1)..(284): Pfam Name: Pfam Description:  UDP-glucoronosyl and UDP-glucosyl transferase
  misc_feature (1)..(291): NCBI GI NO: 480314 NR Description: UDP rhamnose- anthocyanidin-3-glucosiderhamnosyltransferase
  misc_feature (1)..(291): NCBI GI NO: 2501497 NR Description: FLAVONOL 3-O-GLUCOSYLTRANSFERASE
  misc_feature (1)..(282): NCBI GI NO: 22759895 NR Description: rhamnosyl transferase [Nierembergia sp. NB17]
  misc_feature (1)..(291): NCBI GI NO: 7433907 NR Description: anthocyanin rhamnosyltransferase - garden petunia
  misc_feature (1)..(285): NCBI GI NO: 23955910 NR Description: UDP-glucosyltransferase [Stevia rebaudiana]
  misc_feature (1)..(286): NCBI GI NO: 15239543 NR Description: flavonol 3-O-glucosyltransferase-like
  misc_feature (1)..(290): NCBI GI NO: 15234196 NR Description: UDP rhamnose- -anthocyanidin-3-glucosiderhamnosyltransferase
  misc_feature (1)..(286): NCBI GI NO: 15217773 NR Description: rhamnosyltransferase, putative
  misc_feature (1)..(290): NCBI GI NO: 15234195 NR Description: UDP rhamnose- anthocyanidin-3-glucosiderhamnosyltransferase
  misc_feature (1)..(286): NCBI GI NO: 15239523 NR Description: flavonol 3-O-glucosyltransferase-like protein
  misc_feature (15)..(15): Xaa is any aa, unknown or other
  misc_feature (69)..(69): Xaa is any aa, unknown or other
  misc_feature (70)..(70): Xaa is any aa, unknown or other
  misc_feature (73)..(73): Xaa is any aa, unknown or other
  misc_feature (84)..(84): Xaa is any aa, unknown or other
MSAPAGFPGSSPLAXAGVPAYQAADFTYMFTSFGGQPCVHERVVAGIRACDGLVLKTCAEMEGAYIDYXXAQXRKPVLVAGPLXPGPPAGDLDDHWATWLSAFPDGAVVFASFGSETFLPPAAATELLLGLEATGRPFLAVLNSPDGAVPPPGFAERVSGRGLVHAGWVPQQHILRHRSVGCYLTHAGFSSVVEGLVAGCRLVLLPMKGDQFLNAALFARELRVGVEVARRDDDGWFGRQDVCDAIAAAVADGGERDARKWADFLTDDGVQGRFADEFVRQLRELVGAASS

SEQ ID NO: 40334 - DNA, 491 bp, Zea mays subsp. mays
  misc_feature (1)..(491): Ceres Seq. ID no. 1845739
gcgcaasskctcgaccattgcaatgctgagaacaggaaaatctatcatgatttgaatgcttatagggtactttttgatgaggtacacaacaggaaggtgatccccgcttgtcaagttttggattaatgaagaacagccgtgatgggaaaagttatagcactaacctggcttacactccaccagagtttctacgaactggcagagtaattccggagagtgtgatctatagctatggaactgtcctgttggatcttttgagcggaaaacacattcctcctagtcatgccctagatttaataaggggaaagaatatactgttgctgatggattcctccttagaagggcagtatgctaatgaagatgcttcgaaattggttgatcttgcatcaaagtgtctgcaatttgaatctagggatagaccgaacataaagtatcttctgtcttctgttggtcctcttcagaatcaaaaggaggttgcatcacatgtgttc

SEQ ID NO: 40335 - protein, 122 aa, Zea mays subsp. mays
  peptide (1)..(122): Ceres Seq. ID no. 1845740
  misc_feature (1)..(108): Pfam Name: Pfam Description:  Protein kinase domain
  misc_feature (1)..(121): NCBI GI NO: 37537032 NR Description: putative protein kinase
  misc_feature (1)..(121): NCBI GI NO: 15237465 NR Description: protein kinase-like protein; protein id:At5g46570
  misc_feature (1)..(121): NCBI GI NO: 28393210 NR Description: putative protein kinase [Arabidopsis thaliana]
  misc_feature (1)..(121): NCBI GI NO: 22327962 NR Description: protein kinase - like; protein id: At5g59010
  misc_feature (1)..(121): NCBI GI NO: 7486022 NR Description: hypothetical protein F23E12
  misc_feature (1)..(121): NCBI GI NO: 18418600 NR Description: putative protein; protein id: At4g35230
  misc_feature (1)..(121): NCBI GI NO: 15232406 NR Description: protein kinase -like protein; protein id:At3g54030
  misc_feature (1)..(121): NCBI GI NO: 21553556 NR Description: protein kinase-like protein [Arabidopsis thaliana]
  misc_feature (1)..(120): NCBI GI NO: 15237604 NR Description: protein kinase-like; protein id: At5g41260.1
  misc_feature (1)..(121): NCBI GI NO: 22328189 NR Description: hypothetical protein; protein id: At4g00710
MKNSRDGKSYSTNLAYTPPEFLRTGRVIPESVIYSYGTVLLDLLSGKHIPPSHALDLIRGKNILLLMDSSLEGQYANEDASKLVDLASKCLQFESRDRPNIKYLLSSVGPLQNQKEVASHVF

SEQ ID NO: 40336 - DNA, 1414 bp, Zea mays subsp. mays
  misc_feature (1)..(1414): Ceres Seq. ID no. 12383423
actcttccgatcccgaggaggtaaaaacaccgtcgctcaccaccaacacaacgccaaccaacctgccccctcacccccgctggccgctgcttaacaaaccgccgccacaggacaagacaaacttattacagctccacctcagtgctgcagagactgagggccagccaaaccgctcaccgcacacgcggaattcaagcagcatgtacgccgacgccgggttcgccttcgccttcgccgccgcctactcccccaccctcacttcctcgcagccccagccgccgccgccgccgttcgactacgccttctcctccgagccacccctcctctccatgcccgccatggaccacgacgcctacctggggaacttggtacagccatccatggtatcagaatatgacctgggaggagaaggggacctgttcaaagctccagaagccatcatcgaggaaccgctgctcagcctcgatcctgtcgcagctgccttttcaatgatggctggcaatggaagtgctgtcatggatcaaactattaaggacgcaggcaccggcaccatccaaaatgaccccctcctgagtgaggtgctgtacgagtgcgagaaggaactcatggagaagtccacaatcgaagagacaatttctgaacttatggatgttaagattcctatgctgcaagttgaagaaatcccaagccaagctgaacaggttcttatacagaaccagcagctcccggccatggagaaagagaagcaatccgttcctgaatgctcgctccaaaaaagtgttagttctggatgcctcaactcagcagattggatgaatggacctgccaggccaaactttctagacttccaggggctggactttgaggcagcatttgggctgaggagagcttacagcgaaggagacattcagaaccttggagccaacacgcctcgaccagcagcaaatgtttgtgtgaccatcagtgacctcaagaccgaagaaaggaagcaaaagctttccaggtataggaagaagaagatcaagcggaactttggcaggaagatcaagtacgcgtgcaggaaggctctggcagacagccagccaagagtgcgagggagatttgccaagatcgaagaatgcgacctgctgaagccaagcaagtagatccaagtatgcttggttttggcttctagctaggcgccgctccatcgtccttaccttgtgcgctggagaggcgccgcgatgcccgtcggaattcattcaattgacctctcctgtttctctcgggcagcatgctgtgtaataataatctcctccgggcccttgggtgcgagtgaagagctgaaaatttggtatggtagtctagcccccctgtactgtacaaaaggcttgaagatggtaataaaactcagctcccctcttgcttgcttggc

SEQ ID NO: 40337 - protein, 380 aa, Zea mays subsp. mays
  peptide (1)..(380): Ceres Seq. ID no. 12383424
  misc_feature (333)..(372): Pfam Name: Pfam Description:  CCT motif
  misc_feature (256)..(372): NCBI GI NO: 18423511 NR Description: putative protein; protein id: At5g53420
  misc_feature (116)..(218): NCBI GI NO: 18423511 NR Description: putative protein; protein id: At5g53420
  misc_feature (256)..(372): NCBI GI NO: 21536819 NR Description: unknown [Arabidopsis thaliana]
  misc_feature (123)..(218): NCBI GI NO: 21536819 NR Description: unknown [Arabidopsis thaliana]
  misc_feature (256)..(372): NCBI GI NO: 8843771 NR Description: gene_id:MYN8
  misc_feature (116)..(218): NCBI GI NO: 8843771 NR Description: gene_id:MYN8
  misc_feature (172)..(372): NCBI GI NO: 15234310 NR Description: putative protein; protein id: At4g27900
  misc_feature (172)..(372): NCBI GI NO: 21593708 NR Description: unknown [Arabidopsis thaliana]
  misc_feature (320)..(372): NCBI GI NO: 26451419 NR Description: unknown protein [Arabidopsis thaliana]
  misc_feature (293)..(372): NCBI GI NO: 15238070 NR Description: putative protein; protein id: At5g41380.1
SSDPEEVKTPSLTTNTTPTNLPPHPRWPLLNKPPPQDKTNLLQLHLSAAETEGQPNRSPHTRNSSSMYADAGFAFAFAAAYSPTLTSSQPQPPPPPFDYAFSSEPPLLSMPAMDHDAYLGNLVQPSMVSEYDLGGEGDLFKAPEAIIEEPLLSLDPVAAAFSMMAGNGSAVMDQTIKDAGTGTIQNDPLLSEVLYECEKELMEKSTIEETISELMDVKIPMLQVEEIPSQAEQVLIQNQQLPAMEKEKQSVPECSLQKSVSSGCLNSADWMNGPARPNFLDFQGLDFEAAFGLRRAYSEGDIQNLGANTPRPAANVCVTISDLKTEERKQKLSRYRKKKIKRNFGRKIKYACRKALADSQPRVRGRFAKIEECDLLKPSK

SEQ ID NO: 40338 - protein, 314 aa, Zea mays subsp. mays
  peptide (1)..(314): Ceres Seq. ID no. 12383425
  misc_feature (267)..(306): Pfam Name: Pfam Description:  CCT motif
  misc_feature (190)..(306): NCBI GI NO: 18423511 NR Description: putative protein; protein id: At5g53420
  misc_feature (50)..(152): NCBI GI NO: 18423511 NR Description: putative protein; protein id: At5g53420
  misc_feature (190)..(306): NCBI GI NO: 21536819 NR Description: unknown [Arabidopsis thaliana]
  misc_feature (57)..(152): NCBI GI NO: 21536819 NR Description: unknown [Arabidopsis thaliana]
  misc_feature (190)..(306): NCBI GI NO: 8843771 NR Description: gene_id:MYN8
  misc_feature (50)..(152): NCBI GI NO: 8843771 NR Description: gene_id:MYN8
  misc_feature (106)..(306): NCBI GI NO: 15234310 NR Description: putative protein; protein id: At4g27900
  misc_feature (106)..(306): NCBI GI NO: 21593708 NR Description: unknown [Arabidopsis thaliana]
  misc_feature (254)..(306): NCBI GI NO: 26451419 NR Description: unknown protein [Arabidopsis thaliana]
  misc_feature (227)..(306): NCBI GI NO: 15238070 NR Description: putative protein; protein id: At5g41380.1
MYADAGFAFAFAAAYSPTLTSSQPQPPPPPFDYAFSSEPPLLSMPAMDHDAYLGNLVQPSMVSEYDLGGEGDLFKAPEAIIEEPLLSLDPVAAAFSMMAGNGSAVMDQTIKDAGTGTIQNDPLLSEVLYECEKELMEKSTIEETISELMDVKIPMLQVEEIPSQAEQVLIQNQQLPAMEKEKQSVPECSLQKSVSSGCLNSADWMNGPARPNFLDFQGLDFEAAFGLRRAYSEGDIQNLGANTPRPAANVCVTISDLKTEERKQKLSRYRKKKIKRNFGRKIKYACRKALADSQPRVRGRFAKIEECDLLKPSK

SEQ ID NO: 40339 - protein, 271 aa, Zea mays subsp. mays
  peptide (1)..(271): Ceres Seq. ID no. 12383426
  misc_feature (224)..(263): Pfam Name: Pfam Description:  CCT motif
  misc_feature (147)..(263): NCBI GI NO: 18423511 NR Description: putative protein; protein id: At5g53420
  misc_feature (7)..(109): NCBI GI NO: 18423511 NR Description: putative protein; protein id: At5g53420
  misc_feature (147)..(263): NCBI GI NO: 21536819 NR Description: unknown [Arabidopsis thaliana]
  misc_feature (14)..(109): NCBI GI NO: 21536819 NR Description: unknown [Arabidopsis thaliana]
  misc_feature (147)..(263): NCBI GI NO: 8843771 NR Description: gene_id:MYN8
  misc_feature (7)..(109): NCBI GI NO: 8843771 NR Description: gene_id:MYN8
  misc_feature (63)..(263): NCBI GI NO: 15234310 NR Description: putative protein; protein id: At4g27900
  misc_feature (63)..(263): NCBI GI NO: 21593708 NR Description: unknown [Arabidopsis thaliana]
  misc_feature (211)..(263): NCBI GI NO: 26451419 NR Description: unknown protein [Arabidopsis thaliana]
  misc_feature (184)..(263): NCBI GI NO: 15238070 NR Description: putative protein; protein id: At5g41380.1
MPAMDHDAYLGNLVQPSMVSEYDLGGEGDLFKAPEAIIEEPLLSLDPVAAAFSMMAGNGSAVMDQTIKDAGTGTIQNDPLLSEVLYECEKELMEKSTIEETISELMDVKIPMLQVEEIPSQAEQVLIQNQQLPAMEKEKQSVPECSLQKSVSSGCLNSADWMNGPARPNFLDFQGLDFEAAFGLRRAYSEGDIQNLGANTPRPAANVCVTISDLKTEERKQKLSRYRKKKIKRNFGRKIKYACRKALADSQPRVRGRFAKIEECDLLKPSK

SEQ ID NO: 40340 - DNA, 1572 bp, Zea mays subsp. mays
  misc_feature (1)..(1572): Ceres Seq. ID no. 12368130
aaaaaccaagaaacagctgaggcggagaggtagctacctgagccaatcggtgtcgcaatggctgcagcgggtatcaccagggcgccgccgatcgggcagaatccgaggctcgcgtgctacgccccgaggaggggcggagggcgtggtgaggtgctcgttgcagggcgcggtcgtcggcggccgggcggagtggcagagcagctgcgccgtgctgtccagcaaggtggccgcgctcggtacgcactccgtcaacggccacgtcgcgccggcgccgactcagaacggggcggtgctggatttggtccccgtgagtagtagtagtatcaatggcgccatcaccaagaacctgccgcagccgcttcgcatcgcggacctgtccccggcaccgatgcacgggtcgcagctgcgcgtggcctaccagggcgtgcccggcgcgtacagcgagaaggcggccgggaaggcgtacccgggctgcgacgccatcccctgcgaccagttcgaggtggcgttccaggccgtggagctgtggatcgcggaccgcgccgtgctccccgtggagaactcgctgggcggcagcatccaccgcaactacgacctgctgctccggcaccggctccacatcgtcggggaggtgcagctccccgtgcaccactgcctgctggcgctgcccggggtgcgcaaggagtgcctgacccgcgtgatcagccacccgcaggcgctggcgcagtgcgagcacacgctcacggccatgggcctcaacgtcgtccgcgaggccttcgacgacacggccggcgccgccgagtacgtggccgccaacggcctccgcgacacggccgccatcgcgtcctcccgcgccgccgagctgtacgggatggaggtgctcgcggacggcatccaggacgactccggcaacgtcacccgcttcgtgatgctggcccgggagcccgtcgtgccgcgcaccgaccgccccttcaagaccagcatcgtgttcgcgcacgacagggagggcacctccgtgctcttcaaggtgctctccgccttcgccttccgcgacatctcgctcaccaagatcgagagcaggccgcaccgccaccgccccatccgcctcgtcgacgacgccaacgtcggcaccgccaagcacttcgagtacatgttctacgtcgacttccaggcgtccctcgcagagccccgcgcgcagaacgcgctggccgaggtccaggagtacacgtccttcctccgggtgctcgggagctaccccatggacatgacccccatgaccgccggctcctcctccaccgttgtttcctcgtccgatgatccctcgtcgtcttgattgccgttggaggctggagctagctccgaggagaagtcgtcgagtagggacgttggttttctgctcatgtcgtcctactcgatcgcccctcgctgcagccggagtagttaattttgagtttcctttaatctttcatggtaatagtattatgtacgtgtaattgttcaaaatcatccgcggtgaatatatctgtgaaacagtactacatgacattcataatttcatattaatcagttttc

SEQ ID NO: 40341 - protein, 443 aa, Zea mays subsp. mays
  peptide (1)..(443): Ceres Seq. ID no. 12368131
  misc_feature (137)..(316): Pfam Name: Pfam Description:  Prephenate dehydratase
  misc_feature (44)..(443): NCBI GI NO: 38347597 NR Description: OSJNBa0042I15.10
  misc_feature (60)..(432): NCBI GI NO: 18390869 NR Description: expressed protein; protein id: At1g08250
  misc_feature (62)..(436): NCBI GI NO: 15226259 NR Description: putative chorismate mutase/prephenate dehydratase
  misc_feature (62)..(436): NCBI GI NO: 21593283 NR Description: putative chorismate mutase/prephenate dehydratase
  misc_feature (52)..(430): NCBI GI NO: 15230489 NR Description: putative chloroplast prephenate dehydratase
  misc_feature (28)..(433): NCBI GI NO: 15242928 NR Description: chorismate mutase/prephenate dehydratase-like
  misc_feature (102)..(423): NCBI GI NO: 34394031 NR Description: putative prephenate dehydratase
  misc_feature (116)..(422): NCBI GI NO: 15221096 NR Description: putative chloroplast prephenate dehydratase
  misc_feature (116)..(422): NCBI GI NO: 14596233 NR Description: Unknown protein [Arabidopsis thaliana]
  misc_feature (116)..(423): NCBI GI NO: 15231489 NR Description: putative P-protein: chorismate mutase
KTKKQLRRRGSYLSQSVSQWLQRVSPGRRRSGRIRGSRATPRGGAEGVVRCSLQGAVVGGRAEWQSSCAVLSSKVAALGTHSVNGHVAPAPTQNGAVLDLVPVSSSSINGAITKNLPQPLRIADLSPAPMHGSQLRVAYQGVPGAYSEKAAGKAYPGCDAIPCDQFEVAFQAVELWIADRAVLPVENSLGGSIHRNYDLLLRHRLHIVGEVQLPVHHCLLALPGVRKECLTRVISHPQALAQCEHTLTAMGLNVVREAFDDTAGAAEYVAANGLRDTAAIASSRAAELYGMEVLADGIQDDSGNVTRFVMLAREPVVPRTDRPFKTSIVFAHDREGTSVLFKVLSAFAFRDISLTKIESRPHRHRPIRLVDDANVGTAKHFEYMFYVDFQASLAEPRAQNALAEVQEYTSFLRVLGSYPMDMTPMTAGSSSTVVSSSDDPSSS

SEQ ID NO: 40342 - protein, 314 aa, Zea mays subsp. mays
  peptide (1)..(314): Ceres Seq. ID no. 12368132
  misc_feature (8)..(187): Pfam Name: Pfam Description:  Prephenate dehydratase
  misc_feature (1)..(314): NCBI GI NO: 38347597 NR Description: OSJNBa0042I15.10
  misc_feature (1)..(303): NCBI GI NO: 18390869 NR Description: expressed protein; protein id: At1g08250
  misc_feature (1)..(307): NCBI GI NO: 15226259 NR Description: putative chorismate mutase/prephenate dehydratase
  misc_feature (1)..(307): NCBI GI NO: 21593283 NR Description: putative chorismate mutase/prephenate dehydratase
  misc_feature (1)..(301): NCBI GI NO: 15230489 NR Description: putative chloroplast prephenate dehydratase
  misc_feature (1)..(304): NCBI GI NO: 15242928 NR Description: chorismate mutase/prephenate dehydratase-like
  misc_feature (1)..(294): NCBI GI NO: 34394031 NR Description: putative prephenate dehydratase
  misc_feature (1)..(293): NCBI GI NO: 15221096 NR Description: putative chloroplast prephenate dehydratase
  misc_feature (1)..(293): NCBI GI NO: 14596233 NR Description: Unknown protein [Arabidopsis thaliana]
  misc_feature (1)..(294): NCBI GI NO: 15231489 NR Description: putative P-protein: chorismate mutase
MHGSQLRVAYQGVPGAYSEKAAGKAYPGCDAIPCDQFEVAFQAVELWIADRAVLPVENSLGGSIHRNYDLLLRHRLHIVGEVQLPVHHCLLALPGVRKECLTRVISHPQALAQCEHTLTAMGLNVVREAFDDTAGAAEYVAANGLRDTAAIASSRAAELYGMEVLADGIQDDSGNVTRFVMLAREPVVPRTDRPFKTSIVFAHDREGTSVLFKVLSAFAFRDISLTKIESRPHRHRPIRLVDDANVGTAKHFEYMFYVDFQASLAEPRAQNALAEVQEYTSFLRVLGSYPMDMTPMTAGSSSTVVSSSDDPSSS

SEQ ID NO: 40343 - DNA, 934 bp, Zea mays subsp. mays
  misc_feature (1)..(934): Ceres Seq. ID no. 14305241
agagaatacaggggagaagccgagagccgaacgaagagaccgagcccccgccgcccgcggcgtctgttcctttcgtgccgcttcgtggtggcgccgtggcgcccaccaccacctcacctctcagtctctcaccacctatagcaataccacgagtccacgatccatggaatagactagactacaccgctcggccggtgacgacgacggcgacagccgacagtctatccccaactacgctctgcaccagcgccttatccgccgcctggggtttgttctggcgcggtggcagttgataaaggcgggagggattagagcaaggagagggatcggcgatgagcttcgcggatctggaggcgggggctctcagggcgcccctcgggaggaaagcgagaggggggccaaacgacgcgagagcgctcgtcttccagataaccaccgcggtggcctcgtaccgccgcctcctcaactcgctcggcacgcccaaggacaccatcacgcttcgtgataacctgcataagactagtcagaacatccttcaattagcaaaggatgcgaaagataagctccaaaaggctgctgaagcagacaagagcactgatacaagtgcagacaagaggatagctgatatgaagcttgccaaagattttgctgccacaatggaggagttcaggaaacttcagagtcttgcgattcagagggagacggcatataagccagttgttccacagaatacgcagtcaaactattctacagatgagcgaagttccgaatctggtaatatgcctgagcagcgtgcattactcgctgaatcaatgagacaagaggtgctgcaattggacaatgaaattgtttacaatgaagctataattgaggaaagggagcaagccattcaagatatccaacagcagattggtgaagtacatgaagtgttcaa

SEQ ID NO: 40344 - protein, 200 aa, Zea mays subsp. mays
  peptide (1)..(200): Ceres Seq. ID no. 14305242
  misc_feature (16)..(113): Pfam Name: Pfam Description:  Syntaxin
  misc_feature (1)..(199): NCBI GI NO: 22597174 NR Description: syntaxin [Glycine max]
  misc_feature (1)..(199): NCBI GI NO: 34902878 NR Description: unnamed protein product
  misc_feature (1)..(199): NCBI GI NO: 18414953 NR Description: syntaxin of plants SYP23 [Arabidopsis thaliana]
  misc_feature (1)..(199): NCBI GI NO: 18422725 NR Description: syntaxin of plants SYP22 (VAM3p)
  misc_feature (1)..(199): NCBI GI NO: 7488213 NR Description: probable syntaxin - Arabidopsis thaliana
  misc_feature (1)..(199): NCBI GI NO: 15237418 NR Description: syntaxin of plants SYP21 (PEP12)
  misc_feature (1)..(199): NCBI GI NO: 21595750 NR Description: syntaxin homologue [Arabidopsis thaliana]
  misc_feature (61)..(199): NCBI GI NO: 15222626 NR Description: syntaxin of plants, putative
  misc_feature (61)..(137): NCBI GI NO: 25511677 NR Description: F5D14.3 protein - Arabidopsis thaliana
  misc_feature (152)..(199): NCBI GI NO: 25511677 NR Description: F5D14.3 protein - Arabidopsis thaliana
MSFADLEAGALRAPLGRKARGGPNDARALVFQITTAVASYRRLLNSLGTPKDTITLRDNLHKTSQNILQLAKDAKDKLQKAAEADKSTDTSADKRIADMKLAKDFAATMEEFRKLQSLAIQRETAYKPVVPQNTQSNYSTDERSSESGNMPEQRALLAESMRQEVLQLDNEIVYNEAIIEEREQAIQDIQQQIGEVHEVF

SEQ ID NO: 40345 - protein, 102 aa, Zea mays subsp. mays
  peptide (1)..(102): Ceres Seq. ID no. 14305243
  misc_feature (1)..(101): NCBI GI NO: 22597174 NR Description: syntaxin [Glycine max]
  misc_feature (1)..(101): NCBI GI NO: 34902878 NR Description: unnamed protein product
  misc_feature (1)..(101): NCBI GI NO: 18414953 NR Description: syntaxin of plants SYP23 [Arabidopsis thaliana]
  misc_feature (1)..(101): NCBI GI NO: 18422725 NR Description: syntaxin of plants SYP22 (VAM3p)
  misc_feature (1)..(101): NCBI GI NO: 7488213 NR Description: probable syntaxin - Arabidopsis thaliana
  misc_feature (1)..(101): NCBI GI NO: 15237418 NR Description: syntaxin of plants SYP21 (PEP12)
  misc_feature (1)..(101): NCBI GI NO: 21595750 NR Description: syntaxin homologue [Arabidopsis thaliana]
  misc_feature (1)..(101): NCBI GI NO: 15222626 NR Description: syntaxin of plants, putative
  misc_feature (1)..(39): NCBI GI NO: 25511677 NR Description: F5D14.3 protein - Arabidopsis thaliana
  misc_feature (54)..(101): NCBI GI NO: 25511677 NR Description: F5D14.3 protein - Arabidopsis thaliana
MKLAKDFAATMEEFRKLQSLAIQRETAYKPVVPQNTQSNYSTDERSSESGNMPEQRALLAESMRQEVLQLDNEIVYNEAIIEEREQAIQDIQQQIGEVHEVF

SEQ ID NO: 40346 - DNA, 1978 bp, Zea mays subsp. mays
  misc_feature (1)..(1978): Ceres Seq. ID no. 12387736
gcacgagaccattacctagaacatcctaatcaaaaattccattccactttccaccatggcttccctctgcgtccaccatacctcgctaccactctccccgccccaccaggtcaccgtccccgaaccctctcgcgcgctgcccccatcctcgcgcctccccgccctgccgtcctcctccaaccatgtcagcgcgctccctcgacccgcggcggcttccttcgccttcgcgtgccactgcaaagcaccggtgcgggaccacgacgctgagctcctccgcgctctacggtccaacggcaacggcaccctccacggggacacagcactgccgcaagtgctcgactcgcgctccgacggaccgggcggcgacggcagcagcaagaggtcgcgtttctgcgcccgggattgcgcgaagcggatcatggagctgcccgtggaggagcgggtgaaggtgctcgacctcttgcagcgcgacgacgcggcgctcaccgtctccgattacaacgacatcctttcggcgctggctcgcgcgggagaccacgccacggccgtcgctctgttccgcgccatgcccgtcgcccccgacgcacactccttcgccaccgccgtgcagtgcctctgccgacagggcgcgcccgacgaggccaagctcgcgctcgacgagatggtggcgcgcgggttccgccccagcgttgccacgttctcagccgttgtggggtgcctctgcaagcgcggacgcgtcaccaaggccatggaggtgttggacgccatgctcggcctcgggtgcgagcctaccatccgcacgtacaacagcctcgtcggtgggctctgctacgtcggccggctggaggaggcgctcgaactcctcaagaagctcaaggactcgcccctgacgcctgacatctacaccttcaccatcgtgctcgacggattctgtaaggtcgggcggacggaggaggccacggccatcttccacgatgcgatcgggatgggcctctcgccgacgacattcacgtacaacgcgctcttgaacggccactgcaaggagggaaacccgctcaaagcgttcgcgctgctcatggagatgtgcggcaataacgacgccgcctgcctgccagacaagaccagcttcgggatcgtgctgacggcgctgctccgcgccggcgagacctcagcggcgtggcagacgtacaagcggatggagcgcgctgggttcgaggtggacgggcgcgcgctggacacgctggctcggggcctgtgccggcggtgcgcgacggacgcctcggccctcggcgacgcggaggaggtgttcggcaaggtagtggcttcgggccacgagccggtgtcctacacgtactgcctgatggcgcaggcgctggcgcgcggcggcgaggtggacgcggccgtggcgctcctggaggacatggtgcgcaagggatacgcgctgcggaagcgcgcctacacggacgtggtgcgcgcgctctgtgaccgtggcagggcccgcgacgcgctgcaggtgcttgtgcttgtgatgatcgtgagggacttcgtgccgggacggaacgcgttcgaagcgctcctgggagagctgagccggcaggggcggtgggctgacgccatgaccgtgtacgccgccgctgtgaagcgaggcgtggtggtctcgtggaagcacctcggcagagaggcgcactcaccggaggagcccattcggctgggcgtccctgtcccgcagtgaccgtttgtctggggctctgggcgcggccgggatcaccatctttctgagcccattcggcttgcgttctgtttccgatgctgtagacggaaaattctgccagtttggaccgcttgcagatggcactgaggaacaagcgtagctgatggttcaggtattcgcgttgtcgctaattttcgtgacactcaccgcaaatgtaccgaaattatgtaaatcatttctgcttctacgtaaatcatctctgcttct

SEQ ID NO: 40347 - protein, 558 aa, Zea mays subsp. mays
  peptide (1)..(558): Ceres Seq. ID no. 12387737
  misc_feature (117)..(487): NCBI GI NO: 34910106 NR Description: B1100D10.28
  misc_feature (131)..(486): NCBI GI NO: 15218325 NR Description: hypothetical protein; protein id: At1g09900.1
  misc_feature (175)..(531): NCBI GI NO: 34896698 NR Description: putative pentatricopeptide repeat protein
  misc_feature (26)..(537): NCBI GI NO: 34015356 NR Description: putative fertility restorer
  misc_feature (126)..(499): NCBI GI NO: 15231863 NR Description: putative protein; protein id: At3g53700
  misc_feature (175)..(532): NCBI GI NO: 15237575 NR Description: salt-inducible protein-like; protein id:At5g41170
  misc_feature (121)..(539): NCBI GI NO: 37533554 NR Description: putative PPR-repeat protein
  misc_feature (175)..(554): NCBI GI NO: 15231863 NR Description: putative protein; protein id: At3g53700
  misc_feature (145)..(532): NCBI GI NO: 15221232 NR Description: putative indole-3-acetate beta-glucosyltransferase
  misc_feature (73)..(524): NCBI GI NO: 34906814 NR Description: similar to membrane-associated salt-inducibleprotein
MASLCVHHTSLPLSPPHQVTVPEPSRALPPSSRLPALPSSSNHVSALPRPAAASFAFACHCKAPVRDHDAELLRALRSNGNGTLHGDTALPQVLDSRSDGPGGDGSSKRSRFCARDCAKRIMELPVEERVKVLDLLQRDDAALTVSDYNDILSALARAGDHATAVALFRAMPVAPDAHSFATAVQCLCRQGAPDEAKLALDEMVARGFRPSVATFSAVVGCLCKRGRVTKAMEVLDAMLGLGCEPTIRTYNSLVGGLCYVGRLEEALELLKKLKDSPLTPDIYTFTIVLDGFCKVGRTEEATAIFHDAIGMGLSPTTFTYNALLNGHCKEGNPLKAFALLMEMCGNNDAACLPDKTSFGIVLTALLRAGETSAAWQTYKRMERAGFEVDGRALDTLARGLCRRCATDASALGDAEEVFGKVVASGHEPVSYTYCLMAQALARGGEVDAAVALLEDMVRKGYALRKRAYTDVVRALCDRGRARDALQVLVLVMIVRDFVPGRNAFEALLGELSRQGRWADAMTVYAAAVKRGVVVSWKHLGREAHSPEEPIRLGVPVPQ

SEQ ID NO: 40348 - protein, 437 aa, Zea mays subsp. mays
  peptide (1)..(437): Ceres Seq. ID no. 12387738
  misc_feature (1)..(366): NCBI GI NO: 34910106 NR Description: B1100D10.28
  misc_feature (10)..(365): NCBI GI NO: 15218325 NR Description: hypothetical protein; protein id: At1g09900.1
  misc_feature (54)..(410): NCBI GI NO: 34896698 NR Description: putative pentatricopeptide repeat protein
  misc_feature (1)..(416): NCBI GI NO: 34015356 NR Description: putative fertility restorer
  misc_feature (5)..(378): NCBI GI NO: 15231863 NR Description: putative protein; protein id: At3g53700
  misc_feature (54)..(411): NCBI GI NO: 15237575 NR Description: salt-inducible protein-like; protein id:At5g41170
  misc_feature (1)..(418): NCBI GI NO: 37533554 NR Description: putative PPR-repeat protein
  misc_feature (54)..(433): NCBI GI NO: 15231863 NR Description: putative protein; protein id: At3g53700
  misc_feature (24)..(411): NCBI GI NO: 15221232 NR Description: putative indole-3-acetate beta-glucosyltransferase
  misc_feature (1)..(403): NCBI GI NO: 34906814 NR Description: similar to membrane-associated salt-inducibleprotein
MELPVEERVKVLDLLQRDDAALTVSDYNDILSALARAGDHATAVALFRAMPVAPDAHSFATAVQCLCRQGAPDEAKLALDEMVARGFRPSVATFSAVVGCLCKRGRVTKAMEVLDAMLGLGCEPTIRTYNSLVGGLCYVGRLEEALELLKKLKDSPLTPDIYTFTIVLDGFCKVGRTEEATAIFHDAIGMGLSPTTFTYNALLNGHCKEGNPLKAFALLMEMCGNNDAACLPDKTSFGIVLTALLRAGETSAAWQTYKRMERAGFEVDGRALDTLARGLCRRCATDASALGDAEEVFGKVVASGHEPVSYTYCLMAQALARGGEVDAAVALLEDMVRKGYALRKRAYTDVVRALCDRGRARDALQVLVLVMIVRDFVPGRNAFEALLGELSRQGRWADAMTVYAAAVKRGVVVSWKHLGREAHSPEEPIRLGVPVPQ

SEQ ID NO: 40349 - protein, 388 aa, Zea mays subsp. mays
  peptide (1)..(388): Ceres Seq. ID no. 12387739
  misc_feature (1)..(317): NCBI GI NO: 34910106 NR Description: B1100D10.28
  misc_feature (1)..(316): NCBI GI NO: 15218325 NR Description: hypothetical protein; protein id: At1g09900.1
  misc_feature (5)..(361): NCBI GI NO: 34896698 NR Description: putative pentatricopeptide repeat protein
  misc_feature (1)..(367): NCBI GI NO: 34015356 NR Description: putative fertility restorer
  misc_feature (1)..(329): NCBI GI NO: 15231863 NR Description: putative protein; protein id: At3g53700
  misc_feature (5)..(362): NCBI GI NO: 15237575 NR Description: salt-inducible protein-like; protein id:At5g41170
  misc_feature (1)..(369): NCBI GI NO: 37533554 NR Description: putative PPR-repeat protein
  misc_feature (5)..(384): NCBI GI NO: 15231863 NR Description: putative protein; protein id: At3g53700
  misc_feature (1)..(362): NCBI GI NO: 15221232 NR Description: putative indole-3-acetate beta-glucosyltransferase
  misc_feature (1)..(354): NCBI GI NO: 34906814 NR Description: similar to membrane-associated salt-inducibleprotein
MPVAPDAHSFATAVQCLCRQGAPDEAKLALDEMVARGFRPSVATFSAVVGCLCKRGRVTKAMEVLDAMLGLGCEPTIRTYNSLVGGLCYVGRLEEALELLKKLKDSPLTPDIYTFTIVLDGFCKVGRTEEATAIFHDAIGMGLSPTTFTYNALLNGHCKEGNPLKAFALLMEMCGNNDAACLPDKTSFGIVLTALLRAGETSAAWQTYKRMERAGFEVDGRALDTLARGLCRRCATDASALGDAEEVFGKVVASGHEPVSYTYCLMAQALARGGEVDAAVALLEDMVRKGYALRKRAYTDVVRALCDRGRARDALQVLVLVMIVRDFVPGRNAFEALLGELSRQGRWADAMTVYAAAVKRGVVVSWKHLGREAHSPEEPIRLGVPVPQ

SEQ ID NO: 40350 - DNA, 458 bp, Zea mays subsp. mays
  misc_feature (1)..(458): Ceres Seq. ID no. 5006268
  misc_feature (454)..(454): n is a, c, t, g, unknown, or other
ccattgacatcaccgagacctatcgccgcagaaccaccgaatccagggcatcggagagtgtagaggttagtacgaggcggaggtcaagatggtgtgcatccggcaggcgactatcgacgacctgctggcgatgcaggcgtgcaacttgatgtgcctgccggagaactaccagatgaagtactacctctaccacatgctgtcttggccgcagctcctcttcgtcgccgaggactacggcggccgcatcgtcggctacgtgctcgccaagatggaggaggacccctccgagccctgccacggccacatcacctccctcgcggtgctccgctcccaccgcaagctcgggctcgccaccaagctcatgtccgccgcggataacaggctgatgactcccaagagctcttatcgacggagtcgtttggcactcgatgtcgactcatcacatcctggggtngaag

SEQ ID NO: 40351 - protein, 123 aa, Zea mays subsp. mays
  peptide (1)..(123): Ceres Seq. ID no. 5006269
  misc_feature (45)..(95): Pfam Name: GNAT Pfam Description: Acetyltransferase
  misc_feature (1)..(95): NCBI GI NO: 14550116 NR Description: silencing group B protein [Zea mays]
  misc_feature (1)..(95): NCBI GI NO: 38344807 NR Description: OSJNBa0043L09.27
  misc_feature (1)..(95): NCBI GI NO: 15240705 NR Description: putative protein; protein id: At5g13780
  misc_feature (4)..(100): NCBI GI NO: 30519923 NR Description: DNA segment
  misc_feature (4)..(119): NCBI GI NO: 28422354 NR Description: Similar to N-acetyltransferase ARD1 homolog (S
  misc_feature (4)..(100): NCBI GI NO: 33871453 NR Description: MGC10646 protein [Homo sapiens]
  misc_feature (4)..(100): NCBI GI NO: 39645307 NR Description: Unknown (protein for IMAGE:3922934) [Homo sapiens]
  misc_feature (4)..(100): NCBI GI NO: 37539684 NR Description: hypothetical protein MGC10646 [Homo sapiens]
  misc_feature (4)..(100): NCBI GI NO: 9845236 NR Description: N-acetyltransferase similar to S. cerevisiae ARD1
  misc_feature (4)..(100): NCBI GI NO: 10835057 NR Description: N-acetyltransferase, homolog of S
  misc_feature (122)..(122): Xaa is any aa, unknown or other
MVCIRQATIDDLLAMQACNLMCLPENYQMKYYLYHMLSWPQLLFVAEDYGGRIVGYVLAKMEEDPSEPCHGHITSLAVLRSHRKLGLATKLMSAADNRLMTPKSSYRRSRLALDVDSSHPGXE

SEQ ID NO: 40352 - protein, 109 aa, Zea mays subsp. mays
  peptide (1)..(109): Ceres Seq. ID no. 5006270
  misc_feature (31)..(81): Pfam Name: GNAT Pfam Description: Acetyltransferase
  misc_feature (1)..(81): NCBI GI NO: 14550116 NR Description: silencing group B protein [Zea mays]
  misc_feature (1)..(81): NCBI GI NO: 38344807 NR Description: OSJNBa0043L09.27
  misc_feature (1)..(81): NCBI GI NO: 15240705 NR Description: putative protein; protein id: At5g13780
  misc_feature (1)..(86): NCBI GI NO: 30519923 NR Description: DNA segment
  misc_feature (1)..(105): NCBI GI NO: 28422354 NR Description: Similar to N-acetyltransferase ARD1 homolog (S
  misc_feature (1)..(86): NCBI GI NO: 33871453 NR Description: MGC10646 protein [Homo sapiens]
  misc_feature (1)..(86): NCBI GI NO: 39645307 NR Description: Unknown (protein for IMAGE:3922934) [Homo sapiens]
  misc_feature (1)..(86): NCBI GI NO: 37539684 NR Description: hypothetical protein MGC10646 [Homo sapiens]
  misc_feature (1)..(86): NCBI GI NO: 9845236 NR Description: N-acetyltransferase similar to S. cerevisiae ARD1
  misc_feature (1)..(86): NCBI GI NO: 26347431 NR Description: unnamed protein product [Mus musculus]
  misc_feature (108)..(108): Xaa is any aa, unknown or other
MQACNLMCLPENYQMKYYLYHMLSWPQLLFVAEDYGGRIVGYVLAKMEEDPSEPCHGHITSLAVLRSHRKLGLATKLMSAADNRLMTPKSSYRRSRLALDVDSSHPGXE

SEQ ID NO: 40353 - protein, 103 aa, Zea mays subsp. mays
  peptide (1)..(103): Ceres Seq. ID no. 5006271
  misc_feature (25)..(75): Pfam Name: GNAT Pfam Description: Acetyltransferase
  misc_feature (1)..(75): NCBI GI NO: 14550116 NR Description: silencing group B protein [Zea mays]
  misc_feature (1)..(75): NCBI GI NO: 38344807 NR Description: OSJNBa0043L09.27
  misc_feature (1)..(75): NCBI GI NO: 15240705 NR Description: putative protein; protein id: At5g13780
  misc_feature (1)..(80): NCBI GI NO: 30519923 NR Description: DNA segment
  misc_feature (1)..(99): NCBI GI NO: 28422354 NR Description: Similar to N-acetyltransferase ARD1 homolog (S
  misc_feature (1)..(80): NCBI GI NO: 33871453 NR Description: MGC10646 protein [Homo sapiens]
  misc_feature (1)..(80): NCBI GI NO: 39645307 NR Description: Unknown (protein for IMAGE:3922934) [Homo sapiens]
  misc_feature (1)..(80): NCBI GI NO: 37539684 NR Description: hypothetical protein MGC10646 [Homo sapiens]
  misc_feature (1)..(80): NCBI GI NO: 9845236 NR Description: N-acetyltransferase similar to S. cerevisiae ARD1
  misc_feature (1)..(80): NCBI GI NO: 26347431 NR Description: unnamed protein product [Mus musculus]
  misc_feature (102)..(102): Xaa is any aa, unknown or other
MCLPENYQMKYYLYHMLSWPQLLFVAEDYGGRIVGYVLAKMEEDPSEPCHGHITSLAVLRSHRKLGLATKLMSAADNRLMTPKSSYRRSRLALDVDSSHPGXE

SEQ ID NO: 40354 - DNA, 1108 bp, Zea mays subsp. mays
  misc_feature (1)..(1108): Ceres Seq. ID no. 12363658
gtgcctccatcttccgattcccatcgcttgtttgctgctgccttttcctttccgccgcggcaaaagtgaggagcgcgcgggcgagttgggggagacgaacccgtcataactccttcgcttaatcgcgtctcgtgctcctgcctcctgcgtatataaacgcggcaatcgcgacgcccggggaggcgttcgttctccttctccatcccacgcgcgcgcagtccaaggccggatcggcggcctctcagatctcgccggccgccgtgagacagagaccgaagggggggttgaccggtgctccggaggaagatgtttagcgggacgcagcagaagtgcaaggtgtgcaccaagacggtgtacccgatggaccagctctccaccgacggcgtcgtcttccaccgctcctgcttcaagtgccagcactgcaagtctaccctctcactgagcaactattcctcgttcgaaggagtgccgtactgcaagacccatttcgagcagctgttcaaggagaccgggagttacaacaagagcttccaatcacagtcacctgcaaagattactccggaaaagttggcccctgagctgaccagatcaccaagcaaagctgcaaggatgttttcaggaacacaagacaagtgtgcgacttgtggtaaaactgcgtatcctcttgagaaggtaacagtcgaagagaagtcctaccataagtcatgcttcaaatgctcccacgggggctgcgcgattacaccttccaactatgcagccttggagggcatcctctactgcaaacaccatttctcccaacttttcaaggagaagggaagctacaaccacttgatcaagtgcgcgtccgtcaagcgcgctgctgaagcacagccagaacaaccggcctctgattcctcctcctgaccacgccatttaaacagtgggggtttggaggcgagagagttgggaagcctcctgtttctacttaaaaccgcgtgatgtatgttattccatctatgccccgaggatactagactactactctattttggtatcctctgctgtgctagctggatcatatcagcgaaccatggaattgctgtcattttcaatgaaactgttgtgcatc

SEQ ID NO: 40355 - protein, 198 aa, Zea mays subsp. mays
  peptide (1)..(198): Ceres Seq. ID no. 12363659
  misc_feature (110)..(167): Pfam Name: Pfam Description:  LIM domain
  misc_feature (1)..(197): NCBI GI NO: 34902012 NR Description: putative LIM-domain protein
  misc_feature (2)..(190): NCBI GI NO: 7489184 NR Description: probable transcription factor SF3 - common tobacco
  misc_feature (2)..(190): NCBI GI NO: 17227092 NR Description: LIM domain protein [Gossypium hirsutum]
  misc_feature (2)..(187): NCBI GI NO: 15225592 NR Description: putative LIM-domain protein; protein id:At2g39900
  misc_feature (2)..(187): NCBI GI NO: 15228188 NR Description: transcription factor L2; protein id: At3g55770
  misc_feature (2)..(169): NCBI GI NO: 11282608 NR Description: transcription factor L2
  misc_feature (1)..(195): NCBI GI NO: 25354704 NR Description: T1N6.19 protein - Arabidopsis thaliana
  misc_feature (2)..(187): NCBI GI NO: 8515104 NR Description: LIM domain protein PLIM-2 [Nicotiana tabacum]
  misc_feature (2)..(195): NCBI GI NO: 15223476 NR Description: LIM domain protein, putative; protein id:At1g01780
  misc_feature (2)..(195): NCBI GI NO: 15225897 NR Description: putative LIM-domain protein; protein id:At2g45800
MFSGTQQKCKVCTKTVYPMDQLSTDGVVFHRSCFKCQHCKSTLSLSNYSSFEGVPYCKTHFEQLFKETGSYNKSFQSQSPAKITPEKLAPELTRSPSKAARMFSGTQDKCATCGKTAYPLEKVTVEEKSYHKSCFKCSHGGCAITPSNYAALEGILYCKHHFSQLFKEKGSYNHLIKCASVKRAAEAQPEQPASDSSS

SEQ ID NO: 40356 - protein, 180 aa, Zea mays subsp. mays
  peptide (1)..(180): Ceres Seq. ID no. 12363660
  misc_feature (92)..(149): Pfam Name: Pfam Description:  LIM domain
  misc_feature (1)..(179): NCBI GI NO: 34902012 NR Description: putative LIM-domain protein
  misc_feature (1)..(172): NCBI GI NO: 7489184 NR Description: probable transcription factor SF3 - common tobacco
  misc_feature (1)..(172): NCBI GI NO: 17227092 NR Description: LIM domain protein [Gossypium hirsutum]
  misc_feature (1)..(169): NCBI GI NO: 15225592 NR Description: putative LIM-domain protein; protein id:At2g39900
  misc_feature (1)..(169): NCBI GI NO: 15228188 NR Description: transcription factor L2; protein id: At3g55770
  misc_feature (1)..(151): NCBI GI NO: 11282608 NR Description: transcription factor L2
  misc_feature (1)..(177): NCBI GI NO: 25354704 NR Description: T1N6.19 protein - Arabidopsis thaliana
  misc_feature (1)..(169): NCBI GI NO: 8515104 NR Description: LIM domain protein PLIM-2 [Nicotiana tabacum]
  misc_feature (1)..(177): NCBI GI NO: 15223476 NR Description: LIM domain protein, putative; protein id:At1g01780
  misc_feature (1)..(177): NCBI GI NO: 15225897 NR Description: putative LIM-domain protein; protein id:At2g45800
MDQLSTDGVVFHRSCFKCQHCKSTLSLSNYSSFEGVPYCKTHFEQLFKETGSYNKSFQSQSPAKITPEKLAPELTRSPSKAARMFSGTQDKCATCGKTAYPLEKVTVEEKSYHKSCFKCSHGGCAITPSNYAALEGILYCKHHFSQLFKEKGSYNHLIKCASVKRAAEAQPEQPASDSSS

SEQ ID NO: 40357 - DNA, 1355 bp, Zea mays subsp. mays
  misc_feature (1)..(1355): Ceres Seq. ID no. 12419087
  misc_feature (290)..(290): n is a, c, t, g, unknown, or other
gcacgagaccattacctagaacatcctaatcgaaaaaccatccaagccatagcgagcgcccaccgccaacccaaacccaccggccaccaccactacgccacaccgatcgccatggccgccaccacgccggcgcccccctcccacggcggcgggcgcaacggcaccctccctactccgctgccttccaacgagtccttctccaagttcttcgagtcctggatctcggagcagtcccgcgacctcgaggagctgcgcgccgcggcgtccgcggacccgcccgcgcccgaganccgagctccggcgcctcgtgggccaggtgctcggccactacgcgcagtactaccgcgccaaggcggcggccgcggccgacgacgtgctctgcatgttcaccccgtcctggacctccaccaccgagaacctctacctctggtgcggcggctggcgccccaccgccgcgatccagctgctgtacaccaagtccgggatgcagctgcagcaccagctccccgccttcctcgacggcgggggcctcaaggacgacctcggcgacctcggcgccgcgcagctccaggccgccgaccagctgcagcgccgcaccatccggagggagcgcgagatcgaggacgccgccgcgagcgcacaggaagcgctgacgacggcgacgatggtggagctcgcgggcggcggcgggagggaggcgggggccatggaccgggagatgcaggcgaaggcggaggggatgaggcgggtgctggagatggcggacgcgctgcgcctcgagacgatgcgcgaggtggtggcgctgctccgccccgcgcaggccgtgcacttcctcctcgccgccgccgagctccacctcgccgtgcacgacttcgggcgccgcaaggacggccgcgccggcaacgtcgccgccgccgcgccgccggagtgacggacgctggcgcgcgtgaaacgataacgggcttgcctgcctgcctggctgctctgcttttgcttgtgtcgtgtagctggggggctccctgttccaagcggcgcatggctgcgcctgctcgcgcgcgcgcgttcgttgcccctgacgtcgcgctcgtcgcctagctacccatccataaaggctgcggctggtttggtcagcacgagctgtcgcgataagcttctgaccatttgttcctcttgctgtgcctgtgcactgtgcagtcgtgagtcgtgacacatgcctgtctttggagtaaagcgagatcttgtttgggagtagtagagatgttatgcttcagcagtgaaatgaaaataataatttggatttggtttcagcgcgacaatgaaatagatgttggactgacttttgggatcatgtttac

SEQ ID NO: 40358 - protein, 364 aa, Zea mays subsp. mays
  peptide (1)..(364): Ceres Seq. ID no. 12419088
  misc_feature (226)..(364): Pfam Name: Pfam Description:  MARCKS family
  misc_feature (167)..(306): NCBI GI NO: 29829093 NR Description: putative translation initiation factor IF-2
  misc_feature (84)..(307): NCBI GI NO: 29247944 NR Description: GLP_26_54603_52153 [Giardia lamblia ATCC 50803]
  misc_feature (95)..(324): NCBI GI NO: 23018055 NR Description: hypothetical protein [Thermobifida fusca]
  misc_feature (206)..(323): NCBI GI NO: 29367367 NR Description: calmodulin-related protein
  misc_feature (99)..(316): NCBI GI NO: 23018055 NR Description: hypothetical protein [Thermobifida fusca]
  misc_feature (93)..(293): NCBI GI NO: 7494125 NR Description: myosin-IA - Acanthamoeba castellanii
  misc_feature (23)..(331): NCBI GI NO: 23019271 NR Description: hypothetical protein [Thermobifida fusca]
  misc_feature (175)..(307): NCBI GI NO: 17221665 NR Description: circumsporozoite protein
  misc_feature (100)..(331): NCBI GI NO: 22958408 NR Description: hypothetical protein [Rhodobacter sphaeroides]
  misc_feature (185)..(305): NCBI GI NO: 3850816 NR Description: U2 snRNP auxiliary factor, small subunit
  misc_feature (97)..(97): Xaa is any aa, unknown or other
ARDHYLEHPNRKTIQAIASAHRQPKPTGHHHYATPIAMAATTPAPPSHGGGRNGTLPTPLPSNESFSKFFESWISEQSRDLEELRAAASADPPAPEXRAPAPRGPGARPLRAVLPRQGGGRGRRRALHVHPVLDLHHREPLPLVRRLAPHRRDPAAVHQVRDAAAAPAPRLPRRRGPQGRPRRPRRRAAPGRRPAAAPHHPEGARDRGRRRERTGSADDGDDGGARGRRREGGGGHGPGDAGEGGGDEAGAGDGGRAAPRDDARGGGAAPPRAGRALPPRRRRAPPRRARLRAPQGRPRRQRRRRRAAGVTDAGARETITGLPACLAALLLLVSCSWGAPCSKRRMAAPARARAFVAPDVALVA

SEQ ID NO: 40359 - protein, 327 aa, Zea mays subsp. mays
  peptide (1)..(327): Ceres Seq. ID no. 12419089
  misc_feature (189)..(327): Pfam Name: Pfam Description:  MARCKS family
  misc_feature (130)..(269): NCBI GI NO: 29829093 NR Description: putative translation initiation factor IF-2
  misc_feature (47)..(270): NCBI GI NO: 29247944 NR Description: GLP_26_54603_52153 [Giardia lamblia ATCC 50803]
  misc_feature (58)..(287): NCBI GI NO: 23018055 NR Description: hypothetical protein [Thermobifida fusca]
  misc_feature (169)..(286): NCBI GI NO: 29367367 NR Description: calmodulin-related protein
  misc_feature (62)..(279): NCBI GI NO: 23018055 NR Description: hypothetical protein [Thermobifida fusca]
  misc_feature (56)..(256): NCBI GI NO: 7494125 NR Description: myosin-IA - Acanthamoeba castellanii
  misc_feature (1)..(294): NCBI GI NO: 23019271 NR Description: hypothetical protein [Thermobifida fusca]
  misc_feature (138)..(270): NCBI GI NO: 17221665 NR Description: circumsporozoite protein
  misc_feature (63)..(294): NCBI GI NO: 22958408 NR Description: hypothetical protein [Rhodobacter sphaeroides]
  misc_feature (148)..(268): NCBI GI NO: 3850816 NR Description: U2 snRNP auxiliary factor, small subunit
  misc_feature (60)..(60): Xaa is any aa, unknown or other
MAATTPAPPSHGGGRNGTLPTPLPSNESFSKFFESWISEQSRDLEELRAAASADPPAPEXRAPAPRGPGARPLRAVLPRQGGGRGRRRALHVHPVLDLHHREPLPLVRRLAPHRRDPAAVHQVRDAAAAPAPRLPRRRGPQGRPRRPRRRAAPGRRPAAAPHHPEGARDRGRRRERTGSADDGDDGGARGRRREGGGGHGPGDAGEGGGDEAGAGDGGRAAPRDDARGGGAAPPRAGRALPPRRRRAPPRRARLRAPQGRPRRQRRRRRAAGVTDAGARETITGLPACLAALLLLVSCSWGAPCSKRRMAAPARARAFVAPDVALVA

SEQ ID NO: 40360 - protein, 182 aa, Zea mays subsp. mays
  peptide (1)..(182): Ceres Seq. ID no. 12419090
  misc_feature (1)..(181): NCBI GI NO: 34896008 NR Description: ESTs AU057825
  misc_feature (1)..(177): NCBI GI NO: 688423 NR Description: tumor-related protein
  misc_feature (1)..(171): NCBI GI NO: 30694832 NR Description: tumor-related protein-like [Arabidopsis thaliana]
  misc_feature (1)..(179): NCBI GI NO: 15233979 NR Description: putative protein; protein id: At4g18690.1
  misc_feature (1)..(179): NCBI GI NO: 15233977 NR Description: putative protein; protein id: At4g18680.1
  misc_feature (1)..(171): NCBI GI NO: 15231945 NR Description: hypothetical protein; protein id: At3g14880.1
  misc_feature (1)..(171): NCBI GI NO: 8777471 NR Description: tumor-related protein-like [Arabidopsis thaliana]
  misc_feature (47)..(171): NCBI GI NO: 15233972 NR Description: putative protein; protein id: At4g18660.1
  misc_feature (1)..(46): NCBI GI NO: 15233972 NR Description: putative protein; protein id: At4g18660.1
  misc_feature (61)..(173): NCBI GI NO: 34905698 NR Description: P0552C05.19
MFTPSWTSTTENLYLWCGGWRPTAAIQLLYTKSGMQLQHQLPAFLDGGGLKDDLGDLGAAQLQAADQLQRRTIRREREIEDAAASAQEALTTATMVELAGGGGREAGAMDREMQAKAEGMRRVLEMADALRLETMREVVALLRPAQAVHFLLAAAELHLAVHDFGRRKDGRAGNVAAAAPPE

SEQ ID NO: 40361 - DNA, 1651 bp, Zea mays subsp. mays
  misc_feature (1)..(1651): Ceres Seq. ID no. 12435629
gtcaactaaactctagccagtgagtcgatgatgggtcggacgggtgacggccgccgccgcgacgtcgacggccggctggaggcgctgctctctggcgccggcggcgaggagccgtggctccggcgcgtggcgctcgcgacggctctggagctgcggctgctggcgccctggccgcgccggccgtggtggtctacatgctcatcatcgtcatgtcgtcgaccacgcagatcgtgtgcggccagctcggcaacgtccagctcgccgccgcctccctcggcaacaacggcatccaggtcttcgcctacggcatcatgctggggatgggcagcgcggtggagacgctgtgcgggcaggcgtacggcgccgagaagtacgagatgctgggcgtgtacctgcagcgctcgacggtgctgctcacggccaccggcgtgccgctcgccgccgtgtacgcgctgtcggagccgctgctgctgctgctggggcagtcgcctgagatcgccggcgccgccgccgagttcgcctacggcctcgtcccgcagatcttcgcgtacgccgccaacttccccatccagaagttcctgcaggcgcagagcatcgtggcgcccagcgcctacatcctggcggccagcttcgcgctccacgtgccgctcagctggctcgccgtctacgggctgggcctcggcctgctcggggcctcgctcacgctcagcctcacgtggtgggtgctggtcctggcccagttcgcgtacatcgtgtggagcccgcgctgccgggccacctggaccgggtttacgtgggctgccttcgccgacctgcccgggttcgccggcctgtccgcggcgtcggctgtcatgctggcgctcgaggtctggtacttccaggtgctcatcctcctcgccggcgtgctgcctgacccgcagatcgctctggactcgctaacggtctgcacgtcgatccagtcatgggtgttcatgatctctgtgggcttcaatgcagctgccagcgtgagggttgggaatgagctgggcgccggcaaccccaggtccgccgcgttctctgcgtgggtggtcaccgccctgtcggcgttcgtctctgggatagctggcctcgtcactttcctgctcagggacaagctcagctacatcttcaccggtggcgaggccgtctcgcgcgccgtcgtcgacttgtgcccgctgctcgttgggaccattgtgctctgcgggatccagcccgtgctatcaggtgtggccgttggctgcgggtggcaagccatggttgcctacatcaacgtcggatgctactacttcatcggcgtacccctcgggcgtgctcctcggattcaagttcggtttcgggatcaagggactgtggggaggcatgattgggggtaccctcatccaaacacttgctttgatctggatcacgttaagaactgactggaacaaggaggtcgaggaagcgcggaaaagattggataagtgggacgacacaaggcagcctcttctcgcaagcaaggagtgatgtatgatggtacaggagtggatgaagaagattcagtaggcttctgctagctgatccagtctgaaatcatcttgtagtcgccaccgctaactgcaattcagggatgtactaatgcagagcttctctgggc

SEQ ID NO: 40362 - protein, 413 aa, Zea mays subsp. mays
  peptide (1)..(413): Ceres Seq. ID no. 12435630
  misc_feature (1)..(377): NCBI GI NO: 34901880 NR Description: putative Multidrug resistance protein norM
  misc_feature (333)..(413): NCBI GI NO: 34901880 NR Description: putative Multidrug resistance protein norM
  misc_feature (1)..(377): NCBI GI NO: 15233127 NR Description: integral membrane protein, putative
  misc_feature (1)..(377): NCBI GI NO: 20466556 NR Description: integral membrane protein, putative
  misc_feature (1)..(377): NCBI GI NO: 15221073 NR Description: unknown protein; protein id: At1g11670.1
  misc_feature (1)..(377): NCBI GI NO: 22655139 NR Description: unknown protein [Arabidopsis thaliana]
  misc_feature (1)..(377): NCBI GI NO: 15081773 NR Description: At1g61890/F8K4_9 [Arabidopsis thaliana]
  misc_feature (1)..(377): NCBI GI NO: 18407368 NR Description: expressed protein; protein id: At1g61890
  misc_feature (1)..(377): NCBI GI NO: 18415793 NR Description: putative protein; protein id: At4g21910.1
  misc_feature (1)..(377): NCBI GI NO: 21553843 NR Description: unknown [Arabidopsis thaliana]
MLIIVMSSTTQIVCGQLGNVQLAAASLGNNGIQVFAYGIMLGMGSAVETLCGQAYGAEKYEMLGVYLQRSTVLLTATGVPLAAVYALSEPLLLLLGQSPEIAGAAAEFAYGLVPQIFAYAANFPIQKFLQAQSIVAPSAYILAASFALHVPLSWLAVYGLGLGLLGASLTLSLTWWVLVLAQFAYIVWSPRCRATWTGFTWAAFADLPGFAGLSAASAVMLALEVWYFQVLILLAGVLPDPQIALDSLTVCTSIQSWVFMISVGFNAAASVRVGNELGAGNPRSAAFSAWVVTALSAFVSGIAGLVTFLLRDKLSYIFTGGEAVSRAVVDLCPLLVGTIVLCGIQPVLSGVAVGCGWQAMVAYINVGCYYFIGVPLGRAPRIQVRFRDQGTVGRHDWGYPHPNTCFDLDHVKN

SEQ ID NO: 40363 - protein, 408 aa, Zea mays subsp. mays
  peptide (1)..(408): Ceres Seq. ID no. 12435631
  misc_feature (1)..(372): NCBI GI NO: 34901880 NR Description: putative Multidrug resistance protein norM
  misc_feature (328)..(408): NCBI GI NO: 34901880 NR Description: putative Multidrug resistance protein norM
  misc_feature (1)..(372): NCBI GI NO: 15233127 NR Description: integral membrane protein, putative
  misc_feature (1)..(372): NCBI GI NO: 20466556 NR Description: integral membrane protein, putative
  misc_feature (1)..(372): NCBI GI NO: 15221073 NR Description: unknown protein; protein id: At1g11670.1
  misc_feature (1)..(372): NCBI GI NO: 22655139 NR Description: unknown protein [Arabidopsis thaliana]
  misc_feature (1)..(372): NCBI GI NO: 15081773 NR Description: At1g61890/F8K4_9 [Arabidopsis thaliana]
  misc_feature (1)..(372): NCBI GI NO: 18407368 NR Description: expressed protein; protein id: At1g61890
  misc_feature (1)..(372): NCBI GI NO: 18415793 NR Description: putative protein; protein id: At4g21910.1
  misc_feature (1)..(372): NCBI GI NO: 21553843 NR Description: unknown [Arabidopsis thaliana]
MSSTTQIVCGQLGNVQLAAASLGNNGIQVFAYGIMLGMGSAVETLCGQAYGAEKYEMLGVYLQRSTVLLTATGVPLAAVYALSEPLLLLLGQSPEIAGAAAEFAYGLVPQIFAYAANFPIQKFLQAQSIVAPSAYILAASFALHVPLSWLAVYGLGLGLLGASLTLSLTWWVLVLAQFAYIVWSPRCRATWTGFTWAAFADLPGFAGLSAASAVMLALEVWYFQVLILLAGVLPDPQIALDSLTVCTSIQSWVFMISVGFNAAASVRVGNELGAGNPRSAAFSAWVVTALSAFVSGIAGLVTFLLRDKLSYIFTGGEAVSRAVVDLCPLLVGTIVLCGIQPVLSGVAVGCGWQAMVAYINVGCYYFIGVPLGRAPRIQVRFRDQGTVGRHDWGYPHPNTCFDLDHVKN

SEQ ID NO: 40364 - protein, 374 aa, Zea mays subsp. mays
  peptide (1)..(374): Ceres Seq. ID no. 12435632
  misc_feature (1)..(338): NCBI GI NO: 34901880 NR Description: putative Multidrug resistance protein norM
  misc_feature (294)..(374): NCBI GI NO: 34901880 NR Description: putative Multidrug resistance protein norM
  misc_feature (1)..(338): NCBI GI NO: 15233127 NR Description: integral membrane protein, putative
  misc_feature (1)..(338): NCBI GI NO: 20466556 NR Description: integral membrane protein, putative
  misc_feature (1)..(338): NCBI GI NO: 15221073 NR Description: unknown protein; protein id: At1g11670.1
  misc_feature (1)..(338): NCBI GI NO: 22655139 NR Description: unknown protein [Arabidopsis thaliana]
  misc_feature (1)..(338): NCBI GI NO: 15081773 NR Description: At1g61890/F8K4_9 [Arabidopsis thaliana]
  misc_feature (1)..(338): NCBI GI NO: 18407368 NR Description: expressed protein; protein id: At1g61890
  misc_feature (1)..(338): NCBI GI NO: 18415793 NR Description: putative protein; protein id: At4g21910.1
  misc_feature (1)..(338): NCBI GI NO: 21553843 NR Description: unknown [Arabidopsis thaliana]
MLGMGSAVETLCGQAYGAEKYEMLGVYLQRSTVLLTATGVPLAAVYALSEPLLLLLGQSPEIAGAAAEFAYGLVPQIFAYAANFPIQKFLQAQSIVAPSAYILAASFALHVPLSWLAVYGLGLGLLGASLTLSLTWWVLVLAQFAYIVWSPRCRATWTGFTWAAFADLPGFAGLSAASAVMLALEVWYFQVLILLAGVLPDPQIALDSLTVCTSIQSWVFMISVGFNAAASVRVGNELGAGNPRSAAFSAWVVTALSAFVSGIAGLVTFLLRDKLSYIFTGGEAVSRAVVDLCPLLVGTIVLCGIQPVLSGVAVGCGWQAMVAYINVGCYYFIGVPLGRAPRIQVRFRDQGTVGRHDWGYPHPNTCFDLDHVKN

SEQ ID NO: 40365 - DNA, 1784 bp, Zea mays subsp. mays
  misc_feature (1)..(1784): Ceres Seq. ID no. 15180518
actttcccagggagcgtttaattgcctccgcctgcctcgctctcgcttccttcggatgccgctctgcctctgccgcgcccgccagctgcacgcagttcagcaacgcgcgcgccacggcccgcgacgcgatgagcgagaggaggaggcgggcgagcgctgcttccctcgggggtggaggtggcggcggcgttggtggtgttgcgcctgcgcgggccgaggaggacaaggtcgcggcgccgggtaaagcgcctccgccgacggtgtggttcgcgttcaagcggtcgctgcactgccgctccgagccgtcggaggtccacgtgccgcgtgccaaggccggtcccgtcgcgggcgggggcgccggcgcggctgtcggcggcggccacctgtcgtcgatcgtcaccaagcgcgccgcgcggtcggggtgctcgcgctccatcgccaacctccgggacgtcatccacgggagcaagcgccacccggggcagccgcccagctgcagcccgcggtccatcggcagcagcgagttcctcaaccccattgcacacgaggtcgtgctcagcaccaactcccgctgcgagctcaagatcaccggcttcggcggctgcggggggctggcggccgtcggggtggggaccggcgccgcgaacgacgccgacggcgggggcgacggcggcgtcgtgtcgtcgttcgtcggcacgctccgccctggcacgccgggcccagcgtgggccggacacggactgccgtacagcggctccgtgcggggcagcgtgcgctgcacgccgccgaggtcgccgaacgtgatgctcgagaggaatggctcagtggtgaacggccaccgcgcgtcatgcgacgaaaccgctaaaaacggcgccagcaagggctccggtgggctcagctgccacaagtgcggcgagcagttcagcaagtgggaggcgctggaggcgcaccacctctccaaacacgcagtgacggagctggtggaaggggactcgtcgcggaagatcgtggagatcatctgccggacgagcctgctcaagtcggagagcagctgcgtccggatcgagcgcgtgttcaaggtgcacaacacgcagcggacgctgtcccgcttcgaggagtaccgcgaggccgtgaagctcaaggcgagcaagctagccaagaagcacccgcgctgcctcgccgacggcaacgagctgctgcgcttccacggcgccacgctctcgtgcgcgctcggcggcggctccggctcttccagcctctgcgcctccgacaagtgcgccgtgtgccgcatcatccggcacggcttctccgccaggaaggagggcaagggcggcgtgggcgtgttcaccacgtccaccagcggccgcgcgttcgagtccatcgttgaggcgccccccgccatcggcgtcggcgacgacgacggagcgggccagctgggcctgggcaccgcgcgcagggcgctgctggtgtgcagggtcatcgccggccgcgtgcacaagccgctggacaacctcaaggagttcgtggggcagacgggcttcgattcgctcgccggcaaggtcggaccctactccaacatcgaggagctgtacctgctgaacccgagggcgctgctcccgtgcttcgtcgtcatctgtagaccgtagcctactactagctaaacacaccgtctcattcttctctcttcccacttttctctttcgattgctactctagtgtacgtagttaacacggacacggcatagctatcgcctatcggttggaaggtcggatggatttgtcct

SEQ ID NO: 40366 - protein, 547 aa, Zea mays subsp. mays
  peptide (1)..(547): Ceres Seq. ID no. 15180519
  misc_feature (298)..(321): Pfam Name: Pfam Description:  Zinc finger, C2H2 type
  misc_feature (43)..(546): NCBI GI NO: 34910152 NR Description: B1070A12.19
  misc_feature (85)..(547): NCBI GI NO: 15239695 NR Description: expressed protein [Arabidopsis thaliana]
  misc_feature (227)..(547): NCBI GI NO: 18416951 NR Description: expressed protein [Arabidopsis thaliana]
  misc_feature (85)..(211): NCBI GI NO: 18416951 NR Description: expressed protein [Arabidopsis thaliana]
  misc_feature (294)..(547): NCBI GI NO: 15220394 NR Description: hypothetical protein [Arabidopsis thaliana]
  misc_feature (299)..(544): NCBI GI NO: 15222333 NR Description: expressed protein [Arabidopsis thaliana]
  misc_feature (299)..(544): NCBI GI NO: 9802582 NR Description: T2E6.3 [Arabidopsis thaliana]
  misc_feature (294)..(520): NCBI GI NO: 6554199 NR Description: T23J18.16 [Arabidopsis thaliana]
  misc_feature (299)..(544): NCBI GI NO: 15220992 NR Description: reverse transcriptase-related
  misc_feature (299)..(546): NCBI GI NO: 5777616 NR Description: CAA30374.1 protein [Oryza sativa]
FPRERLIASACLALASFGCRSASAAPASCTQFSNARATARDAMSERRRRASAASLGGGGGGGVGGVAPARAEEDKVAAPGKAPPPTVWFAFKRSLHCRSEPSEVHVPRAKAGPVAGGGAGAAVGGGHLSSIVTKRAARSGCSRSIANLRDVIHGSKRHPGQPPSCSPRSIGSSEFLNPIAHEVVLSTNSRCELKITGFGGCGGLAAVGVGTGAANDADGGGDGGVVSSFVGTLRPGTPGPAWAGHGLPYSGSVRGSVRCTPPRSPNVMLERNGSVVNGHRASCDETAKNGASKGSGGLSCHKCGEQFSKWEALEAHHLSKHAVTELVEGDSSRKIVEIICRTSLLKSESSCVRIERVFKVHNTQRTLSRFEEYREAVKLKASKLAKKHPRCLADGNELLRFHGATLSCALGGGSGSSSLCASDKCAVCRIIRHGFSARKEGKGGVGVFTTSTSGRAFESIVEAPPAIGVGDDDGAGQLGLGTARRALLVCRVIAGRVHKPLDNLKEFVGQTGFDSLAGKVGPYSNIEELYLLNPRALLPCFVVICRP

SEQ ID NO: 40367 - protein, 505 aa, Zea mays subsp. mays
  peptide (1)..(505): Ceres Seq. ID no. 15180520
  misc_feature (256)..(279): Pfam Name: Pfam Description:  Zinc finger, C2H2 type
  misc_feature (1)..(504): NCBI GI NO: 34910152 NR Description: B1070A12.19
  misc_feature (43)..(505): NCBI GI NO: 15239695 NR Description: expressed protein [Arabidopsis thaliana]
  misc_feature (185)..(505): NCBI GI NO: 18416951 NR Description: expressed protein [Arabidopsis thaliana]
  misc_feature (43)..(169): NCBI GI NO: 18416951 NR Description: expressed protein [Arabidopsis thaliana]
  misc_feature (252)..(505): NCBI GI NO: 15220394 NR Description: hypothetical protein [Arabidopsis thaliana]
  misc_feature (257)..(502): NCBI GI NO: 15222333 NR Description: expressed protein [Arabidopsis thaliana]
  misc_feature (257)..(502): NCBI GI NO: 9802582 NR Description: T2E6.3 [Arabidopsis thaliana]
  misc_feature (252)..(478): NCBI GI NO: 6554199 NR Description: T23J18.16 [Arabidopsis thaliana]
  misc_feature (257)..(502): NCBI GI NO: 15220992 NR Description: reverse transcriptase-related
  misc_feature (257)..(504): NCBI GI NO: 5777616 NR Description: CAA30374.1 protein [Oryza sativa]
MSERRRRASAASLGGGGGGGVGGVAPARAEEDKVAAPGKAPPPTVWFAFKRSLHCRSEPSEVHVPRAKAGPVAGGGAGAAVGGGHLSSIVTKRAARSGCSRSIANLRDVIHGSKRHPGQPPSCSPRSIGSSEFLNPIAHEVVLSTNSRCELKITGFGGCGGLAAVGVGTGAANDADGGGDGGVVSSFVGTLRPGTPGPAWAGHGLPYSGSVRGSVRCTPPRSPNVMLERNGSVVNGHRASCDETAKNGASKGSGGLSCHKCGEQFSKWEALEAHHLSKHAVTELVEGDSSRKIVEIICRTSLLKSESSCVRIERVFKVHNTQRTLSRFEEYREAVKLKASKLAKKHPRCLADGNELLRFHGATLSCALGGGSGSSSLCASDKCAVCRIIRHGFSARKEGKGGVGVFTTSTSGRAFESIVEAPPAIGVGDDDGAGQLGLGTARRALLVCRVIAGRVHKPLDNLKEFVGQTGFDSLAGKVGPYSNIEELYLLNPRALLPCFVVICRP

SEQ ID NO: 40368 - protein, 280 aa, Zea mays subsp. mays
  peptide (1)..(280): Ceres Seq. ID no. 15180521
  misc_feature (31)..(54): Pfam Name: Pfam Description:  Zinc finger, C2H2 type
  misc_feature (1)..(279): NCBI GI NO: 34910152 NR Description: B1070A12.19
  misc_feature (1)..(280): NCBI GI NO: 15239695 NR Description: expressed protein [Arabidopsis thaliana]
  misc_feature (1)..(280): NCBI GI NO: 18416951 NR Description: expressed protein [Arabidopsis thaliana]
  misc_feature (27)..(280): NCBI GI NO: 15220394 NR Description: hypothetical protein [Arabidopsis thaliana]
  misc_feature (32)..(277): NCBI GI NO: 15222333 NR Description: expressed protein [Arabidopsis thaliana]
  misc_feature (32)..(277): NCBI GI NO: 9802582 NR Description: T2E6.3 [Arabidopsis thaliana]
  misc_feature (27)..(253): NCBI GI NO: 6554199 NR Description: T23J18.16 [Arabidopsis thaliana]
  misc_feature (32)..(277): NCBI GI NO: 15220992 NR Description: reverse transcriptase-related
  misc_feature (32)..(279): NCBI GI NO: 5777616 NR Description: CAA30374.1 protein [Oryza sativa]
  misc_feature (56)..(280): NCBI GI NO: 38346001 NR Description: OSJNBa0073L13.11
MLERNGSVVNGHRASCDETAKNGASKGSGGLSCHKCGEQFSKWEALEAHHLSKHAVTELVEGDSSRKIVEIICRTSLLKSESSCVRIERVFKVHNTQRTLSRFEEYREAVKLKASKLAKKHPRCLADGNELLRFHGATLSCALGGGSGSSSLCASDKCAVCRIIRHGFSARKEGKGGVGVFTTSTSGRAFESIVEAPPAIGVGDDDGAGQLGLGTARRALLVCRVIAGRVHKPLDNLKEFVGQTGFDSLAGKVGPYSNIEELYLLNPRALLPCFVVICRP

SEQ ID NO: 40369 - DNA, 1483 bp, Zea mays subsp. mays
  misc_feature (1)..(1483): Ceres Seq. ID no. 12391498
atgttggccgccaatcgcagtatcggcaccgttcttccccgcttctccagtccagctcaccagccgccccccctccgctgctgacactgcgaagtgcgaatcaaagccaccaccgcgcagaaaccatggcaccggtggaagcggagcagcaccggcggagggcgctggcgctcgcggcgcacgacgcctccggcgccgtctcccccatccgcatctcgcgaagggacactggagatgacgatgttgccatacagatactgtactgcgggatatgccactctgacctgcacaccatcaagaacgagtggaagaacgccaactatcctgttgtccctgggcacgagatcgccgggctgatcaccgaggttggcaagaatgtgaagaggttcaacgtcggagacaaggttggcgtcgggtgcatggtcaacacatgccagtcctgcgagagctgcgagggagggcacgagaactactgctccaagatcatcttcacctacaactcccacgacagggacggcaccgtcacctacggtggctactctgacatggttgtcgtcgacgagcgcttcgtcatccggttccctgatggcatgcccctcgacagaggcgcgccgctgctctgcgctgggataaccgtgtacaaccccatgaagcaccacgggctgaacgaggcaggcaagcacatcggcgtggttggacttggggggcttgggcatgtcgccgtgaagttcgcgaaggcgttcgggatgagggtgaccgtgatcagcacgtccccggggaagagggaggaagctatggagacgcttggtgcggacgcctttgttgtcagcagtgatgctaaccagatgaaggcggcgaagggcacaatggatggcattatgaacacggcctccgcaagcatgtccatgtacgcttaccttgctctcctcaagccccagggcaagatgatcctgcttggcctgcctgagaagcctctgcagatctccgccttctctttggttactgggggcaagactctggccgggagctgcatggggagcatcagggacacgcaggagatgatggacttcgcagccaagcacgggttgacagcggacatcgaactgatcggcaccgaagaagttaatgaggccatggaacgcctcgccaagggcgaggtcaggtaccgcttcgtcatcgacatcggcaacaccatcagcgcggcatcactagggagctcgccggtcccagctctgtagctgcgacacttgttcctgcttggatatatcgtgcgataagcaagtatatttggaataaaaaggaactcaatttaaacgcaagtaatactgtttgtctttggtcctatttgggctttggtttattgggtactgcatagttttgccctcctcttgtagtctagtagtaacggatcaaacgttttttactgagagagacaaaaccagtccgtgctgctgaattaaggacacaaatttaaaaatccctt

SEQ ID NO: 40370 - protein, 411 aa, Zea mays subsp. mays
  peptide (1)..(411): Ceres Seq. ID no. 12391499
  misc_feature (49)..(283): NCBI GI NO: 38568021 NR Description: OSJNBa0070C17.13
  misc_feature (283)..(398): NCBI GI NO: 38568021 NR Description: OSJNBa0070C17.13
  misc_feature (42)..(398): NCBI GI NO: 19849248 NR Description: cinnamyl alcohol dehydrogenase [Lolium perenne]
  misc_feature (45)..(402): NCBI GI NO: 37534606 NR Description: putative cinnamyl alcohol dehydrogenase
  misc_feature (42)..(400): NCBI GI NO: 14279694 NR Description: sinapyl alcohol dehydrogenase
  misc_feature (50)..(400): NCBI GI NO: 10720090 NR Description: Probable mannitol dehydrogenase
  misc_feature (42)..(400): NCBI GI NO: 33519154 NR Description: 10-hydroxygeraniol oxidoreductase
  misc_feature (48)..(403): NCBI GI NO: 22475166 NR Description: putative sinapyl alcohol dehydrogenase
  misc_feature (53)..(400): NCBI GI NO: 10720088 NR Description: Probable mannitol dehydrogenase
  misc_feature (42)..(399): NCBI GI NO: 15235022 NR Description: cinnamyl-alcohol dehydrogenase CAD1
VGRQSQYRHRSSPLLQSSSPAAPPPLLTLRSANQSHHRAETMAPVEAEQHRRRALALAAHDASGAVSPIRISRRDTGDDDVAIQILYCGICHSDLHTIKNEWKNANYPVVPGHEIAGLITEVGKNVKRFNVGDKVGVGCMVNTCQSCESCEGGHENYCSKIIFTYNSHDRDGTVTYGGYSDMVVVDERFVIRFPDGMPLDRGAPLLCAGITVYNPMKHHGLNEAGKHIGVVGLGGLGHVAVKFAKAFGMRVTVISTSPGKREEAMETLGADAFVVSSDANQMKAAKGTMDGIMNTASASMSMYAYLALLKPQGKMILLGLPEKPLQISAFSLVTGGKTLAGSCMGSIRDTQEMMDFAAKHGLTADIELIGTEEVNEAMERLAKGEVRYRFVIDIGNTISAASLGSSPVPAL

SEQ ID NO: 40371 - protein, 370 aa, Zea mays subsp. mays
  peptide (1)..(370): Ceres Seq. ID no. 12391500
  misc_feature (8)..(242): NCBI GI NO: 38568021 NR Description: OSJNBa0070C17.13
  misc_feature (242)..(357): NCBI GI NO: 38568021 NR Description: OSJNBa0070C17.13
  misc_feature (1)..(357): NCBI GI NO: 19849248 NR Description: cinnamyl alcohol dehydrogenase [Lolium perenne]
  misc_feature (4)..(361): NCBI GI NO: 37534606 NR Description: putative cinnamyl alcohol dehydrogenase
  misc_feature (1)..(359): NCBI GI NO: 14279694 NR Description: sinapyl alcohol dehydrogenase
  misc_feature (9)..(359): NCBI GI NO: 10720090 NR Description: Probable mannitol dehydrogenase
  misc_feature (1)..(359): NCBI GI NO: 33519154 NR Description: 10-hydroxygeraniol oxidoreductase
  misc_feature (7)..(362): NCBI GI NO: 22475166 NR Description: putative sinapyl alcohol dehydrogenase
  misc_feature (12)..(359): NCBI GI NO: 10720088 NR Description: Probable mannitol dehydrogenase
  misc_feature (1)..(358): NCBI GI NO: 15235022 NR Description: cinnamyl-alcohol dehydrogenase CAD1
MAPVEAEQHRRRALALAAHDASGAVSPIRISRRDTGDDDVAIQILYCGICHSDLHTIKNEWKNANYPVVPGHEIAGLITEVGKNVKRFNVGDKVGVGCMVNTCQSCESCEGGHENYCSKIIFTYNSHDRDGTVTYGGYSDMVVVDERFVIRFPDGMPLDRGAPLLCAGITVYNPMKHHGLNEAGKHIGVVGLGGLGHVAVKFAKAFGMRVTVISTSPGKREEAMETLGADAFVVSSDANQMKAAKGTMDGIMNTASASMSMYAYLALLKPQGKMILLGLPEKPLQISAFSLVTGGKTLAGSCMGSIRDTQEMMDFAAKHGLTADIELIGTEEVNEAMERLAKGEVRYRFVIDIGNTISAASLGSSPVPAL

SEQ ID NO: 40372 - protein, 272 aa, Zea mays subsp. mays
  peptide (1)..(272): Ceres Seq. ID no. 12391501
  misc_feature (1)..(144): NCBI GI NO: 38568021 NR Description: OSJNBa0070C17.13
  misc_feature (144)..(259): NCBI GI NO: 38568021 NR Description: OSJNBa0070C17.13
  misc_feature (1)..(259): NCBI GI NO: 19849248 NR Description: cinnamyl alcohol dehydrogenase [Lolium perenne]
  misc_feature (1)..(263): NCBI GI NO: 37534606 NR Description: putative cinnamyl alcohol dehydrogenase
  misc_feature (1)..(261): NCBI GI NO: 14279694 NR Description: sinapyl alcohol dehydrogenase
  misc_feature (1)..(261): NCBI GI NO: 10720090 NR Description: Probable mannitol dehydrogenase
  misc_feature (1)..(261): NCBI GI NO: 33519154 NR Description: 10-hydroxygeraniol oxidoreductase
  misc_feature (1)..(264): NCBI GI NO: 22475166 NR Description: putative sinapyl alcohol dehydrogenase
  misc_feature (1)..(261): NCBI GI NO: 10720088 NR Description: Probable mannitol dehydrogenase
  misc_feature (1)..(260): NCBI GI NO: 15235022 NR Description: cinnamyl-alcohol dehydrogenase CAD1
MVNTCQSCESCEGGHENYCSKIIFTYNSHDRDGTVTYGGYSDMVVVDERFVIRFPDGMPLDRGAPLLCAGITVYNPMKHHGLNEAGKHIGVVGLGGLGHVAVKFAKAFGMRVTVISTSPGKREEAMETLGADAFVVSSDANQMKAAKGTMDGIMNTASASMSMYAYLALLKPQGKMILLGLPEKPLQISAFSLVTGGKTLAGSCMGSIRDTQEMMDFAAKHGLTADIELIGTEEVNEAMERLAKGEVRYRFVIDIGNTISAASLGSSPVPAL

SEQ ID NO: 40373 - DNA, 599 bp, Zea mays subsp. mays; identical to SEQ ID NO: 30524
  misc_feature (1)..(599): Ceres Seq. ID no. 12381635

SEQ ID NO: 40374 - protein, 199 aa, Zea mays subsp. mays; identical to SEQ ID NO: 30525
  peptide (1)..(199): Ceres Seq. ID no. 12381636
  misc_feature (38)..(198): Pfam Name: Pfam Description:  Protein kinase domain
  misc_feature (34)..(198): NCBI GI NO: 7446429 NR Description: probable serine/threonine-specific protein kinase
  misc_feature (34)..(198): NCBI GI NO: 37536914 NR Description: protein kinase REK
  misc_feature (34)..(198): NCBI GI NO: 7446428 NR Description: probable serine/threonine-specific protein kinase
  misc_feature (34)..(198): NCBI GI NO: 1362050 NR Description: serine/threonine-specific protein kinase SPK-1
  misc_feature (34)..(198): NCBI GI NO: 3811293 NR Description: putative serine/threonine protein kinase
  misc_feature (34)..(198): NCBI GI NO: 310580 NR Description: protein kinase 2
  misc_feature (36)..(198): NCBI GI NO: 1362051 NR Description: protein kinase SPK-3 (EC 2.7.1.-) - soybean
  misc_feature (36)..(198): NCBI GI NO: 29164823 NR Description: abcisic acid-inducible protein kinanase
  misc_feature (36)..(198): NCBI GI NO: 34906840 NR Description: putative protein kinase HvPKABA1
  misc_feature (31)..(198): NCBI GI NO: 15240124 NR Description: protein kinase, 41K (EC 2

SEQ ID NO: 40375 - protein, 166 aa, Zea mays subsp. mays; identical to SEQ ID NO: 30526
  peptide (1)..(166): Ceres Seq. ID no. 12381637
  misc_feature (5)..(165): Pfam Name: Pfam Description:  Protein kinase domain
  misc_feature (1)..(165): NCBI GI NO: 7446429 NR Description: probable serine/threonine-specific protein kinase
  misc_feature (1)..(165): NCBI GI NO: 37536914 NR Description: protein kinase REK
  misc_feature (1)..(165): NCBI GI NO: 7446428 NR Description: probable serine/threonine-specific protein kinase
  misc_feature (1)..(165): NCBI GI NO: 1362050 NR Description: serine/threonine-specific protein kinase SPK-1
  misc_feature (1)..(165): NCBI GI NO: 3811293 NR Description: putative serine/threonine protein kinase
  misc_feature (1)..(165): NCBI GI NO: 310580 NR Description: protein kinase 2
  misc_feature (3)..(165): NCBI GI NO: 1362051 NR Description: protein kinase SPK-3 (EC 2.7.1.-) - soybean
  misc_feature (3)..(165): NCBI GI NO: 29164823 NR Description: abcisic acid-inducible protein kinanase
  misc_feature (3)..(165): NCBI GI NO: 34906840 NR Description: putative protein kinase HvPKABA1
  misc_feature (1)..(165): NCBI GI NO: 15240124 NR Description: protein kinase, 41K (EC 2

SEQ ID NO: 40376 - DNA, 1675 bp, Zea mays subsp. mays
  misc_feature (1)..(1675): Ceres Seq. ID no. 12369580
cttggtcaatgggagtggctgaggctggcgtgcggacctaaaatccccactgatatatctgcccatgcccaggcattggatctcgtccccaatggcaatgcgtcaccagttcggggcttcggtgctgctgcatctactggtgttagcgggggcgggggccatggtcactgctgaccaggagagcgaccggatccgcgagctcccgggccagccgccgaacgtggggttctcgcagtactccggctacgtcaccgtcaacccggcgcgggggcgcgcgctcttctactggctcgtggaggcggtgccggcggccgggcccatcgcgccgctcgtcctctggctcaacggcggccctggatgctcgtcagtcggctacggcgcgtccgaggaggtcggcccgttccgcatcaggccggacggccagactctctacctcaaccccaattcttggaacaaggcggccaatttgctcttcctggagtcgccggccggcgtggggttctcgtactcgaactcgtcgctggatctgtacaccgcaggagatgcaaagacagcactggatgcctacgcttttcttgtgaactggttggagagattcccacagtacaagtacagggagttctatattgctggggaaagttacgcgggtcactacgttccacagttagcccagctcatatatgaaaagaacaagggcattcagaatccaacaattaatttcaaaggattcatggtgggcaatgcagtcactgatgactaccatgattaccttggtacctttgagttttggtggactcatggtctgatctctgacaagacttatcacaacttgaaggcgacatgtttgcttgaatcctcacagcacccttcacctgactgtgtcaagaacttgaatctagccagtgctgaagaaggcaatattgatccttatagtctgaatacaaagccatgcaatgacaccgcctctctcaagcttggcttgggtggacgctacccttggttgtccagagcctatgatccttgtactgaaagatatgcaagtatttactacaacaggccagaagtgcagatggcattgcatgcaaatacaactggaattcattacccttggcaaacatgcagcgatattgttggatcctactgggctgattccccaagatctatgcttccaatctaccaagaactgatagcagctggtatcaagatctgggttttcagtggggacacggatgctgtagttcctgtaactgcgacaaggtactcaatagatgctctcaagcttccaacactggtaaattggtacccttggtatgaccatgggaaggttggaggttggagccaagtttacaaaggactaacccttataaccatagcaggtgcaggacatgaagtgccactgcaccggcctcgacaagctttgatcatgttcagacacttcttgcagaacaaaccgatgccagcacaatagccagtcgaagcagaaatatagtgtaaactaccacagtcatgtttaatattttttaaattcttttttacttgatttgattgttattgttacaacatattgttcaattatctcgattgaatgtatgtacgcccagtagcaaatagggatacctgaaatttgtactgctggagctaaagagctccgctgtatatgataatgatgatcttt

SEQ ID NO: 40377 - protein, 467 aa, Zea mays subsp. mays
  peptide (1)..(467): Ceres Seq. ID no. 12369581
  misc_feature (10)..(467): NCBI GI NO: 34908012 NR Description: putative carboxypeptidase D
  misc_feature (37)..(465): NCBI GI NO: 15231911 NR Description: putative serine carboxypeptidase II
  misc_feature (25)..(465): NCBI GI NO: 15227493 NR Description: putative serine carboxypeptidase II
  misc_feature (22)..(467): NCBI GI NO: 7428204 NR Description: carboxypeptidase D (EC 3
  misc_feature (22)..(467): NCBI GI NO: 20455471 NR Description: Serine carboxypeptidase II precursor
  misc_feature (51)..(467): NCBI GI NO: 7428205 NR Description: carboxypeptidase D (EC 3.4.16.6) - wheat
  misc_feature (10)..(465): NCBI GI NO: 13877871 NR Description: putative serine carboxypeptidase II
  misc_feature (10)..(465): NCBI GI NO: 15234795 NR Description: SERINE CARBOXYPEPTIDASE II-like protein
  misc_feature (10)..(465): NCBI GI NO: 15232847 NR Description: putative serine carboxypeptidase II
  misc_feature (2)..(415): NCBI GI NO: 4539657 NR Description: serine-type carboxypeptidase [Sorghum bicolor]
MPRHWISSPMAMRHQFGASVLLHLLVLAGAGAMVTADQESDRIRELPGQPPNVGFSQYSGYVTVNPARGRALFYWLVEAVPAAGPIAPLVLWLNGGPGCSSVGYGASEEVGPFRIRPDGQTLYLNPNSWNKAANLLFLESPAGVGFSYSNSSLDLYTAGDAKTALDAYAFLVNWLERFPQYKYREFYIAGESYAGHYVPQLAQLIYEKNKGIQNPTINFKGFMVGNAVTDDYHDYLGTFEFWWTHGLISDKTYHNLKATCLLESSQHPSPDCVKNLNLASAEEGNIDPYSLNTKPCNDTASLKLGLGGRYPWLSRAYDPCTERYASIYYNRPEVQMALHANTTGIHYPWQTCSDIVGSYWADSPRSMLPIYQELIAAGIKIWVFSGDTDAVVPVTATRYSIDALKLPTLVNWYPWYDHGKVGGWSQVYKGLTLITIAGAGHEVPLHRPRQALIMFRHFLQNKPMPAQ

SEQ ID NO: 40378 - protein, 458 aa, Zea mays subsp. mays
  peptide (1)..(458): Ceres Seq. ID no. 12369582
  misc_feature (1)..(458): NCBI GI NO: 34908012 NR Description: putative carboxypeptidase D
  misc_feature (28)..(456): NCBI GI NO: 15231911 NR Description: putative serine carboxypeptidase II
  misc_feature (16)..(456): NCBI GI NO: 15227493 NR Description: putative serine carboxypeptidase II
  misc_feature (13)..(458): NCBI GI NO: 7428204 NR Description: carboxypeptidase D (EC 3
  misc_feature (13)..(458): NCBI GI NO: 20455471 NR Description: Serine carboxypeptidase II precursor
  misc_feature (42)..(458): NCBI GI NO: 7428205 NR Description: carboxypeptidase D (EC 3.4.16.6) - wheat
  misc_feature (1)..(456): NCBI GI NO: 13877871 NR Description: putative serine carboxypeptidase II
  misc_feature (1)..(456): NCBI GI NO: 15234795 NR Description: SERINE CARBOXYPEPTIDASE II-like protein
  misc_feature (1)..(456): NCBI GI NO: 15232847 NR Description: putative serine carboxypeptidase II
  misc_feature (1)..(406): NCBI GI NO: 4539657 NR Description: serine-type carboxypeptidase [Sorghum bicolor]
MAMRHQFGASVLLHLLVLAGAGAMVTADQESDRIRELPGQPPNVGFSQYSGYVTVNPARGRALFYWLVEAVPAAGPIAPLVLWLNGGPGCSSVGYGASEEVGPFRIRPDGQTLYLNPNSWNKAANLLFLESPAGVGFSYSNSSLDLYTAGDAKTALDAYAFLVNWLERFPQYKYREFYIAGESYAGHYVPQLAQLIYEKNKGIQNPTINFKGFMVGNAVTDDYHDYLGTFEFWWTHGLISDKTYHNLKATCLLESSQHPSPDCVKNLNLASAEEGNIDPYSLNTKPCNDTASLKLGLGGRYPWLSRAYDPCTERYASIYYNRPEVQMALHANTTGIHYPWQTCSDIVGSYWADSPRSMLPIYQELIAAGIKIWVFSGDTDAVVPVTATRYSIDALKLPTLVNWYPWYDHGKVGGWSQVYKGLTLITIAGAGHEVPLHRPRQALIMFRHFLQNKPMPAQ

SEQ ID NO: 40379 - protein, 456 aa, Zea mays subsp. mays
  peptide (1)..(456): Ceres Seq. ID no. 12369583
  misc_feature (1)..(456): NCBI GI NO: 34908012 NR Description: putative carboxypeptidase D
  misc_feature (26)..(454): NCBI GI NO: 15231911 NR Description: putative serine carboxypeptidase II
  misc_feature (14)..(454): NCBI GI NO: 15227493 NR Description: putative serine carboxypeptidase II
  misc_feature (11)..(456): NCBI GI NO: 7428204 NR Description: carboxypeptidase D (EC 3
  misc_feature (11)..(456): NCBI GI NO: 20455471 NR Description: Serine carboxypeptidase II precursor
  misc_feature (40)..(456): NCBI GI NO: 7428205 NR Description: carboxypeptidase D (EC 3.4.16.6) - wheat
  misc_feature (1)..(454): NCBI GI NO: 13877871 NR Description: putative serine carboxypeptidase II
  misc_feature (1)..(454): NCBI GI NO: 15234795 NR Description: SERINE CARBOXYPEPTIDASE II-like protein
  misc_feature (1)..(454): NCBI GI NO: 15232847 NR Description: putative serine carboxypeptidase II
  misc_feature (1)..(404): NCBI GI NO: 4539657 NR Description: serine-type carboxypeptidase [Sorghum bicolor]
MRHQFGASVLLHLLVLAGAGAMVTADQESDRIRELPGQPPNVGFSQYSGYVTVNPARGRALFYWLVEAVPAAGPIAPLVLWLNGGPGCSSVGYGASEEVGPFRIRPDGQTLYLNPNSWNKAANLLFLESPAGVGFSYSNSSLDLYTAGDAKTALDAYAFLVNWLERFPQYKYREFYIAGESYAGHYVPQLAQLIYEKNKGIQNPTINFKGFMVGNAVTDDYHDYLGTFEFWWTHGLISDKTYHNLKATCLLESSQHPSPDCVKNLNLASAEEGNIDPYSLNTKPCNDTASLKLGLGGRYPWLSRAYDPCTERYASIYYNRPEVQMALHANTTGIHYPWQTCSDIVGSYWADSPRSMLPIYQELIAAGIKIWVFSGDTDAVVPVTATRYSIDALKLPTLVNWYPWYDHGKVGGWSQVYKGLTLITIAGAGHEVPLHRPRQALIMFRHFLQNKPMPAQ

SEQ ID NO: 40380 - DNA, 1542 bp, Zea mays subsp. mays
  misc_feature (1)..(1542): Ceres Seq. ID no. 12418920
gcacgagaccattacctagaacatcctaatcgaaaaacctaactagttgctacctagcctcgaccaggtggagcaatgggctccacggcggcggcgccctgccacatcgtggccgtgccgtacccgggccgtggtcacgtcaacgcgatgctgaacctatgccgcctcctggcagctcgagacggcgtcaccatcaccatcatcgtgaccgaggagtggctcagcctcctcggcgccccggcggcgctgccggacctcggcctgcgcgttcgctttgaggccattccaaacgtgatcccctccgagcacggccgcgccaacgacatggtcggcttcatggaggccgtgtacaccaagatggcgtcgccgttcgagcagcttctcgacaggctcgcgccgccggcgcccgcggctattgtggccgacatgttcgtgccgtggaccgtaggcgtcggcgagcggaggggcgtgcctgtgtgcatcatgtgcccgattagcgccaccatgttcgcggtgcagtacaacttccacctgctaccacccgcggcggccggcggcggcgcgtctccggatatcactggttcttgttttgttgaaaactacattcctggcacgaaatcaatcaggttcgccgatcttgcgcctacacacaccgatgcgttacttctagacaaaatccttgaagcccactcctctgtaaagaaagcacaatgtatcgtcttcaccaccttccaagagctcgagagcgacgccatcggcgctatgaggcaaaactgcccagtgtacgcagttgggccctgcgtccccttcatggcactgcaagagcacaaggccagcccagacggtgacgactacatggcgtggctggacgcacagcccgcgggctcggtgatctacgtctcgctcggcagcttcctctcggtgtccgccgcccagttcgacgagatcgccgctggcctggccgagagcaaggccaggtttctgtgggtgctccgcgacgccgacgcatgctcccgcgtgcgaggcctgatccgcgatcccgacgccggcctcatcgtgccatggacgaaccagctgagggtgctgtgccacccttcggtcggggggttcttcacccactgcggcatgaactcgacgctcgaggcggtgtacgccggcgtgcccatgctcaccctgcccatcgcgttcgaccagccgaccaatagccggctcgtcaccgaggtgtggaagaatggcattggcctcagggacatggcccgcgccgacggcgtcatcgggagaggtgagatagcctcggccgtggacaggctgatgctccctgacgcggcggagttccaggacatgaggaagcgagtgacactgtggaaggacgcggctcggactgcgtctgaagagggtggatcctcgtggaaagatgttacgtctttcatcaacttcgtttcacgttgagatctccgaatgtttacggagtcagctgtagtgaattgtgatcgattctcacggagttagtgtgatatctgaatgttagcagaatctttcggc

SEQ ID NO: 40381 - protein, 457 aa, Zea mays subsp. mays
  peptide (1)..(457): Ceres Seq. ID no. 12418921
  misc_feature (9)..(455): Pfam Name: Pfam Description:  UDP-glucoronosyl and UDP-glucosyl transferase
  misc_feature (9)..(455): NCBI GI NO: 34909048 NR Description: putative glucosyltransferase
  misc_feature (1)..(452): NCBI GI NO: 34909046 NR Description: putative glucosyltransferase
  misc_feature (10)..(456): NCBI GI NO: 15227716 NR Description: putative glucosyltransferase; protein id:At2g30140
  misc_feature (14)..(457): NCBI GI NO: 15227717 NR Description: putative glucosyltransferase; protein id:At2g30150
  misc_feature (10)..(453): NCBI GI NO: 7385017 NR Description: UDP-glucose:salicylic acid glucosyltransferase
  misc_feature (25)..(282): NCBI GI NO: 37532078 NR Description: putative glucosyltransferase
  misc_feature (10)..(453): NCBI GI NO: 15221233 NR Description: putative indole-3-acetate beta-glucosyltransferase
  misc_feature (10)..(457): NCBI GI NO: 13431605 NR Description: Limonoid UDP-glucosyltransferase
  misc_feature (2)..(306): NCBI GI NO: 15218268 NR Description: UDP-glucose glucosyltransferase, putative
  misc_feature (263)..(455): NCBI GI NO: 15218268 NR Description: UDP-glucose glucosyltransferase, putative
MGSTAAAPCHIVAVPYPGRGHVNAMLNLCRLLAARDGVTITIIVTEEWLSLLGAPAALPDLGLRVRFEAIPNVIPSEHGRANDMVGFMEAVYTKMASPFEQLLDRLAPPAPAAIVADMFVPWTVGVGERRGVPVCIMCPISATMFAVQYNFHLLPPAAAGGGASPDITGSCFVENYIPGTKSIRFADLAPTHTDALLLDKILEAHSSVKKAQCIVFTTFQELESDAIGAMRQNCPVYAVGPCVPFMALQEHKASPDGDDYMAWLDAQPAGSVIYVSLGSFLSVSAAQFDEIAAGLAESKARFLWVLRDADACSRVRGLIRDPDAGLIVPWTNQLRVLCHPSVGGFFTHCGMNSTLEAVYAGVPMLTLPIAFDQPTNSRLVTEVWKNGIGLRDMARADGVIGRGEIASAVDRLMLPDAAEFQDMRKRVTLWKDAARTASEEGGSSWKDVTSFINFVSR

SEQ ID NO: 40382 - protein, 433 aa, Zea mays subsp. mays
  peptide (1)..(433): Ceres Seq. ID no. 12418922
  misc_feature (1)..(431): Pfam Name: Pfam Description:  UDP-glucoronosyl and UDP-glucosyl transferase
  misc_feature (1)..(431): NCBI GI NO: 34909048 NR Description: putative glucosyltransferase
  misc_feature (1)..(428): NCBI GI NO: 34909046 NR Description: putative glucosyltransferase
  misc_feature (1)..(432): NCBI GI NO: 15227716 NR Description: putative glucosyltransferase; protein id:At2g30140
  misc_feature (1)..(433): NCBI GI NO: 15227717 NR Description: putative glucosyltransferase; protein id:At2g30150
  misc_feature (1)..(429): NCBI GI NO: 7385017 NR Description: UDP-glucose:salicylic acid glucosyltransferase
  misc_feature (1)..(258): NCBI GI NO: 37532078 NR Description: putative glucosyltransferase
  misc_feature (1)..(429): NCBI GI NO: 15221233 NR Description: putative indole-3-acetate beta-glucosyltransferase
  misc_feature (1)..(433): NCBI GI NO: 13431605 NR Description: Limonoid UDP-glucosyltransferase
  misc_feature (1)..(282): NCBI GI NO: 15218268 NR Description: UDP-glucose glucosyltransferase, putative
  misc_feature (239)..(431): NCBI GI NO: 15218268 NR Description: UDP-glucose glucosyltransferase, putative
MLNLCRLLAARDGVTITIIVTEEWLSLLGAPAALPDLGLRVRFEAIPNVIPSEHGRANDMVGFMEAVYTKMASPFEQLLDRLAPPAPAAIVADMFVPWTVGVGERRGVPVCIMCPISATMFAVQYNFHLLPPAAAGGGASPDITGSCFVENYIPGTKSIRFADLAPTHTDALLLDKILEAHSSVKKAQCIVFTTFQELESDAIGAMRQNCPVYAVGPCVPFMALQEHKASPDGDDYMAWLDAQPAGSVIYVSLGSFLSVSAAQFDEIAAGLAESKARFLWVLRDADACSRVRGLIRDPDAGLIVPWTNQLRVLCHPSVGGFFTHCGMNSTLEAVYAGVPMLTLPIAFDQPTNSRLVTEVWKNGIGLRDMARADGVIGRGEIASAVDRLMLPDAAEFQDMRKRVTLWKDAARTASEEGGSSWKDVTSFINFVSR

SEQ ID NO: 40383 - protein, 374 aa, Zea mays subsp. mays
  peptide (1)..(374): Ceres Seq. ID no. 12418923
  misc_feature (1)..(372): Pfam Name: Pfam Description:  UDP-glucoronosyl and UDP-glucosyl transferase
  misc_feature (1)..(372): NCBI GI NO: 34909048 NR Description: putative glucosyltransferase
  misc_feature (1)..(369): NCBI GI NO: 34909046 NR Description: putative glucosyltransferase
  misc_feature (1)..(373): NCBI GI NO: 15227716 NR Description: putative glucosyltransferase; protein id:At2g30140
  misc_feature (1)..(374): NCBI GI NO: 15227717 NR Description: putative glucosyltransferase; protein id:At2g30150
  misc_feature (1)..(370): NCBI GI NO: 7385017 NR Description: UDP-glucose:salicylic acid glucosyltransferase
  misc_feature (1)..(199): NCBI GI NO: 37532078 NR Description: putative glucosyltransferase
  misc_feature (1)..(370): NCBI GI NO: 15221233 NR Description: putative indole-3-acetate beta-glucosyltransferase
  misc_feature (1)..(374): NCBI GI NO: 13431605 NR Description: Limonoid UDP-glucosyltransferase
  misc_feature (1)..(223): NCBI GI NO: 15218268 NR Description: UDP-glucose glucosyltransferase, putative
  misc_feature (180)..(372): NCBI GI NO: 15218268 NR Description: UDP-glucose glucosyltransferase, putative
MVGFMEAVYTKMASPFEQLLDRLAPPAPAAIVADMFVPWTVGVGERRGVPVCIMCPISATMFAVQYNFHLLPPAAAGGGASPDITGSCFVENYIPGTKSIRFADLAPTHTDALLLDKILEAHSSVKKAQCIVFTTFQELESDAIGAMRQNCPVYAVGPCVPFMALQEHKASPDGDDYMAWLDAQPAGSVIYVSLGSFLSVSAAQFDEIAAGLAESKARFLWVLRDADACSRVRGLIRDPDAGLIVPWTNQLRVLCHPSVGGFFTHCGMNSTLEAVYAGVPMLTLPIAFDQPTNSRLVTEVWKNGIGLRDMARADGVIGRGEIASAVDRLMLPDAAEFQDMRKRVTLWKDAARTASEEGGSSWKDVTSFINFVSR

SEQ ID NO: 40384 - DNA, 1606 bp, Zea mays subsp. mays
  misc_feature (1)..(1606): Ceres Seq. ID no. 12361067
  misc_feature (1197)..(1197): n is a, c, t, g, unknown, or other
gcacgagaccattacctagaacatcctaatcgaaaaaagcaagccttcatctatcgagtcgcccgtcaccacagctgatattgaggcgacgcgccggccgtccagatcaaccaaaaaagagaaaaaaaaacagtagccatgtcgcggctcctcctcctcggggccgccgtgctgctgctcgcgtcggccgccacggcgcaggactgcctgtccgcgacgttcagcggcgggcggaccttcgggcggtgcaacaacctgccgtcgctgatcgccagcctgcactggacgtaccacccggagaacggcaccgcggacgtggcgttccgcgcgccgtcggacgccagcggctgggtcgcctggggcatcaaccccgaccgcggcggcagcatgggcggcagcagcgtcttcgtggcctcgccctcgcaggacggcagcggcgcggtgtccatcctcatgacccacctggagagcacgtcgcccagcctaaccaacaacaccctcaagttcaaggtgcccgtcggccccgccgccgagtactccaacggcgcctacaccatcttcgccatggtggagcttcccggcaactccacgcagcagttcacggtgtggcaggccggcgcgaccagcaacggtgccatctcccctcacccgacggcgccggccaacttggccagcacccagaggctggacttcctctccgggtccagcaccgccgcctcaaactccaggcttcaccgccgtaacatccacggcatgctgaacgcgatcgcctggggcgtcctgatccccgtcggcgccatcatcgcgcggtacctgcgcgtgttcgagtccgcggacccggcgtggttctacctgcacatcgcgtgccagtgctccggctacatcctgggcgtggccggctggggcctggggctgaagctcggcagcgagtcggccggcgtcacctaccagccgcaccgcagcatcggcatcgccatcttctgcctggccacgctgcaggtgttcgcgctgctgctccggcccgacaagaagaacaggtacaggctgtactggaacatctaccaccactccgtcggctactccgtcatcgtcctcggcgccgtcaacatcttcaaggggctcgacatcctcaagccggccagcggctacaagaccgcctacattgtcgtcctggccacgctcggcggcgtcgcgctntgcctcgaggccatcacgtggcccatcgccatccggaagcgcaggcgtaacgccgccgacaaggcgtccaacggcaacggcaacggctggcagcagggtgcgtaggggcctgatcgctgggcttgtgcgcgtgcgtgtgtttgtgctatagttttgatgcgagagagaggtctgatatcgatgtgctgatgccgttgttcagagagacatcgttgctgatgtgtttctttcctgttactactgcctctgtagtctgtactcctacctagaagagtagctcctttgattttttttcttctgttttgttgttgaattttattagggttctatagtgccatttgtacacattttttcccttcttattgatgtacgtacgactgctttgattactgtatggtttcagtcagtc

SEQ ID NO: 40385 - protein, 387 aa, Zea mays subsp. mays
  peptide (1)..(387): Ceres Seq. ID no. 12361068
  misc_feature (84)..(211): Pfam Name: DUF568 Pfam Description: Protein of unknown function
  misc_feature (1)..(380): NCBI GI NO: 24414270 NR Description: Putative membrane protein
  misc_feature (2)..(383): NCBI GI NO: 13785209 NR Description: putative membrane protein [Solanum tuberosum]
  misc_feature (10)..(367): NCBI GI NO: 15235545 NR Description: putative protein; protein id: At4g12980
  misc_feature (1)..(381): NCBI GI NO: 15238124 NR Description: putative protein; protein id: At5g47530.1
  misc_feature (10)..(367): NCBI GI NO: 21593814 NR Description: unknown [Arabidopsis thaliana]
  misc_feature (3)..(371): NCBI GI NO: 18404500 NR Description: expressed protein; protein id: At3g25290
  misc_feature (1)..(380): NCBI GI NO: 13785207 NR Description: putative membrane protein [Solanum tuberosum]
  misc_feature (1)..(382): NCBI GI NO: 18086563 NR Description: AT4g17280/dl4675c [Arabidopsis thaliana]
  misc_feature (1)..(380): NCBI GI NO: 13785211 NR Description: putative membrane protein [Solanum tuberosum]
  misc_feature (1)..(380): NCBI GI NO: 13785213 NR Description: putative membrane protein [Solanum tuberosum]
  misc_feature (353)..(353): Xaa is any aa, unknown or other
MSRLLLLGAAVLLLASAATAQDCLSATFSGGRTFGRCNNLPSLIASLHWTYHPENGTADVAFRAPSDASGWVAWGINPDRGGSMGGSSVFVASPSQDGSGAVSILMTHLESTSPSLTNNTLKFKVPVGPAAEYSNGAYTIFAMVELPGNSTQQFTVWQAGATSNGAISPHPTAPANLASTQRLDFLSGSSTAASNSRLHRRNIHGMLNAIAWGVLIPVGAIIARYLRVFESADPAWFYLHIACQCSGYILGVAGWGLGLKLGSESAGVTYQPHRSIGIAIFCLATLQVFALLLRPDKKNRYRLYWNIYHHSVGYSVIVLGAVNIFKGLDILKPASGYKTAYIVVLATLGGVAXCLEAITWPIAIRKRRRNAADKASNGNGNGWQQGA

SEQ ID NO: 40386 - protein, 304 aa, Zea mays subsp. mays
  peptide (1)..(304): Ceres Seq. ID no. 12361069
  misc_feature (1)..(128): Pfam Name: DUF568 Pfam Description: Protein of unknown function
  misc_feature (1)..(297): NCBI GI NO: 24414270 NR Description: Putative membrane protein
  misc_feature (1)..(300): NCBI GI NO: 13785209 NR Description: putative membrane protein [Solanum tuberosum]
  misc_feature (1)..(284): NCBI GI NO: 15235545 NR Description: putative protein; protein id: At4g12980
  misc_feature (1)..(298): NCBI GI NO: 15238124 NR Description: putative protein; protein id: At5g47530.1
  misc_feature (1)..(284): NCBI GI NO: 21593814 NR Description: unknown [Arabidopsis thaliana]
  misc_feature (1)..(288): NCBI GI NO: 18404500 NR Description: expressed protein; protein id: At3g25290
  misc_feature (1)..(297): NCBI GI NO: 13785207 NR Description: putative membrane protein [Solanum tuberosum]
  misc_feature (1)..(299): NCBI GI NO: 18086563 NR Description: AT4g17280/dl4675c [Arabidopsis thaliana]
  misc_feature (1)..(297): NCBI GI NO: 13785211 NR Description: putative membrane protein [Solanum tuberosum]
  misc_feature (1)..(297): NCBI GI NO: 13785213 NR Description: putative membrane protein [Solanum tuberosum]
  misc_feature (270)..(270): Xaa is any aa, unknown or other
MGGSSVFVASPSQDGSGAVSILMTHLESTSPSLTNNTLKFKVPVGPAAEYSNGAYTIFAMVELPGNSTQQFTVWQAGATSNGAISPHPTAPANLASTQRLDFLSGSSTAASNSRLHRRNIHGMLNAIAWGVLIPVGAIIARYLRVFESADPAWFYLHIACQCSGYILGVAGWGLGLKLGSESAGVTYQPHRSIGIAIFCLATLQVFALLLRPDKKNRYRLYWNIYHHSVGYSVIVLGAVNIFKGLDILKPASGYKTAYIVVLATLGGVAXCLEAITWPIAIRKRRRNAADKASNGNGNGWQQGA

SEQ ID NO: 40387 - protein, 282 aa, Zea mays subsp. mays
  peptide (1)..(282): Ceres Seq. ID no. 12361070
  misc_feature (1)..(106): Pfam Name: DUF568 Pfam Description: Protein of unknown function
  misc_feature (1)..(275): NCBI GI NO: 24414270 NR Description: Putative membrane protein
  misc_feature (1)..(278): NCBI GI NO: 13785209 NR Description: putative membrane protein [Solanum tuberosum]
  misc_feature (1)..(262): NCBI GI NO: 15235545 NR Description: putative protein; protein id: At4g12980
  misc_feature (1)..(276): NCBI GI NO: 15238124 NR Description: putative protein; protein id: At5g47530.1
  misc_feature (1)..(262): NCBI GI NO: 21593814 NR Description: unknown [Arabidopsis thaliana]
  misc_feature (1)..(266): NCBI GI NO: 18404500 NR Description: expressed protein; protein id: At3g25290
  misc_feature (1)..(275): NCBI GI NO: 13785207 NR Description: putative membrane protein [Solanum tuberosum]
  misc_feature (1)..(277): NCBI GI NO: 18086563 NR Description: AT4g17280/dl4675c [Arabidopsis thaliana]
  misc_feature (1)..(275): NCBI GI NO: 13785211 NR Description: putative membrane protein [Solanum tuberosum]
  misc_feature (1)..(275): NCBI GI NO: 13785213 NR Description: putative membrane protein [Solanum tuberosum]
  misc_feature (248)..(248): Xaa is any aa, unknown or other
MTHLESTSPSLTNNTLKFKVPVGPAAEYSNGAYTIFAMVELPGNSTQQFTVWQAGATSNGAISPHPTAPANLASTQRLDFLSGSSTAASNSRLHRRNIHGMLNAIAWGVLIPVGAIIARYLRVFESADPAWFYLHIACQCSGYILGVAGWGLGLKLGSESAGVTYQPHRSIGIAIFCLATLQVFALLLRPDKKNRYRLYWNIYHHSVGYSVIVLGAVNIFKGLDILKPASGYKTAYIVVLATLGGVAXCLEAITWPIAIRKRRRNAADKASNGNGNGWQQGA

SEQ ID NO: 40388 - DNA, 1676 bp, Zea mays subsp. mays
  misc_feature (1)..(1676): Ceres Seq. ID no. 12375592
gcacgagaccattacctagaacatcctaatcgaaaacacgcccacttcgccactcggacagtgctcggctcggatcggtcgcacggacacgccccgcgcgtcgcgggctctctctcacctctctcctcctcctttgcctgattggcgtgcccccatgcggatgcggtggctccgacccagctagccccaggctggggctgcgcccgcggcggcgatgaagcggccgctgcggcgctccttcgcggtgctcatcttcgtcgggctcgtcggcgcggcctccttctccaccgcgctccgtcgcgccgtggcgcccccgcccgcgcaggagcccccgccgctcgacccggcgcgcctcaacgctacgctgctccgcctggccgcagccgatccgtcggaagcgtcgctgcgccgggacgtggacggactcctcgagggccgcctcccggcctccgcggcgcgggcccgcgcgtggcgccgcgaccgcctcctccacccgctccacctccaccgccaccgcagcttcccgctcccgcgccgcggccgctacccggacgacgaccacgacatcctgctccacccgctcccgcgccacgagcagctccgcatcgaccccgccctgcgccgcgacctccgctcctggcaccgcctccgccgctacgaccctgccgtcctcgccgccctcccctccctgctctccatccccgggcgcatcccctcctgcgccgtcgtcggcaacagcggcatcctcctgcgcgcgaaccatggagccctcatcgattcccacgcagccgtgttccgcctcaacaacgcccgcgtctcaggctacgccgcgcacgttggcagcaagaccaacttctccttcatcaacagcaacgttcttcacctctgcgcgcgccggcccggctgcttctgccacccttacggccacggcgtccccatcctgctctacatctgccaggccgcccatttcgtcgacgtcgccgcctgcaacgccacctcgtcctcccgccacggctcccccatctccgtcaccgacgcccgcctcgacgtcctctgcgcgcgcatcgtcaagtactactccctccgccgattcgtcgccgagaccggccgcgcgcccgaggagtgggaccgcgcgcacgacgccgccatgttccattactcgtccgggatgcaagccatcatggtcgccgtgggagtgtgcgacagagtcagcgtgtttggcttcagcaagtcttccgacgccaagcatcattaccacagcaaccaaaaggcggagctagacctccacgactacgatgcggagtacgccttctaccacgacctctccgagcgaccgcaggtagtcccgttcctcaaggattccgggttcgccgtcccgcccgtcgtcttctaccattaggccagcttcgtagagcgcgcgccatgtgctcgacgttatgtggaacggctgttttcctcgcttatttttccggttttgattagtgggtacgacatagtaaaattttcgtgtgctgttggagttggaaggtgtatattagggtttagcctactccactggtatagaagaagggatcgtttgcccttttggtttcagcacgacagtaggcagtgcctggaattgtaacttcagactgatattttaatttattaagaaacagaatgtatatcttaccagc

SEQ ID NO: 40389 - protein, 394 aa, Zea mays subsp. mays
  peptide (1)..(394): Ceres Seq. ID no. 12375593
  misc_feature (100)..(382): Pfam Name: sialyltransferase Pfam Description: Glycosyltransferase family 29
  misc_feature (1)..(394): NCBI GI NO: 34908454 NR Description: P0683F02.18
  misc_feature (1)..(394): NCBI GI NO: 15223174 NR Description: sialyltransferase family; protein id: At1g08280.1
  misc_feature (280)..(394): NCBI GI NO: 28416597 NR Description: At1g08280 [Arabidopsis thaliana]
MKRPLRRSFAVLIFVGLVGAASFSTALRRAVAPPPAQEPPPLDPARLNATLLRLAAADPSEASLRRDVDGLLEGRLPASAARARAWRRDRLLHPLHLHRHRSFPLPRRGRYPDDDHDILLHPLPRHEQLRIDPALRRDLRSWHRLRRYDPAVLAALPSLLSIPGRIPSCAVVGNSGILLRANHGALIDSHAAVFRLNNARVSGYAAHVGSKTNFSFINSNVLHLCARRPGCFCHPYGHGVPILLYICQAAHFVDVAACNATSSSRHGSPISVTDARLDVLCARIVKYYSLRRFVAETGRAPEEWDRAHDAAMFHYSSGMQAIMVAVGVCDRVSVFGFSKSSDAKHHYHSNQKAELDLHDYDAEYAFYHDLSERPQVVPFLKDSGFAVPPVVFYH

SEQ ID NO: 40390 - DNA, 1370 bp, Zea mays subsp. mays
  misc_feature (1)..(1370): Ceres Seq. ID no. 12376881
gcacgagaccattacctagaacatcctaatcgaaaaattttccaagctttctccagatcaaatcagaaaggggaagggaagaacggcccagcaatgccgctctgcagcttctacgcctccacctccgttcccgtcgtcaagccccagcagtccgtcgcctcgtccaagccccccaccacggcggtggcctccgtggcgacaactgtgccgatgcgcagtgcagcgacggtgacgccagccgtggccacaacaacgagcctagcgctgtctctgcacctgccggagctgccgtcgcaggtgaaggacaagatcctgagcctggagctgatgggcgtggactatgggcgcgcgctggagcagaacccggcgctccgcgacgcggcgccggagtccatccacgcggtggtgtcgttcctccagtcccgcgggctccagttcaaggacctgggccgcgtcttcggcatgtgcccgtccgtgctgaccgccagcgtccgcgccgacctccgccccgtgttcgccttcctctccgcggacctgggcgtgccggagtcggcgcaccgggcgcgtggtgatcaagtgcccgcgcgtgctggcctgcagcgtccgcgaccagctccgccccgcgctcatctacctccgccgcctgggcttccgggacagccgcgcgctggcgctgcaggacccgatcctcctcgtctccagcgtggagcgcaccctggcgccgaagctggagtacctggccgggctcggcatgtcccgcgacgacgcggtcgccatggtgctgcgctgcccggcgctcttcaccttcagcatcgagcggaactaccggcccaagttcgagtacctggtggacgccatgggcggcggcgtcgaggacgtcaaggccttcccgcagtacttcgccttcagcctcgagaagcggatcgcgccgcgccaccgcgccgcggaggacgccggcgtcgcgctgccgcttccggacatgctcaaggccaccgacgaggagttcagggagatgctcgacaaggagcgggagctgcacgagcaggcagcgacgacggactgatcgatcggggggctagtacagcggtttgcacctgatccgactatccgaagcatccaaccgccgtcttcgtggcgatcgagtgtcctggccatgacggtagccagcacatgtagtcatttgatttgagtaattagtagcctgtacatatatgcattgacattatttgctatagtcacgattcgtagctcatgagagaatatgtctgttctttctccattattccaagtgaataagcaccgagctggaagtcgtgtctttatgtacacacgtgtaccaagtttacaggaatgaatgtaccaagttcatt

SEQ ID NO: 40391 - protein, 365 aa, Zea mays subsp. mays
  peptide (1)..(365): Ceres Seq. ID no. 12376882
  misc_feature (99)..(187): Pfam Name: Pfam Description:  mTERF
  misc_feature (99)..(187): NCBI GI NO: 15226787 NR Description: hypothetical protein; protein id: At2g34620.1
  misc_feature (109)..(187): NCBI GI NO: 28392870 NR Description: unknown protein [Arabidopsis thaliana]
  misc_feature (101)..(183): NCBI GI NO: 15227524 NR Description: predicted by genefinder and genscan
  misc_feature (101)..(183): NCBI GI NO: 28204784 NR Description: hypothetical protein [Arabidopsis thaliana]
  misc_feature (54)..(181): NCBI GI NO: 21537209 NR Description: unknown [Arabidopsis thaliana]
  misc_feature (104)..(184): NCBI GI NO: 27817836 NR Description: OJ1127_E01.4
  misc_feature (90)..(184): NCBI GI NO: 15240542 NR Description: putative protein; protein id: At5g55580
  misc_feature (95)..(175): NCBI GI NO: 18406426 NR Description: expressed protein; protein id: At2g44020
  misc_feature (182)..(328): NCBI GI NO: 27375632 NR Description: blr0521 [Bradyrhizobium japonicum]
ARDHYLEHPNRKIFQAFSRSNQKGEGKNGPAMPLCSFYASTSVPVVKPQQSVASSKPPTTAVASVATTVPMRSAATVTPAVATTTSLALSLHLPELPSQVKDKILSLELMGVDYGRALEQNPALRDAAPESIHAVVSFLQSRGLQFKDLGRVFGMCPSVLTASVRADLRPVFAFLSADLGVPESAHRARGDQVPARAGLQRPRPAPPRAHLPPPPGLPGQPRAGAAGPDPPRLQRGAHPGAEAGVPGRARHVPRRRGRHGAALPGALHLQHRAELPAQVRVPGGRHGRRRRGRQGLPAVLRLQPREADRAAPPRRGGRRRRAAASGHAQGHRRGVQGDARQGAGAARAGSDDGLIDRGASTAVCT

SEQ ID NO: 40392 - protein, 334 aa, Zea mays subsp. mays
  peptide (1)..(334): Ceres Seq. ID no. 12376883
  misc_feature (68)..(156): Pfam Name: Pfam Description:  mTERF
  misc_feature (68)..(156): NCBI GI NO: 15226787 NR Description: hypothetical protein; protein id: At2g34620.1
  misc_feature (78)..(156): NCBI GI NO: 28392870 NR Description: unknown protein [Arabidopsis thaliana]
  misc_feature (70)..(152): NCBI GI NO: 15227524 NR Description: predicted by genefinder and genscan
  misc_feature (70)..(152): NCBI GI NO: 28204784 NR Description: hypothetical protein [Arabidopsis thaliana]
  misc_feature (23)..(150): NCBI GI NO: 21537209 NR Description: unknown [Arabidopsis thaliana]
  misc_feature (73)..(153): NCBI GI NO: 27817836 NR Description: OJ1127_E01.4
  misc_feature (59)..(153): NCBI GI NO: 15240542 NR Description: putative protein; protein id: At5g55580
  misc_feature (64)..(144): NCBI GI NO: 18406426 NR Description: expressed protein; protein id: At2g44020
  misc_feature (151)..(297): NCBI GI NO: 27375632 NR Description: blr0521 [Bradyrhizobium japonicum]
MPLCSFYASTSVPVVKPQQSVASSKPPTTAVASVATTVPMRSAATVTPAVATTTSLALSLHLPELPSQVKDKILSLELMGVDYGRALEQNPALRDAAPESIHAVVSFLQSRGLQFKDLGRVFGMCPSVLTASVRADLRPVFAFLSADLGVPESAHRARGDQVPARAGLQRPRPAPPRAHLPPPPGLPGQPRAGAAGPDPPRLQRGAHPGAEAGVPGRARHVPRRRGRHGAALPGALHLQHRAELPAQVRVPGGRHGRRRRGRQGLPAVLRLQPREADRAAPPRRGGRRRRAAASGHAQGHRRGVQGDARQGAGAARAGSDDGLIDRGASTAVCT

SEQ ID NO: 40393 - protein, 295 aa, Zea mays subsp. mays
  peptide (1)..(295): Ceres Seq. ID no. 12376884
  misc_feature (29)..(117): Pfam Name: Pfam Description:  mTERF
  misc_feature (29)..(117): NCBI GI NO: 15226787 NR Description: hypothetical protein; protein id: At2g34620.1
  misc_feature (39)..(117): NCBI GI NO: 28392870 NR Description: unknown protein [Arabidopsis thaliana]
  misc_feature (31)..(113): NCBI GI NO: 15227524 NR Description: predicted by genefinder and genscan
  misc_feature (31)..(113): NCBI GI NO: 28204784 NR Description: hypothetical protein [Arabidopsis thaliana]
  misc_feature (1)..(111): NCBI GI NO: 21537209 NR Description: unknown [Arabidopsis thaliana]
  misc_feature (34)..(114): NCBI GI NO: 27817836 NR Description: OJ1127_E01.4
  misc_feature (20)..(114): NCBI GI NO: 15240542 NR Description: putative protein; protein id: At5g55580
  misc_feature (25)..(105): NCBI GI NO: 18406426 NR Description: expressed protein; protein id: At2g44020
  misc_feature (112)..(258): NCBI GI NO: 27375632 NR Description: blr0521 [Bradyrhizobium japonicum]
MRSAATVTPAVATTTSLALSLHLPELPSQVKDKILSLELMGVDYGRALEQNPALRDAAPESIHAVVSFLQSRGLQFKDLGRVFGMCPSVLTASVRADLRPVFAFLSADLGVPESAHRARGDQVPARAGLQRPRPAPPRAHLPPPPGLPGQPRAGAAGPDPPRLQRGAHPGAEAGVPGRARHVPRRRGRHGAALPGALHLQHRAELPAQVRVPGGRHGRRRRGRQGLPAVLRLQPREADRAAPPRRGGRRRRAAASGHAQGHRRGVQGDARQGAGAARAGSDDGLIDRGASTAVCT

SEQ ID NO: 40394 - DNA, 1375 bp, Zea mays subsp. mays
  misc_feature (1)..(1375): Ceres Seq. ID no. 12368133
gcacgagaccattacctagaacatcctaatcgaaaaggatctgcatgctgctccctgcggcgcttaacgtttgtgtgagaagatgaggtttctgtctagctctcttctgcctgcctgcctttctttgtatcccccttgtcagcttcgaaacttctctgctcatgagctatggccagtcctgctgccactgtagatttttttaagtgcggaggaaatctcttccccccccccctccctccctggttattgtgcatacatagctatcctgctgaacgaagcacaaataaatacaaaccaagaaacgccagtgctttctcgatcacgtactggcacgagctagcgagcagactcactcgaacacacactgaccaaccgctcctctctccttccgttccgtcattccgtgtgcagcagacgcggcgttctgcgtgtgcaagacgggcgtgcccgaccaggcgatgcaggcggcgatcgactacgcctgcgccaagggggccgactgcgcctccgcctccaagggcgcgccctgctacggcaacggcaacaaggtggccgtctgctcctacatctgcaacagctactaccagagccgcagcgccacgggcgccacctgcgacttcaacggcgtcgccacgctcaccggcaccgaccccagctccggcacctgcaagttcgcctccggccccagcgcaggcaccggcggtggcatgggcgctggcgcgggtaccggcggtggcatgggcgctggcgctggcaccggcgccgggacaggcgttggcaccggagcaggcacgggcatgggcaccgggacggggaccagcaccggcaccggcgccggcgcaggggtcgcgacccccgggagcgccctgagcccaccgttcggcggcactggcgcgtacggcccgtcaggggcaggcagcacggactacaacgacgccgtcgccccgcgcgccgccgggctgcacgtggtggctgccctcgctctcgccgtcgccgtcgccgcacctctccaccgctaggggcggtgccatggcaactgggagctggcgggcacgacactcgcagacgggatcccgcctcggcggcccgccagcgcgggctctggtcgatgtccggcgttagtgcgtgcgcgtacctgatgaagtgatgatgggttttgatcgaccagccgtcagcgtagtgcggtcacggggtttacagtgttattcgaactgacctctctgcttcctcgtgctagtagtggtggctgccatgtgtgtgtgctgctggtagagaactagggattctttttttttcttctgtcgcttccttgcttatatgtcccgtcgtgttaggctgtgtttactatgcagtgtttttggtggtggccgctttc

SEQ ID NO: 40395 - protein, 233 aa, Zea mays subsp. mays
  peptide (1)..(233): Ceres Seq. ID no. 12368134
  misc_feature (69)..(231): Pfam Name: Pfam Description:  Glycoprotein GG/GX
  misc_feature (105)..(233): NCBI GI NO: 71400 NR Description: dermal gland protein APEG precursor
  misc_feature (105)..(233): NCBI GI NO: 731172 NR Description: SKIN SECRETORY PROTEIN XP2 PRECURSOR
  misc_feature (67)..(233): NCBI GI NO: 12313873 NR Description: nischarin; imidazoline receptor I-1-like protein
  misc_feature (89)..(233): NCBI GI NO: 27375632 NR Description: blr0521 [Bradyrhizobium japonicum]
  misc_feature (92)..(233): NCBI GI NO: 27375632 NR Description: blr0521 [Bradyrhizobium japonicum]
  misc_feature (46)..(230): NCBI GI NO: 27379673 NR Description: blr4562 [Bradyrhizobium japonicum]
  misc_feature (99)..(233): NCBI GI NO: 28972556 NR Description: mKIAA0975 protein [Mus musculus]
  misc_feature (105)..(233): NCBI GI NO: 71400 NR Description: dermal gland protein APEG precursor
  misc_feature (105)..(233): NCBI GI NO: 731172 NR Description: SKIN SECRETORY PROTEIN XP2 PRECURSOR
  misc_feature (105)..(233): NCBI GI NO: 71400 NR Description: dermal gland protein APEG precursor
MASPAATVDFFKCGGNLFPPPLPPWLLCIHSYPAERSTNKYKPRNASAFSITYWHELASRLTRTHTDQPLLSPSVPSFRVQQTRRSACARRACPTRRCRRRSTTPAPRGPTAPPPPRARPATATATRWPSAPTSATATTRAAAPRAPPATSTASPRSPAPTPAPAPASSPPAPAQAPAVAWALARVPAVAWALALAPAPGQALAPEQARAWAPGRGPAPAPAPAQGSRPPGAP

SEQ ID NO: 40396 - protein, 186 aa, Zea mays subsp. mays
  peptide (1)..(186): Ceres Seq. ID no. 12368135
  misc_feature (76)..(129): Pfam Name: Pfam Description:  Serglycin
  misc_feature (1)..(129): NCBI GI NO: 22775658 NR Description: contains ESTs C91599
  misc_feature (1)..(184): NCBI GI NO: 21553768 NR Description: unknown [Arabidopsis thaliana]
  misc_feature (1)..(184): NCBI GI NO: 18409239 NR Description: unknown protein; protein id: At1g69295
  misc_feature (1)..(72): NCBI GI NO: 34909796 NR Description: P0403C05.4
  misc_feature (1)..(138): NCBI GI NO: 30697478 NR Description: glycosyl hydrolase family 17
  misc_feature (1)..(140): NCBI GI NO: 33146901 NR Description: beta-1,3-glucanase-like protein
  misc_feature (1)..(138): NCBI GI NO: 21592859 NR Description: unknown [Arabidopsis thaliana]
  misc_feature (1)..(138): NCBI GI NO: 15241485 NR Description: glycosyl hydrolase family 17; protein id:At5g08000
  misc_feature (1)..(153): NCBI GI NO: 25404810 NR Description: unknown protein, 45065-49536
  misc_feature (1)..(182): NCBI GI NO: 34912962 NR Description: beta-1,3 glucanase-like protein
MQAAIDYACAKGADCASASKGAPCYGNGNKVAVCSYICNSYYQSRSATGATCDFNGVATLTGTDPSSGTCKFASGPSAGTGGGMGAGAGTGGGMGAGAGTGAGTGVGTGAGTGMGTGTGTSTGTGAGAGVATPGSALSPPFGGTGAYGPSGAGSTDYNDAVAPRAAGLHVVAALALAVAVAAPLHR

SEQ ID NO: 40397 - DNA, 644 bp, Zea mays subsp. mays
  misc_feature (1)..(644): Ceres Seq. ID no. 12418062
  misc_feature (461)..(461): n is a, c, t, g, unknown, or other
cattggagactctttggacttggtacctattgctgccttctacggtagaggaaaacgaacaggtgtctttggatcattcctcctcgcatgctatgatgagcagaacgaagaatatcaaacaatatgcaacataggtactggattttctgagcaacagcttgaagaacgttctgcgagccttcgaagtaaagtgatagaaaaaccaaaggcatactatagatttggcgacacaatgaaccccgatgtgtggtttgagccatcagaggtctgggaggtcaaagctgccgatctgagcataagccctgtacatcgtgctgccaatggtatagtcgatccaaataagggtatctctctaagattccctcgcctattgagattacgtgacgataaaagcccagaacaagccaccacgtctgaccaagtcgctgacatgtaccgggtctcaaaagatcaaccacggntataaccaggaggatgaggacgatgactgatgttgacttaattctttgttgctggatgggatggttcactgtgtaaacactagtcttcgcagtttccagcttgttctcaaccgtaacctgttgatttaccggttcctgtttctatgatcaaatgaacaggtattgaccggagattgcattttc

SEQ ID NO: 40398 - protein, 154 aa, Zea mays subsp. mays
  peptide (1)..(154): Ceres Seq. ID no. 12418063
  misc_feature (19)..(84): Pfam Name: Pfam Description:  ATP dependent DNA ligase C terminal region
  misc_feature (1)..(149): NCBI GI NO: 37535574 NR Description: putative DNA ligase
  misc_feature (1)..(149): NCBI GI NO: 30680522 NR Description: ligase I -related [Arabidopsis thaliana]
  misc_feature (1)..(149): NCBI GI NO: 2129574 NR Description: DNA ligase (ATP) (EC 6
  misc_feature (1)..(152): NCBI GI NO: 15222077 NR Description: hypothetical protein; protein id: At1g49250.1
  misc_feature (1)..(89): NCBI GI NO: 6579215 NR Description: T23G18.1 [Arabidopsis thaliana]
  misc_feature (88)..(149): NCBI GI NO: 6579215 NR Description: T23G18.1 [Arabidopsis thaliana]
  misc_feature (1)..(88): NCBI GI NO: 8778834 NR Description: T6D22.23 [Arabidopsis thaliana]
  misc_feature (88)..(149): NCBI GI NO: 8778834 NR Description: T6D22.23 [Arabidopsis thaliana]
  misc_feature (3)..(149): NCBI GI NO: 28830036 NR Description: similar to Xenopus laevis (African clawed frog)
  misc_feature (1)..(146): NCBI GI NO: 1706480 NR Description: DNA LIGASE I (POLYDEOXYRIBONUCLEOTIDE SYNTHASE
  misc_feature (154)..(154): Xaa is any aa, unknown or other
IGDSLDLVPIAAFYGRGKRTGVFGSFLLACYDEQNEEYQTICNIGTGFSEQQLEERSASLRSKVIEKPKAYYRFGDTMNPDVWFEPSEVWEVKAADLSISPVHRAANGIVDPNKGISLRFPRLLRLRDDKSPEQATTSDQVADMYRVSKDQPRX

SEQ ID NO: 40399 - protein, 77 aa, Zea mays subsp. mays
  peptide (1)..(77): Ceres Seq. ID no. 12418064
  misc_feature (1)..(72): NCBI GI NO: 37535574 NR Description: putative DNA ligase
  misc_feature (1)..(72): NCBI GI NO: 30680522 NR Description: ligase I -related [Arabidopsis thaliana]
  misc_feature (1)..(72): NCBI GI NO: 2129574 NR Description: DNA ligase (ATP) (EC 6
  misc_feature (1)..(75): NCBI GI NO: 15222077 NR Description: hypothetical protein; protein id: At1g49250.1
  misc_feature (1)..(12): NCBI GI NO: 6579215 NR Description: T23G18.1 [Arabidopsis thaliana]
  misc_feature (11)..(72): NCBI GI NO: 6579215 NR Description: T23G18.1 [Arabidopsis thaliana]
  misc_feature (1)..(11): NCBI GI NO: 8778834 NR Description: T6D22.23 [Arabidopsis thaliana]
  misc_feature (11)..(72): NCBI GI NO: 8778834 NR Description: T6D22.23 [Arabidopsis thaliana]
  misc_feature (1)..(72): NCBI GI NO: 28830036 NR Description: similar to Xenopus laevis (African clawed frog)
  misc_feature (1)..(69): NCBI GI NO: 1706480 NR Description: DNA LIGASE I (POLYDEOXYRIBONUCLEOTIDE SYNTHASE
  misc_feature (77)..(77): Xaa is any aa, unknown or other
MNPDVWFEPSEVWEVKAADLSISPVHRAANGIVDPNKGISLRFPRLLRLRDDKSPEQATTSDQVADMYRVSKDQPRX

SEQ ID NO: 40400 - DNA, 1475 bp, Zea mays subsp. mays
  misc_feature (1)..(1475): Ceres Seq. ID no. 12375615
gcacgagaccattacctagaacatcctaatcgaaaaaggagcttcatccaacagcccaagtgtccctgctacccccactggatcagcaagctagctacccagtggagagccacagccgaagccgaagccgaagctagagctagcaagcaatggctgcggcggctcctcctgcgcgtcctactagcagcatcagcagctgctgctgctgcatctcgcggcgcgccgccgccgtcgtgccggcgctgctgctgctggcggcgatggccgcctcctccggcgacgcgcagccttccccggggtactacccgagctccaggttcaggccggtgccgttcaaccgggcgtacaccaacaagtggggcccgcagcaccagacgctctccggcgaccattccgccctcaccatctggctcgacaagacctgcgggagtggtttcaagtcgaagcacgcgtacaggaacggctacttctccactcgcatcaagctccccgcccggatacaccgcgggcaccaacaccgccttctatctctccaacaacgaggcgcaccctggtttctacgacgagatcgacatggagttcctgggcaccatcccgggggagccctacacgctgcagacgaacgtgtacgtgcgcggcagcggcgacgggcgcatcgtggggcgggagatgcggttccacctgtggttcgaccccacggcggcctaccacacctacgccatcctgtggaaccccgacgccatcaccttcttcgtggacgacgtgcccgtccgccgctacgagcgccgcaccgagctcaccttcccggaccgccccatgtgggtctacggctccatctgggacgcctccgactgggccaccgacgacggccgccaccgcgccgactaccgctaccagcccttcgtcgcgcgcctcgaccgcttcgtcgtcgccggctgctccgccagcgccccgcccgcgtgcaggcccgtgccggcgtcccccgcgggggccgggctcacgccgcggcagtacgcggccatgcgctgggcgcagcagggccacatggtctactactactgcaacgacttccgcagggaccactcgctcacgcccgagtgctagcgagcgtgcctgtctgctgtgttgcgtcgtcgtcgtcgtccttgttgctttgtgctttgtttcgttgttgatgaaaaggtcgctaggcgtggctgccctactaccgcccgcgcccgccgctgctctctctgcttgcggtgactgaggcgcccgcgcgagccggtggttgaggcgttggtcgttggcttatcgccagcaaactcgtgtcgtcgctcgtctacgtacgcgtacggcgtacccattgcatttcttccggttgttgctttccatttggtctcgcatgcatcacacgaggcgccccaaaggggcaagcttccatgattcatacggatacactatgtataccatatatacatattatatatatattt

SEQ ID NO: 40401 - protein, 367 aa, Zea mays subsp. mays
  peptide (1)..(367): Ceres Seq. ID no. 12375616
  misc_feature (142)..(298): Pfam Name: Pfam Description:  Glycosyl hydrolases family 16
  misc_feature (142)..(367): NCBI GI NO: 34901732 NR Description: putative xyloglucan endo-transglycosylase
  misc_feature (142)..(367): NCBI GI NO: 37536586 NR Description: putative cellulase
  misc_feature (142)..(367): NCBI GI NO: 34902398 NR Description: Putative cellulase
  misc_feature (138)..(367): NCBI GI NO: 14029149 NR Description: xyloglucan endo-transglycosylase [Carica papaya]
  misc_feature (138)..(367): NCBI GI NO: 17402583 NR Description: Xyloglucan endo-transglycosylase
  misc_feature (138)..(367): NCBI GI NO: 1362078 NR Description: xyloglucan endo-1,4-beta-D-glucanase (EC 3
  misc_feature (165)..(367): NCBI GI NO: 15228047 NR Description: xyloglucan endotransglycosylase, putative
  misc_feature (103)..(367): NCBI GI NO: 1769907 NR Description: xyloglucan endo-transglycosylase
  misc_feature (103)..(367): NCBI GI NO: 15230574 NR Description: xyloglucan endotransglycosylase, putative
  misc_feature (177)..(367): NCBI GI NO: 1084391 NR Description: xyloglucan endo-1,4-beta-D-glucanase (EC 3
ARDHYLEHPNRKRSFIQQPKCPCYPHWISKLATQWRATAEAEAEARASKQWLRRLLLRVLLAASAAAAAASRGAPPPSCRRCCCWRRWPPPPATRSLPRGTTRAPGSGRCRSTGRTPTSGARSTRRSPATIPPSPSGSTRPAGVVSSRSTRTGTATSPLASSSPPGYTAGTNTAFYLSNNEAHPGFYDEIDMEFLGTIPGEPYTLQTNVYVRGSGDGRIVGREMRFHLWFDPTAAYHTYAILWNPDAITFFVDDVPVRRYERRTELTFPDRPMWVYGSIWDASDWATDDGRHRADYRYQPFVARLDRFVVAGCSASAPPACRPVPASPAGAGLTPRQYAAMRWAQQGHMVYYYCNDFRRDHSLTPEC

SEQ ID NO: 40402 - protein, 341 aa, Zea mays subsp. mays
  peptide (1)..(341): Ceres Seq. ID no. 12375617
  misc_feature (62)..(115): Pfam Name: Pfam Description:  Glycosyl hydrolases family 16
  misc_feature (22)..(115): NCBI GI NO: 34901732 NR Description: putative xyloglucan endo-transglycosylase
  misc_feature (26)..(113): NCBI GI NO: 37536586 NR Description: putative cellulase
  misc_feature (62)..(115): NCBI GI NO: 34902398 NR Description: Putative cellulase
  misc_feature (34)..(113): NCBI GI NO: 14029149 NR Description: xyloglucan endo-transglycosylase [Carica papaya]
  misc_feature (28)..(113): NCBI GI NO: 17402583 NR Description: Xyloglucan endo-transglycosylase
  misc_feature (33)..(113): NCBI GI NO: 1362078 NR Description: xyloglucan endo-1,4-beta-D-glucanase (EC 3
  misc_feature (47)..(113): NCBI GI NO: 15228047 NR Description: xyloglucan endotransglycosylase, putative
  misc_feature (59)..(114): NCBI GI NO: 37537142 NR Description: putative endoxyloglucan transferase
  misc_feature (32)..(115): NCBI GI NO: 32470643 NR Description: putative xyloglucan endotransglycosylase-relatedprotein
  misc_feature (60)..(113): NCBI GI NO: 28804632 NR Description: xyloglucan endotransglycosylase [Pyrus communis]
MAAAAPPARPTSSISSCCCCISRRAAAVVPALLLLAAMAASSGDAQPSPGYYPSSRFRPVPFNRAYTNKWGPQHQTLSGDHSALTIWLDKTCGSGFKSKHAYRNGYFSTRIKLPARIHRGHQHRLLSLQQRGAPWFLRRDRHGVPGHHPGGALHAADERVRARQRRRAHRGAGDAVPPVVRPHGGLPHLRHPVEPRRHHLLRGRRARPPLRAPHRAHLPGPPHVGLRLHLGRLRLGHRRRPPPRRLPLPALRRAPRPLRRRRLLRQRPARVQARAGVPRGGRAHAAAVRGHALGAAGPHGLLLLQRLPQGPLAHARVLASVPVCCVASSSSSLLLCALFRC

SEQ ID NO: 40403 - protein, 304 aa, Zea mays subsp. mays
  peptide (1)..(304): Ceres Seq. ID no. 12375618
  misc_feature (25)..(78): Pfam Name: Pfam Description:  Glycosyl hydrolases family 16
  misc_feature (1)..(78): NCBI GI NO: 34901732 NR Description: putative xyloglucan endo-transglycosylase
  misc_feature (1)..(76): NCBI GI NO: 37536586 NR Description: putative cellulase
  misc_feature (25)..(78): NCBI GI NO: 34902398 NR Description: Putative cellulase
  misc_feature (1)..(76): NCBI GI NO: 14029149 NR Description: xyloglucan endo-transglycosylase [Carica papaya]
  misc_feature (1)..(76): NCBI GI NO: 17402583 NR Description: Xyloglucan endo-transglycosylase
  misc_feature (1)..(76): NCBI GI NO: 1362078 NR Description: xyloglucan endo-1,4-beta-D-glucanase (EC 3
  misc_feature (10)..(76): NCBI GI NO: 15228047 NR Description: xyloglucan endotransglycosylase, putative
  misc_feature (22)..(77): NCBI GI NO: 37537142 NR Description: putative endoxyloglucan transferase
  misc_feature (1)..(78): NCBI GI NO: 32470643 NR Description: putative xyloglucan endotransglycosylase-relatedprotein
  misc_feature (23)..(76): NCBI GI NO: 28804632 NR Description: xyloglucan endotransglycosylase [Pyrus communis]
MAASSGDAQPSPGYYPSSRFRPVPFNRAYTNKWGPQHQTLSGDHSALTIWLDKTCGSGFKSKHAYRNGYFSTRIKLPARIHRGHQHRLLSLQQRGAPWFLRRDRHGVPGHHPGGALHAADERVRARQRRRAHRGAGDAVPPVVRPHGGLPHLRHPVEPRRHHLLRGRRARPPLRAPHRAHLPGPPHVGLRLHLGRLRLGHRRRPPPRRLPLPALRRAPRPLRRRRLLRQRPARVQARAGVPRGGRAHAAAVRGHALGAAGPHGLLLLQRLPQGPLAHARVLASVPVCCVASSSSSLLLCALFRC

SEQ ID NO: 40404 - DNA, 626 bp, Zea mays subsp. mays
  misc_feature (1)..(626): Ceres Seq. ID no. 12360531
  misc_feature (578)..(578): n is a, c, t, g, unknown, or other
  misc_feature (609)..(609): n is a, c, t, g, unknown, or other
  misc_feature (614)..(614): n is a, c, t, g, unknown, or other
  misc_feature (611)..(611): n is a, c, t, g, unknown, or other
gaactacgctcgtgttaacatagtttacaggaatgcagaggatatgaattaccactcggtctgtttgcatgtgttggcagattcaatacggagtgcaggcttgatactagcttcttggtttctttcattggggattgagaatgctgaggttctgtgcctgggaatcgtctcagtggcagtgtttatgcttgttttgccgttatttaaagctactggtaatatcctactgcaaatcgcacctagcaatgtgccaccttcagcctttacaaagtgctcgagacagattgctgcttgtgaagatgtctccgaagtatggcaaggtcgattctgggagcttgttcctggtcaggcagttggatctctctccattagggtgaagagcggcgctgacgaccgggcagtccttgaatacacgcatggtttatatcaggatttgggcatacaggatctgacggtccaaactgatgagtttgtagggcctgttagttagacggtaggggttctatcccagcttcacgaaagtgttgttttcagtttttttttcctaccaagtagtttctttcgcaaccgtgtctatntaaacactgtttttttattaagttcatctcncnacnaaaagttttttc

SEQ ID NO: 40405 - protein, 162 aa, Zea mays subsp. mays
  peptide (1)..(162): Ceres Seq. ID no. 12360532
  misc_feature (1)..(155): Pfam Name: Pfam Description:  Cation efflux family
  misc_feature (1)..(155): NCBI GI NO: 15229954 NR Description: unknown protein; protein id: At3g12100.1
  misc_feature (1)..(155): NCBI GI NO: 9294107 NR Description: contains similarity to cationtransporter~gene_id:T23B7
  misc_feature (20)..(155): NCBI GI NO: 12963579 NR Description: zinc transporter like 2 [Mus musculus]
  misc_feature (20)..(155): NCBI GI NO: 39645387 NR Description: Unknown (protein for MGC:76189)
  misc_feature (20)..(155): NCBI GI NO: 29504753 NR Description: Unknown (protein for MGC:60465) [Mus musculus]
  misc_feature (20)..(155): NCBI GI NO: 40255009 NR Description: zinc transporter like 2; zinc transporter ZnT-7
  misc_feature (20)..(155): NCBI GI NO: 19070122 NR Description: zinc transporter-like 2 protein [Homo sapiens]
  misc_feature (10)..(155): NCBI GI NO: 32172476 NR Description: putative cation transport protein OCT
  misc_feature (20)..(155): NCBI GI NO: 28278399 NR Description: Similar to RIKEN cDNA 1810059J10 gene
  misc_feature (20)..(155): NCBI GI NO: 24645863 NR Description: CG6672-PA [Drosophila melanogaster]
NYARVNIVYRNAEDMNYHSVCLHVLADSIRSAGLILASWFLSLGIENAEVLCLGIVSVAVFMLVLPLFKATGNILLQIAPSNVPPSAFTKCSRQIAACEDVSEVWQGRFWELVPGQAVGSLSIRVKSGADDRAVLEYTHGLYQDLGIQDLTVQTDEFVGPVS

SEQ ID NO: 40406 - protein, 148 aa, Zea mays subsp. mays
  peptide (1)..(148): Ceres Seq. ID no. 12360533
  misc_feature (1)..(141): Pfam Name: Pfam Description:  Cation efflux family
  misc_feature (1)..(141): NCBI GI NO: 15229954 NR Description: unknown protein; protein id: At3g12100.1
  misc_feature (1)..(141): NCBI GI NO: 9294107 NR Description: contains similarity to cationtransporter~gene_id:T23B7
  misc_feature (6)..(141): NCBI GI NO: 12963579 NR Description: zinc transporter like 2 [Mus musculus]
  misc_feature (6)..(141): NCBI GI NO: 39645387 NR Description: Unknown (protein for MGC:76189)
  misc_feature (6)..(141): NCBI GI NO: 29504753 NR Description: Unknown (protein for MGC:60465) [Mus musculus]
  misc_feature (6)..(141): NCBI GI NO: 40255009 NR Description: zinc transporter like 2; zinc transporter ZnT-7
  misc_feature (6)..(141): NCBI GI NO: 19070122 NR Description: zinc transporter-like 2 protein [Homo sapiens]
  misc_feature (1)..(141): NCBI GI NO: 32172476 NR Description: putative cation transport protein OCT
  misc_feature (6)..(141): NCBI GI NO: 28278399 NR Description: Similar to RIKEN cDNA 1810059J10 gene
  misc_feature (6)..(141): NCBI GI NO: 24645863 NR Description: CG6672-PA [Drosophila melanogaster]
MNYHSVCLHVLADSIRSAGLILASWFLSLGIENAEVLCLGIVSVAVFMLVLPLFKATGNILLQIAPSNVPPSAFTKCSRQIAACEDVSEVWQGRFWELVPGQAVGSLSIRVKSGADDRAVLEYTHGLYQDLGIQDLTVQTDEFVGPVS

SEQ ID NO: 40407 - protein, 101 aa, Zea mays subsp. mays
  peptide (1)..(101): Ceres Seq. ID no. 12360534
  misc_feature (1)..(94): Pfam Name: Pfam Description:  Cation efflux family
  misc_feature (1)..(94): NCBI GI NO: 15229954 NR Description: unknown protein; protein id: At3g12100.1
  misc_feature (1)..(94): NCBI GI NO: 9294107 NR Description: contains similarity to cationtransporter~gene_id:T23B7
  misc_feature (1)..(94): NCBI GI NO: 12963579 NR Description: zinc transporter like 2 [Mus musculus]
  misc_feature (1)..(94): NCBI GI NO: 39645387 NR Description: Unknown (protein for MGC:76189)
  misc_feature (1)..(94): NCBI GI NO: 29504753 NR Description: Unknown (protein for MGC:60465) [Mus musculus]
  misc_feature (1)..(94): NCBI GI NO: 40255009 NR Description: zinc transporter like 2; zinc transporter ZnT-7
  misc_feature (1)..(94): NCBI GI NO: 19070122 NR Description: zinc transporter-like 2 protein [Homo sapiens]
  misc_feature (1)..(94): NCBI GI NO: 32172476 NR Description: putative cation transport protein OCT
  misc_feature (1)..(94): NCBI GI NO: 28278399 NR Description: Similar to RIKEN cDNA 1810059J10 gene
  misc_feature (1)..(94): NCBI GI NO: 24645863 NR Description: CG6672-PA [Drosophila melanogaster]
MLVLPLFKATGNILLQIAPSNVPPSAFTKCSRQIAACEDVSEVWQGRFWELVPGQAVGSLSIRVKSGADDRAVLEYTHGLYQDLGIQDLTVQTDEFVGPVS

SEQ ID NO: 40408 - DNA, 1597 bp, Zea mays subsp. mays
  misc_feature (1)..(1597): Ceres Seq. ID no. 12375425
gcacgagaccattacctagaacatcctaatcgaaaaaagtcaaaccaggcccggagccaccagcaaccaaccgagcgcatggaggccgcggcggcgaccgcgctcccgttcgcggcggccgtccccactgcctggagggtgcgcgcgagcccgcggacgcggcggcgctccgtggcggcgaagctggagcgcgggctcggcaagggggttcccaccaccaactacgtggtgccgctcgacaaggccaccgggatgacgcgcccgctcgtcgagatcctgcgggacctcaacaagcgcgtccccgacaagatcatcgaccccgacactaacaccgtcaactggtaccatgccaacagaatgcttagtttttacgcaccaggttggtgtggagaagttcgtgatgttatctattccgagaatggaactgtaaccgtggtatatcgagtgatacttaaaggaactgatggagaggcatacagagatgccacgggcacagcacagttacatgaggggcgcagggaagatgctgttgcagccgcagaggaagctgcattctgcaaagcctgcgcacggttcggttttggcctgtacctgtaccaccaggatgattctcattacgacgaccacttccattgaggctcagtctgcaaaagagttgatcataagctacaacatgcgttggatatgcccctggaaaaacttcgcatccagaatcaatttttgctctttgtgtagtatcatactcataacacagagaagtgaacctatgtagatactattcgaaaccttctttttattaatattagaattcgtgtatgggactatattcttggtgatctgcaatccccaagtagagaaattgtgcacagtcatgatttcaatcgtcacctgactcccttcaaagctgagtgggatccaaaggattacaccgaaacagttgcagtgattggccgttacataagtgagaactacaatggtgttgctctgcatccaattgattttatagatactagttctgggaagcttctggctgaggtgatggaccctgacataataacaatcagcccagtgaacaagctacatccgcaagatgacatcctagctacaggaagctcaaggtctattttcatatggaagccaaaaattgaagatgaacttactgaagaaagagccaagcatgacaatagtagtgatgacgactcaggtggtgattctggcggaaagaacaagaaagcaaagaagactcgcttcactcatgcagtaaagggaaagggcaaatccaaagtctgatgcttggtgtacatagtcggcagcattttgacaagaaagcgtccattaaccagctcctgatgcatctccttttgtaccatcttgccaactccctcaccccccccagctaaggtgctgaagacccgtatgaaacgcatgctgatagaccccatagttgtctcctgcatcaatgctcctaaggagttagccagttaggtttcggactcttttgaatcctgacatgcttatgatcacttgtcatttgtcaacgaggccttttaacggtttaatcctgtatcaacatataaatctcctgtacagttgcctg

SEQ ID NO: 40409 - protein, 211 aa, Zea mays subsp. mays
  peptide (1)..(211): Ceres Seq. ID no. 12375426
  misc_feature (63)..(201): NCBI GI NO: 15238827 NR Description: putative protein; protein id: At5g47870
  misc_feature (63)..(201): NCBI GI NO: 21593360 NR Description: unknown [Arabidopsis thaliana]
  misc_feature (38)..(157): NCBI GI NO: 27573357 NR Description: hypothetical protein
  misc_feature (45)..(202): NCBI GI NO: 15224018 NR Description: hypothetical protein; protein id: At1g71310.1
  misc_feature (32)..(204): NCBI GI NO: 34907336 NR Description: putative SnRK1-interacting protein 1
  misc_feature (26)..(204): NCBI GI NO: 9367245 NR Description: SnRK1-interacting protein 1
ARDHYLEHPNRKKSNQARSHQQPTERMEAAAATALPFAAAVPTAWRVRASPRTRRRSVAAKLERGLGKGVPTTNYVVPLDKATGMTRPLVEILRDLNKRVPDKIIDPDTNTVNWYHANRMLSFYAPGWCGEVRDVIYSENGTVTVVYRVILKGTDGEAYRDATGTAQLHEGRREDAVAAAEEAAFCKACARFGFGLYLYHQDDSHYDDHFH

SEQ ID NO: 40410 - protein, 185 aa, Zea mays subsp. mays
  peptide (1)..(185): Ceres Seq. ID no. 12375427
  misc_feature (37)..(175): NCBI GI NO: 15238827 NR Description: putative protein; protein id: At5g47870
  misc_feature (37)..(175): NCBI GI NO: 21593360 NR Description: unknown [Arabidopsis thaliana]
  misc_feature (12)..(131): NCBI GI NO: 27573357 NR Description: hypothetical protein
  misc_feature (19)..(176): NCBI GI NO: 15224018 NR Description: hypothetical protein; protein id: At1g71310.1
  misc_feature (6)..(178): NCBI GI NO: 34907336 NR Description: putative SnRK1-interacting protein 1
  misc_feature (1)..(178): NCBI GI NO: 9367245 NR Description: SnRK1-interacting protein 1
MEAAAATALPFAAAVPTAWRVRASPRTRRRSVAAKLERGLGKGVPTTNYVVPLDKATGMTRPLVEILRDLNKRVPDKIIDPDTNTVNWYHANRMLSFYAPGWCGEVRDVIYSENGTVTVVYRVILKGTDGEAYRDATGTAQLHEGRREDAVAAAEEAAFCKACARFGFGLYLYHQDDSHYDDHFH

SEQ ID NO: 40411 - protein, 127 aa, Zea mays subsp. mays
  peptide (1)..(127): Ceres Seq. ID no. 12375428
  misc_feature (1)..(117): NCBI GI NO: 15238827 NR Description: putative protein; protein id: At5g47870
  misc_feature (1)..(117): NCBI GI NO: 21593360 NR Description: unknown [Arabidopsis thaliana]
  misc_feature (1)..(73): NCBI GI NO: 27573357 NR Description: hypothetical protein
  misc_feature (1)..(118): NCBI GI NO: 15224018 NR Description: hypothetical protein; protein id: At1g71310.1
  misc_feature (1)..(120): NCBI GI NO: 34907336 NR Description: putative SnRK1-interacting protein 1
  misc_feature (1)..(120): NCBI GI NO: 9367245 NR Description: SnRK1-interacting protein 1
MTRPLVEILRDLNKRVPDKIIDPDTNTVNWYHANRMLSFYAPGWCGEVRDVIYSENGTVTVVYRVILKGTDGEAYRDATGTAQLHEGRREDAVAAAEEAAFCKACARFGFGLYLYHQDDSHYDDHFH

SEQ ID NO: 40412 - DNA, 1128 bp, Zea mays subsp. mays
  misc_feature (1)..(1128): Ceres Seq. ID no. 12588914
ctctccaagactccaatcccccaaccaccagaaccagcgccagctctaacgtcacctctgatttctctctcctctctattgctagctgctttattataagtagcagctgcagcaggcaggagctgcacacacccatccaattccagctgctgatcttgatcctgcaccccgagccgtacacaagagctagtcggtagaacttgcaggagcggagcagaactaagtgcagagaacaggacatatggctacgccggcggtgaaggtttacgggtgggctatctcgccgttcgtatcgcgggctctgctggccctggaggaggccggcgtcgactacgagctcgtccccatgagccgccaggacggcgaccaccgccgcccggagcacctcgccaggaaccctttcgggaaggtgccggtgctcgaggatggcgacctcacgctcttcgaatcacgtgcgatcgcgaggcatgttctccggaagcacaagccggagctgctgggcggcggcaggctggagcagacggcgatggtggacgtgtggctggaggtggaggcccaccagctgagcccgccggcgatcgccatcgtggtggagtgcgtgttcgcgccgttcctgggccgcgagcgcaaccaggcggtggtggacgagaacgtggagaagctcaagaaggtgctggaggtgtacgaggcgcggctggccacgtgcacgtacctcgccggcgacttcctcagcctcgccgacctcagccccttcaccatcatgcactgcctcatggccaccgagtacgccgctctcgtccatgcgctcccgcacgtcagcgcctggtggcagggcctcgccgcgcgcccggcggccaacaaggtggcgcagttcatgccggtcggcgccggagcgcccaaggaacaggagtgacgatgaagcgatcgaagcgacttgtgttgttgtgcttgattagttaattggaaaccttctcactcatctagtccatcatggtgcctgcttttctttatactatttgtcttaattttgctgctttctccacggaataatagtagagatttggaaatgtaatgtattttatccaaatatattggattttcaagcaatatagtatggttttcgctgcc

SEQ ID NO: 40413 - protein, 223 aa, Zea mays subsp. mays
  peptide (1)..(223): Ceres Seq. ID no. 12588915
  misc_feature (1)..(223): NCBI GI NO: 1170092 NR Description: GLUTATHIONE S-TRANSFERASE IV
  misc_feature (1)..(223): NCBI GI NO: 11385481 NR Description: glutathione S-transferase GST 15 [Zea mays]
  misc_feature (4)..(223): NCBI GI NO: 23504741 NR Description: glutathione transferase F3 [Triticum aestivum]
  misc_feature (1)..(223): NCBI GI NO: 23504739 NR Description: glutathione transferase F2 [Triticum aestivum]
  misc_feature (6)..(217): NCBI GI NO: 23504743 NR Description: glutathione transferase F4 [Triticum aestivum]
  misc_feature (6)..(217): NCBI GI NO: 11177841 NR Description: putative glutathione S-transferase OsGSTF5
  misc_feature (4)..(217): NCBI GI NO: 11385467 NR Description: glutathione S-transferase GST 8 [Zea mays]
  misc_feature (6)..(217): NCBI GI NO: 34914740 NR Description: putative glutathione S-transferase
  misc_feature (6)..(216): NCBI GI NO: 554565 NR Description: glutathione S-transferase
  misc_feature (6)..(216): NCBI GI NO: 168489 NR Description: glutathione S-transferase I
MATPAVKVYGWAISPFVSRALLALEEAGVDYELVPMSRQDGDHRRPEHLARNPFGKVPVLEDGDLTLFESRAIARHVLRKHKPELLGGGRLEQTAMVDVWLEVEAHQLSPPAIAIVVECVFAPFLGRERNQAVVDENVEKLKKVLEVYEARLATCTYLAGDFLSLADLSPFTIMHCLMATEYAALVHALPHVSAWWQGLAARPAANKVAQFMPVGAGAPKEQE

SEQ ID NO: 40414 - protein, 188 aa, Zea mays subsp. mays
  peptide (1)..(188): Ceres Seq. ID no. 12588916
  misc_feature (1)..(188): NCBI GI NO: 1170092 NR Description: GLUTATHIONE S-TRANSFERASE IV
  misc_feature (1)..(188): NCBI GI NO: 11385481 NR Description: glutathione S-transferase GST 15 [Zea mays]
  misc_feature (1)..(188): NCBI GI NO: 23504741 NR Description: glutathione transferase F3 [Triticum aestivum]
  misc_feature (1)..(188): NCBI GI NO: 23504739 NR Description: glutathione transferase F2 [Triticum aestivum]
  misc_feature (1)..(182): NCBI GI NO: 23504743 NR Description: glutathione transferase F4 [Triticum aestivum]
  misc_feature (1)..(182): NCBI GI NO: 11177841 NR Description: putative glutathione S-transferase OsGSTF5
  misc_feature (1)..(182): NCBI GI NO: 11385467 NR Description: glutathione S-transferase GST 8 [Zea mays]
  misc_feature (1)..(182): NCBI GI NO: 34914740 NR Description: putative glutathione S-transferase
  misc_feature (1)..(181): NCBI GI NO: 554565 NR Description: glutathione S-transferase
  misc_feature (1)..(181): NCBI GI NO: 168489 NR Description: glutathione S-transferase I
MSRQDGDHRRPEHLARNPFGKVPVLEDGDLTLFESRAIARHVLRKHKPELLGGGRLEQTAMVDVWLEVEAHQLSPPAIAIVVECVFAPFLGRERNQAVVDENVEKLKKVLEVYEARLATCTYLAGDFLSLADLSPFTIMHCLMATEYAALVHALPHVSAWWQGLAARPAANKVAQFMPVGAGAPKEQE

SEQ ID NO: 40415 - protein, 128 aa, Zea mays subsp. mays
  peptide (1)..(128): Ceres Seq. ID no. 12588917
  misc_feature (1)..(128): NCBI GI NO: 1170092 NR Description: GLUTATHIONE S-TRANSFERASE IV
  misc_feature (1)..(128): NCBI GI NO: 11385481 NR Description: glutathione S-transferase GST 15 [Zea mays]
  misc_feature (1)..(128): NCBI GI NO: 23504741 NR Description: glutathione transferase F3 [Triticum aestivum]
  misc_feature (1)..(128): NCBI GI NO: 23504739 NR Description: glutathione transferase F2 [Triticum aestivum]
  misc_feature (1)..(122): NCBI GI NO: 23504743 NR Description: glutathione transferase F4 [Triticum aestivum]
  misc_feature (1)..(122): NCBI GI NO: 11177841 NR Description: putative glutathione S-transferase OsGSTF5
  misc_feature (1)..(122): NCBI GI NO: 11385467 NR Description: glutathione S-transferase GST 8 [Zea mays]
  misc_feature (1)..(122): NCBI GI NO: 34914740 NR Description: putative glutathione S-transferase
  misc_feature (1)..(121): NCBI GI NO: 554565 NR Description: glutathione S-transferase
  misc_feature (1)..(121): NCBI GI NO: 168489 NR Description: glutathione S-transferase I
MVDVWLEVEAHQLSPPAIAIVVECVFAPFLGRERNQAVVDENVEKLKKVLEVYEARLATCTYLAGDFLSLADLSPFTIMHCLMATEYAALVHALPHVSAWWQGLAARPAANKVAQFMPVGAGAPKEQE

SEQ ID NO: 40416 - DNA, 1229 bp, Zea mays subsp. mays
  misc_feature (1)..(1229): Ceres Seq. ID no. 12368710
gcacgagaccattacctagaacatcctaatcaaaaaatcaagctgcccattccctcgtgacagcagctgcctgcctgctccgaggcgccacccagctcttcctcgccccagcagccgcttcccgagatccttttcactttcaccaccagggtacatagaccgcatctgcggtgctctgcgctcctcggactcgatttgttggttcatccatccagctgccgccggacgtcgatcagctacctatcttgaaaccacaggaccgagcgtggaaactcccggaccggacattccattttccattccgaagggggggtgagaaggcggggaatgagtacaaccaaggtgaagagacgtgtgggcaagtatgagctcggccggaccataggcgagggcaccttcgcgaaggtcaggttcgcgagggacacggtcaccggcgaggccgtggccattaagatcctggacaaggagaaggtcctcaggcacaagatggttgagcagatcaagcgggagatctcgacgatgaagctgatcaagcaccctaacgtcgtccgcatatacgaggtgatgggaagtaaaacaaagatctacattgtgttagaattcgctaccggtggcgagctctttgatacaattgttaaccatggtcgaatgagggaagacgaggcaaggaggtacttccaacagttaatcaatgcagttgattattgtcatagcaggggtgtgtaccaccgggatttaaaacctgaaaatttgctgcttgattcatatggtaacctgaaggtctctgactttgggctcagcgcgctatctcagcaaatcaaggatgatggactgctgcacacaacttgtgggactccaaactatgttgcaccagaggtccttgaagatcaaggctacgatggagcaatggctgatctgtggtcatgtggagttatcctgtttgttctgctagcagggtatttgccgtttgaggattctaatctcatgactttgtataagaaaatatcaaatgcagaatttacatttccaccatggacatcttttcctgccaagaggttgttaacaagaatccttgatccaaatccaatgacgagaataacaatcccagaaatattagaggatgagtggttcaaaaagggctacaagcgcccagaatttgatgaacaatatgacaccacattggatgatgtggatgccgtcttcaatgattcagaagagcaccatgtggc

SEQ ID NO: 40417 - protein, 300 aa, Zea mays subsp. mays
  peptide (1)..(300): Ceres Seq. ID no. 12368711
  misc_feature (13)..(268): Pfam Name: Pfam Description:  Protein kinase domain
  misc_feature (1)..(299): NCBI GI NO: 7446371 NR Description: probable serine/threonine kinase (EC 2
  misc_feature (1)..(299): NCBI GI NO: 7446372 NR Description: probable serine/threonine kinase (EC 2
  misc_feature (5)..(299): NCBI GI NO: 30683328 NR Description: CBL-interacting protein kinase 3
  misc_feature (5)..(299): NCBI GI NO: 30683332 NR Description: CBL-interacting protein kinase 3
  misc_feature (5)..(299): NCBI GI NO: 30683336 NR Description: CBL-interacting protein kinase 3
  misc_feature (1)..(299): NCBI GI NO: 30688193 NR Description: NAF specific protein kinase family
  misc_feature (2)..(297): NCBI GI NO: 18397430 NR Description: serine/threonine kinase, putative
  misc_feature (1)..(297): NCBI GI NO: 15223317 NR Description: serine threonine kinase, putative
  misc_feature (1)..(297): NCBI GI NO: 30677901 NR Description: CBL-interacting protein kinase 9
  misc_feature (1)..(297): NCBI GI NO: 14423524 NR Description: similar to wpk4 protein kinase
MSTTKVKRRVGKYELGRTIGEGTFAKVRFARDTVTGEAVAIKILDKEKVLRHKMVEQIKREISTMKLIKHPNVVRIYEVMGSKTKIYIVLEFATGGELFDTIVNHGRMREDEARRYFQQLINAVDYCHSRGVYHRDLKPENLLLDSYGNLKVSDFGLSALSQQIKDDGLLHTTCGTPNYVAPEVLEDQGYDGAMADLWSCGVILFVLLAGYLPFEDSNLMTLYKKISNAEFTFPPWTSFPAKRLLTRILDPNPMTRITIPEILEDEWFKKGYKRPEFDEQYDTTLDDVDAVFNDSEEHHV

SEQ ID NO: 40418 - protein, 247 aa, Zea mays subsp. mays
  peptide (1)..(247): Ceres Seq. ID no. 12368712
  misc_feature (1)..(215): Pfam Name: Pfam Description:  Protein kinase domain
  misc_feature (1)..(246): NCBI GI NO: 7446371 NR Description: probable serine/threonine kinase (EC 2
  misc_feature (1)..(246): NCBI GI NO: 7446372 NR Description: probable serine/threonine kinase (EC 2
  misc_feature (1)..(246): NCBI GI NO: 30683328 NR Description: CBL-interacting protein kinase 3
  misc_feature (1)..(246): NCBI GI NO: 30683332 NR Description: CBL-interacting protein kinase 3
  misc_feature (1)..(246): NCBI GI NO: 30683336 NR Description: CBL-interacting protein kinase 3
  misc_feature (1)..(246): NCBI GI NO: 30688193 NR Description: NAF specific protein kinase family
  misc_feature (1)..(244): NCBI GI NO: 18397430 NR Description: serine/threonine kinase, putative
  misc_feature (1)..(244): NCBI GI NO: 15223317 NR Description: serine threonine kinase, putative
  misc_feature (1)..(244): NCBI GI NO: 30677901 NR Description: CBL-interacting protein kinase 9
  misc_feature (1)..(244): NCBI GI NO: 14423524 NR Description: similar to wpk4 protein kinase
MVEQIKREISTMKLIKHPNVVRIYEVMGSKTKIYIVLEFATGGELFDTIVNHGRMREDEARRYFQQLINAVDYCHSRGVYHRDLKPENLLLDSYGNLKVSDFGLSALSQQIKDDGLLHTTCGTPNYVAPEVLEDQGYDGAMADLWSCGVILFVLLAGYLPFEDSNLMTLYKKISNAEFTFPPWTSFPAKRLLTRILDPNPMTRITIPEILEDEWFKKGYKRPEFDEQYDTTLDDVDAVFNDSEEHHV

SEQ ID NO: 40419 - protein, 236 aa, Zea mays subsp. mays
  peptide (1)..(236): Ceres Seq. ID no. 12368713
  misc_feature (1)..(204): Pfam Name: Pfam Description:  Protein kinase domain
  misc_feature (1)..(235): NCBI GI NO: 7446371 NR Description: probable serine/threonine kinase (EC 2
  misc_feature (1)..(235): NCBI GI NO: 7446372 NR Description: probable serine/threonine kinase (EC 2
  misc_feature (1)..(235): NCBI GI NO: 30683328 NR Description: CBL-interacting protein kinase 3
  misc_feature (1)..(235): NCBI GI NO: 30683332 NR Description: CBL-interacting protein kinase 3
  misc_feature (1)..(235): NCBI GI NO: 30683336 NR Description: CBL-interacting protein kinase 3
  misc_feature (1)..(235): NCBI GI NO: 30688193 NR Description: NAF specific protein kinase family
  misc_feature (1)..(233): NCBI GI NO: 18397430 NR Description: serine/threonine kinase, putative
  misc_feature (1)..(233): NCBI GI NO: 15223317 NR Description: serine threonine kinase, putative
  misc_feature (1)..(233): NCBI GI NO: 30677901 NR Description: CBL-interacting protein kinase 9
  misc_feature (1)..(233): NCBI GI NO: 14423524 NR Description: similar to wpk4 protein kinase
MKLIKHPNVVRIYEVMGSKTKIYIVLEFATGGELFDTIVNHGRMREDEARRYFQQLINAVDYCHSRGVYHRDLKPENLLLDSYGNLKVSDFGLSALSQQIKDDGLLHTTCGTPNYVAPEVLEDQGYDGAMADLWSCGVILFVLLAGYLPFEDSNLMTLYKKISNAEFTFPPWTSFPAKRLLTRILDPNPMTRITIPEILEDEWFKKGYKRPEFDEQYDTTLDDVDAVFNDSEEHHV

SEQ ID NO: 40420 - DNA, 1457 bp, Zea mays subsp. mays
  misc_feature (1)..(1457): Ceres Seq. ID no. 12360057
  misc_feature (1294)..(1294): n is a, c, t, g, unknown, or other
  misc_feature (1423)..(1423): n is a, c, t, g, unknown, or other
  misc_feature (1424)..(1424): n is a, c, t, g, unknown, or other
  misc_feature (1378)..(1378): n is a, c, t, g, unknown, or other
  misc_feature (1427)..(1427): n is a, c, t, g, unknown, or other
atttattaaactttcgcaagcgcaggtatctccccacagggcagcgcgtgcggaaaccctagtcgccgccgatgtcggaccctttctacccgtactaccgcggagccttcccgggcggcgacggtgcgcagccgccgccacgttactcggattttgaggtcgacctcatcgcggcccgttacgccggcaccctattgccttatccatcctctgccgacgtcggcgccttcgactcgtatgtcggcgcgagacgatccgcggaaggccccgaatgttgaagattcttatcctgagcgaccaggggaaccagattgtccttatttattgaataatagatgtaagtttaaatctaaatgcaagttcaaccatccgaaggatatggtgaatgcattaggaacaggaacaaacaatgaatctctaattgctgatagcgctgtcttaccagtgaggccttctgaacccatttgtgtgttctatgcaaaaacaggcaaatgcaaatttggtgccatttgcaagttcaatcatccaaaagatattaagacatcacctttgattgcaaaggaaaccatatatacagcaacaactgatgcagcagatgccccgaccgaggcgtgtaacgcaaaggggcttcctataagacaaggtgaagtggattgctcgttttatatgaagacagctgcaaatatggttctatttgtcgcttcaaccatcctgatcggccagggccagctgcggatatagcttttatggttccactggttcaagctactcttccttcatcagcacccattgtccctgcagtggttgaacctttttcaatgatctatcctcaaaggccaggagaaactgtttgtgatttttacatgaagacaggatcttgcaagtattctcagaaatgcaagtttcaccaccccatcagtcgttttgccccgcattccaaagaaaacggggatcctcaacagcctgcgacacttgctagcctgccaaggagagaggacgctgaggcttgtgccttctacatgaggtctggcatgtgcaggttcggtgcgcactgcaagttcgaccaccctcctcgcgaggaggctatttccgagctgcaggcagccggaaaggaaggaatagaagggccgagcctcgtccagcgcgaccatgatgtctaatactgtatcctgcttcagtatgtaataccatgtgaatcgcactgttagttaatgcttggtgctgtcagtcttgttgggagtctgactcgtaaagctcattatcatcggaagtgtttgtcggaggagtgctggcnctaactatttatcttcagttggttgtcgtgttgccaacttgcgatgtcaaggtgcatatttcagttttttagagtaaaaatgcnctttacatcctgccgccaaacttaactatgggcctgtttatggcnntgnttggtttagcttttttttaccagcttttcc

SEQ ID NO: 40421 - protein, 167 aa, Zea mays subsp. mays
  peptide (1)..(167): Ceres Seq. ID no. 12360058
  misc_feature (72)..(98): Pfam Name: and similar Pfam Description: Zinc finger C-x8-C-x5-C-x3-H type
  misc_feature (7)..(145): NCBI GI NO: 34912676 NR Description: P0686E09.7
  misc_feature (6)..(148): NCBI GI NO: 12321969 NR Description: zinc finger protein, putative, 5' partial
  misc_feature (6)..(148): NCBI GI NO: 22331028 NR Description: hypothetical protein; protein id: At3g12680
  misc_feature (6)..(148): NCBI GI NO: 22507458 NR Description: Unknown (protein for MGC:30371) [Mus musculus]
  misc_feature (6)..(148): NCBI GI NO: 11994409 NR Description: zinc finger protein-like [Arabidopsis thaliana]
  misc_feature (38)..(151): NCBI GI NO: 34912676 NR Description: P0686E09.7
  misc_feature (56)..(98): NCBI GI NO: 12321969 NR Description: zinc finger protein, putative, 5' partial
  misc_feature (54)..(98): NCBI GI NO: 34912676 NR Description: P0686E09.7
  misc_feature (56)..(98): NCBI GI NO: 22331028 NR Description: hypothetical protein; protein id: At3g12680
  misc_feature (67)..(146): NCBI GI NO: 22331028 NR Description: hypothetical protein; protein id: At3g12680
MSARDDPRKAPNVEDSYPERPGEPDCPYLLNNRCKFKSKCKFNHPKDMVNALGTGTNNESLIADSAVLPVRPSEPICVFYAKTGKCKFGAICKFNHPKDIKTSPLIAKETIYTATTDAADAPTEACNAKGLPIRQGEVDCSFYMKTAANMVLFVASTILIGQGQLRI

SEQ ID NO: 40422 - protein, 137 aa, Zea mays subsp. mays
  peptide (1)..(137): Ceres Seq. ID no. 12360059
  misc_feature (1)..(102): NCBI GI NO: 34912676 NR Description: P0686E09.7
  misc_feature (1)..(121): NCBI GI NO: 12321969 NR Description: zinc finger protein, putative, 5' partial
  misc_feature (1)..(121): NCBI GI NO: 22331028 NR Description: hypothetical protein; protein id: At3g12680
  misc_feature (1)..(123): NCBI GI NO: 22507458 NR Description: Unknown (protein for MGC:30371) [Mus musculus]
  misc_feature (1)..(121): NCBI GI NO: 11994409 NR Description: zinc finger protein-like [Arabidopsis thaliana]
  misc_feature (79)..(110): NCBI GI NO: 34912676 NR Description: P0686E09.7
  misc_feature (1)..(32): NCBI GI NO: 22507458 NR Description: Unknown (protein for MGC:30371) [Mus musculus]
  misc_feature (2)..(108): NCBI GI NO: 30690809 NR Description: expressed protein [Arabidopsis thaliana]
  misc_feature (11)..(110): NCBI GI NO: 6728979 NR Description: zinc finger protein 1 (zfn1)
  misc_feature (2)..(108): NCBI GI NO: 25409067 NR Description: hypothetical protein At2g47850
MVPLVQATLPSSAPIVPAVVEPFSMIYPQRPGETVCDFYMKTGSCKYSQKCKFHHPISRFAPHSKENGDPQQPATLASLPRREDAEACAFYMRSGMCRFGAHCKFDHPPREEAISELQAAGKEGIEGPSLVQRDHDV

SEQ ID NO: 40423 - protein, 120 aa, Zea mays subsp. mays
  peptide (1)..(120): Ceres Seq. ID no. 12360060
  misc_feature (25)..(51): Pfam Name: and similar Pfam Description: Zinc finger C-x8-C-x5-C-x3-H type
  misc_feature (1)..(98): NCBI GI NO: 34912676 NR Description: P0686E09.7
  misc_feature (1)..(101): NCBI GI NO: 12321969 NR Description: zinc finger protein, putative, 5' partial
  misc_feature (1)..(101): NCBI GI NO: 22331028 NR Description: hypothetical protein; protein id: At3g12680
  misc_feature (1)..(101): NCBI GI NO: 22507458 NR Description: Unknown (protein for MGC:30371) [Mus musculus]
  misc_feature (1)..(101): NCBI GI NO: 11994409 NR Description: zinc finger protein-like [Arabidopsis thaliana]
  misc_feature (1)..(104): NCBI GI NO: 34912676 NR Description: P0686E09.7
  misc_feature (9)..(51): NCBI GI NO: 12321969 NR Description: zinc finger protein, putative, 5' partial
  misc_feature (7)..(51): NCBI GI NO: 34912676 NR Description: P0686E09.7
  misc_feature (9)..(51): NCBI GI NO: 22331028 NR Description: hypothetical protein; protein id: At3g12680
  misc_feature (20)..(99): NCBI GI NO: 22331028 NR Description: hypothetical protein; protein id: At3g12680
MVNALGTGTNNESLIADSAVLPVRPSEPICVFYAKTGKCKFGAICKFNHPKDIKTSPLIAKETIYTATTDAADAPTEACNAKGLPIRQGEVDCSFYMKTAANMVLFVASTILIGQGQLRI

SEQ ID NO: 40424 - DNA, 1404 bp, Zea mays subsp. mays
  misc_feature (1)..(1404): Ceres Seq. ID no. 12418197
gcacgagaccattacctagaacatcctaatcgaaaaagagcacactagcttagctacacacaggccacaggggcacaagaaacacctgccgatcgacggcgatggacttcgacgaccacgacgacggcgacgaggaggagatggcgccgatgccggtgagctccagctacgacgccccgcctctggcagccggcgggtttggtgcaccggcgccgcccaagccgcccggcgagcgcgccaaggccccgggcgggcggtaccgcgagtgcctcaagaaccacgcggtcggcatcgggggccacgccgtggacgggtgcggcgagttcatgccggccggcgaggagggcacgctcgacgcgctccgctgcgccgcgtgcggctgccaccgcaacttccaccgcaaggagtccccggagggctcccccgccgcgctggtcgcctacggaggcggcgccgccacgccgcaccaccaccacttctccccgtactaccgcaccccgggccgggtcgtacttccaccaccatcaccagcagcagcagccgatccacatggccgccgcgggccaccacacgccgcggccgctggcgctgccgtccacgtcccacagctggcgcgacgacggcgacgactacctctccggggggatggcggccgccgggccggtgtcggcgctgggcccgctgggcctgggcggcggcgccgggccctctggctccggcgggtccggcaagaagcggttccgcaccaagttcacccaggagcagaaggacaggatgctggcgttcgcggagcgcgtggggtggcgcatccagaagcacgacgaggccgccgtgcagcagttctgcgacgaggtctgcgtcaagcgccacgtgctcaaggtgtggatgcacaacaacaagcacaccctcggcaagaagccgtaggcgtagctaagcagcaggcagcgtcacaccatgacacccccaccccaacgcgtgtactgtacacacgcaagagccacgcccacgcgcgcatgcatcacacacacacacacagcggttgatcgcagtcgcagatcgatcgacggtggccgtggccagcctctcctccgggtacgggtaggtacacctgcatcctctttgttagcattcggctccggcgccttcgtgccgtggcggccggagtaggttagttgcagtaagtaactcgtagcgaggtgctcgatcgatctttcttgctcggctttattaggccgttcttttttacttctcatttaaccgtacttgctggtgttgtttattaattaattcctgcggcatgggccatttgccggtttgcttggttgttcttggcgttaataattcttcaatggcaaatgtacttggtgttgcgatgccaacaagtgtatctggggattggggctg

SEQ ID NO: 40425 - protein, 313 aa, Zea mays subsp. mays
  peptide (1)..(313): Ceres Seq. ID no. 12418198
  misc_feature (52)..(103): Pfam Name: Pfam Description:  ZF-HD protein dimerisation region
  misc_feature (53)..(147): NCBI GI NO: 13277220 NR Description: ZF-HD homeobox protein [Flaveria bidentis]
  misc_feature (52)..(106): NCBI GI NO: 15226993 NR Description: hypothetical protein; protein id: At2g02540
  misc_feature (52)..(106): NCBI GI NO: 20148768 NR Description: hypothetical protein At2g02540/T822.16
  misc_feature (47)..(125): NCBI GI NO: 15223757 NR Description: hypothetical protein; protein id: At1g14440
  misc_feature (41)..(144): NCBI GI NO: 13277216 NR Description: ZF-HD homeobox protein [Flaveria trinervia]
  misc_feature (37)..(102): NCBI GI NO: 18398714 NR Description: expressed protein; protein id: At2g18350
  misc_feature (53)..(149): NCBI GI NO: 18421904 NR Description: putative protein; protein id: At5g39760
  misc_feature (53)..(138): NCBI GI NO: 15222382 NR Description: hypothetical protein; protein id: At1g69600.1
  misc_feature (53)..(149): NCBI GI NO: 21592512 NR Description: unknown [Arabidopsis thaliana]
  misc_feature (16)..(102): NCBI GI NO: 15230335 NR Description: putative protein; protein id: At3g50890
MDFDDHDDGDEEEMAPMPVSSSYDAPPLAAGGFGAPAPPKPPGERAKAPGGRYRECLKNHAVGIGGHAVDGCGEFMPAGEEGTLDALRCAACGCHRNFHRKESPEGSPAALVAYGGGAATPHHHHFSPYYRTPGRVVLPPPSPAAAADPHGRRGPPHAAAAGAAVHVPQLARRRRRLPLRGDGGRRAGVGAGPAGPGRRRRALWLRRVRQEAVPHQVHPGAEGQDAGVRGARGVAHPEARRGRRAAVLRRGLRQAPRAQGVDAQQQAHPRQEAVGVAKQQAASHHDTPTPTRVLYTRKSHAHARMHHTHTHSG

SEQ ID NO: 40426 - protein, 300 aa, Zea mays subsp. mays
  peptide (1)..(300): Ceres Seq. ID no. 12418199
  misc_feature (39)..(90): Pfam Name: Pfam Description:  ZF-HD protein dimerisation region
  misc_feature (40)..(134): NCBI GI NO: 13277220 NR Description: ZF-HD homeobox protein [Flaveria bidentis]
  misc_feature (39)..(93): NCBI GI NO: 15226993 NR Description: hypothetical protein; protein id: At2g02540
  misc_feature (39)..(93): NCBI GI NO: 20148768 NR Description: hypothetical protein At2g02540/T822.16
  misc_feature (34)..(112): NCBI GI NO: 15223757 NR Description: hypothetical protein; protein id: At1g14440
  misc_feature (28)..(131): NCBI GI NO: 13277216 NR Description: ZF-HD homeobox protein [Flaveria trinervia]
  misc_feature (24)..(89): NCBI GI NO: 18398714 NR Description: expressed protein; protein id: At2g18350
  misc_feature (40)..(136): NCBI GI NO: 18421904 NR Description: putative protein; protein id: At5g39760
  misc_feature (40)..(125): NCBI GI NO: 15222382 NR Description: hypothetical protein; protein id: At1g69600.1
  misc_feature (40)..(136): NCBI GI NO: 21592512 NR Description: unknown [Arabidopsis thaliana]
  misc_feature (3)..(89): NCBI GI NO: 15230335 NR Description: putative protein; protein id: At3g50890
MAPMPVSSSYDAPPLAAGGFGAPAPPKPPGERAKAPGGRYRECLKNHAVGIGGHAVDGCGEFMPAGEEGTLDALRCAACGCHRNFHRKESPEGSPAALVAYGGGAATPHHHHFSPYYRTPGRVVLPPPSPAAAADPHGRRGPPHAAAAGAAVHVPQLARRRRRLPLRGDGGRRAGVGAGPAGPGRRRRALWLRRVRQEAVPHQVHPGAEGQDAGVRGARGVAHPEARRGRRAAVLRRGLRQAPRAQGVDAQQQAHPRQEAVGVAKQQAASHHDTPTPTRVLYTRKSHAHARMHHTHTHSG

SEQ ID NO: 40427 - protein, 297 aa, Zea mays subsp. mays
  peptide (1)..(297): Ceres Seq. ID no. 12418200
  misc_feature (36)..(87): Pfam Name: Pfam Description:  ZF-HD protein dimerisation region
  misc_feature (37)..(131): NCBI GI NO: 13277220 NR Description: ZF-HD homeobox protein [Flaveria bidentis]
  misc_feature (36)..(90): NCBI GI NO: 15226993 NR Description: hypothetical protein; protein id: At2g02540
  misc_feature (36)..(90): NCBI GI NO: 20148768 NR Description: hypothetical protein At2g02540/T822.16
  misc_feature (31)..(109): NCBI GI NO: 15223757 NR Description: hypothetical protein; protein id: At1g14440
  misc_feature (25)..(128): NCBI GI NO: 13277216 NR Description: ZF-HD homeobox protein [Flaveria trinervia]
  misc_feature (21)..(86): NCBI GI NO: 18398714 NR Description: expressed protein; protein id: At2g18350
  misc_feature (37)..(133): NCBI GI NO: 18421904 NR Description: putative protein; protein id: At5g39760
  misc_feature (37)..(122): NCBI GI NO: 15222382 NR Description: hypothetical protein; protein id: At1g69600.1
  misc_feature (37)..(133): NCBI GI NO: 21592512 NR Description: unknown [Arabidopsis thaliana]
  misc_feature (1)..(86): NCBI GI NO: 15230335 NR Description: putative protein; protein id: At3g50890
MPVSSSYDAPPLAAGGFGAPAPPKPPGERAKAPGGRYRECLKNHAVGIGGHAVDGCGEFMPAGEEGTLDALRCAACGCHRNFHRKESPEGSPAALVAYGGGAATPHHHHFSPYYRTPGRVVLPPPSPAAAADPHGRRGPPHAAAAGAAVHVPQLARRRRRLPLRGDGGRRAGVGAGPAGPGRRRRALWLRRVRQEAVPHQVHPGAEGQDAGVRGARGVAHPEARRGRRAAVLRRGLRQAPRAQGVDAQQQAHPRQEAVGVAKQQAASHHDTPTPTRVLYTRKSHAHARMHHTHTHSG

SEQ ID NO: 40428 - DNA, 1621 bp, Zea mays subsp. mays
  misc_feature (1)..(1621): Ceres Seq. ID no. 12418615
gcacgagaccattacctagaacatcctaatcgaaaaaaccatttgtcggcgatcgccgtgctattgcttgggccttggactgagtaggtttggaggtagcgatacgagacactcgcccccgattcccctcccgttgccgaagcctgtgttgcagggatcgttcgcggaagcggtttttgatcggagagagagaaagagagagcgagggagggaggtggggatggacgcggcggcagcggcggcggcgcagatggagaggcactcgtcggcggcggcgcagatggagaggcactcgtcggcggcggccttcgtggagggcggcgttcaggacggctgcgatgacacctgcagcatctgcctcgagaccttctccgacagtgacccctccgcggtgaccagctgcaagcacgagttccacctccagtgcatcctcgagtggtgccagaggagctcccagtgccccatgtgttggcaggcaatcagcatgaaggaccctacgagccaagagctccttgaggccgtcgaggaaaagagcggaacgacgtgcaggaaaaaccacgcgcgcacaacccaccgtttttccgtcacccgctgctcggagatttcgaggtaccggtggatgcagacgacgccgagatcgaggagcggatcatgcagcacctggccgccgccgcagccattcgccggtcgcaccgccacgccagaagagaaggccgccgcagcagcagggcggcggcagctcatggccatggccacccacaaccacaagtcctgttctttccgtctgctggcgaggccactcctggtggttctggttccccgtctccgcatccgccgcggcaagaacatgctgcttcttctgtggtttctcctccgccattgcctgccgtggcctccgcagaaggaacggatgttgacagtactgcctcggctgatggcgctgtcgggccagatgacagtgtttccaggaggcagtcttcgcctgtcaaccacgatgaagctggaccatctgctgacgcgcagtcattctcagacacgatcaaatctaggctgcagtcaggtctctacaaagtacaaggactcccataacgaagagcacgcgcgggtggaaggagaggtggttcgcgcagagcagcgccatgtcgaatcttggctcggagatgaggagggaggtcggtgctgggatcgccgccgtttcccgcatgatcgagaagcagctggagacacgggatgggagtgggacagcaccgtcgtctgctaccgcttcgtctccagctcacgcccaccctggtccggatgcaagtagtagtcagggagctgctgttcccgctacaccacctgcagccgctctgaacaacgctacgcctgcagcagcgtgcgtgctctgaatgacgcctcgtcgtcttcgacagcttgaacgcgcgccaggatcatgttcagtgagtttacactaggtgtggttttcaagtgctttagatatgatgcttgcaatacaatgtgtgtcgcgtgtatagtcagtttgccaattagcctcattgttagccagtgaaacagatagtggatgccaagctactgttcgatcagtgaatgtttcagaataaagttggatacttggatgcgc

SEQ ID NO: 40429 - protein, 361 aa, Zea mays subsp. mays
  peptide (1)..(361): Ceres Seq. ID no. 12418616
  misc_feature (43)..(83): Pfam Name: RING finger Pfam Description: Zinc finger, C3HC4 type
  misc_feature (20)..(118): NCBI GI NO: 27819501 NR Description: putative zinc finger protein
  misc_feature (19)..(120): NCBI GI NO: 32493110 NR Description: putative RING-H2 zinc finger protein
  misc_feature (22)..(104): NCBI GI NO: 18420424 NR Description: Expressed protein; protein id: At5g22000
  misc_feature (22)..(104): NCBI GI NO: 30688252 NR Description: zinc finger
  misc_feature (22)..(104): NCBI GI NO: 26451710 NR Description: putative RING-H2 finger protein RHF2a
  misc_feature (25)..(104): NCBI GI NO: 30682750 NR Description: zinc finger
  misc_feature (25)..(104): NCBI GI NO: 26450997 NR Description: putative RING-H2 finger protein RHF1a
  misc_feature (40)..(104): NCBI GI NO: 11358783 NR Description: RING-H2 finger protein RHF1a
  misc_feature (25)..(104): NCBI GI NO: 25360953 NR Description: RING-H2 finger protein RHF1a
  misc_feature (1)..(91): NCBI GI NO: 18421807 NR Description: Expressed protein; protein id: At5g38895
MDAAAAAAAQMERHSSAAAQMERHSSAAAFVEGGVQDGCDDTCSICLETFSDSDPSAVTSCKHEFHLQCILEWCQRSSQCPMCWQAISMKDPTSQELLEAVEEKSGTTCRKNHARTTHRFSVTRCSEISRYRWMQTTPRSRSGSCSTWPPPQPFAGRTATPEEKAAAAAGRRQLMAMATHNHKSCSFRLLARPLLVVLVPRLRIRRGKNMLLLLWFLLRHCLPWPPQKERMLTVLPRLMALSGQMTVFPGGSLRLSTTMKLDHLLTRSHSQTRSNLGCSQVSTKYKDSHNEEHARVEGEVVRAEQRHVESWLGDEEGGRCWDRRRFPHDREAAGDTGWEWDSTVVCYRFVSSSRPPWSGCK

SEQ ID NO: 40430 - protein, 351 aa, Zea mays subsp. mays
  peptide (1)..(351): Ceres Seq. ID no. 12418617
  misc_feature (33)..(73): Pfam Name: RING finger Pfam Description: Zinc finger, C3HC4 type
  misc_feature (10)..(108): NCBI GI NO: 27819501 NR Description: putative zinc finger protein
  misc_feature (9)..(110): NCBI GI NO: 32493110 NR Description: putative RING-H2 zinc finger protein
  misc_feature (12)..(94): NCBI GI NO: 18420424 NR Description: Expressed protein; protein id: At5g22000
  misc_feature (12)..(94): NCBI GI NO: 30688252 NR Description: zinc finger
  misc_feature (12)..(94): NCBI GI NO: 26451710 NR Description: putative RING-H2 finger protein RHF2a
  misc_feature (15)..(94): NCBI GI NO: 30682750 NR Description: zinc finger
  misc_feature (15)..(94): NCBI GI NO: 26450997 NR Description: putative RING-H2 finger protein RHF1a
  misc_feature (30)..(94): NCBI GI NO: 11358783 NR Description: RING-H2 finger protein RHF1a
  misc_feature (15)..(94): NCBI GI NO: 25360953 NR Description: RING-H2 finger protein RHF1a
  misc_feature (1)..(81): NCBI GI NO: 18421807 NR Description: Expressed protein; protein id: At5g38895
MERHSSAAAQMERHSSAAAFVEGGVQDGCDDTCSICLETFSDSDPSAVTSCKHEFHLQCILEWCQRSSQCPMCWQAISMKDPTSQELLEAVEEKSGTTCRKNHARTTHRFSVTRCSEISRYRWMQTTPRSRSGSCSTWPPPQPFAGRTATPEEKAAAAAGRRQLMAMATHNHKSCSFRLLARPLLVVLVPRLRIRRGKNMLLLLWFLLRHCLPWPPQKERMLTVLPRLMALSGQMTVFPGGSLRLSTTMKLDHLLTRSHSQTRSNLGCSQVSTKYKDSHNEEHARVEGEVVRAEQRHVESWLGDEEGGRCWDRRRFPHDREAAGDTGWEWDSTVVCYRFVSSSRPPWSGCK

SEQ ID NO: 40431 - protein, 341 aa, Zea mays subsp. mays
  peptide (1)..(341): Ceres Seq. ID no. 12418618
  misc_feature (23)..(63): Pfam Name: RING finger Pfam Description: Zinc finger, C3HC4 type
  misc_feature (1)..(98): NCBI GI NO: 27819501 NR Description: putative zinc finger protein
  misc_feature (1)..(100): NCBI GI NO: 32493110 NR Description: putative RING-H2 zinc finger protein
  misc_feature (2)..(84): NCBI GI NO: 18420424 NR Description: Expressed protein; protein id: At5g22000
  misc_feature (2)..(84): NCBI GI NO: 30688252 NR Description: zinc finger
  misc_feature (2)..(84): NCBI GI NO: 26451710 NR Description: putative RING-H2 finger protein RHF2a
  misc_feature (5)..(84): NCBI GI NO: 30682750 NR Description: zinc finger
  misc_feature (5)..(84): NCBI GI NO: 26450997 NR Description: putative RING-H2 finger protein RHF1a
  misc_feature (20)..(84): NCBI GI NO: 11358783 NR Description: RING-H2 finger protein RHF1a
  misc_feature (5)..(84): NCBI GI NO: 25360953 NR Description: RING-H2 finger protein RHF1a
  misc_feature (1)..(71): NCBI GI NO: 18421807 NR Description: Expressed protein; protein id: At5g38895
MERHSSAAAFVEGGVQDGCDDTCSICLETFSDSDPSAVTSCKHEFHLQCILEWCQRSSQCPMCWQAISMKDPTSQELLEAVEEKSGTTCRKNHARTTHRFSVTRCSEISRYRWMQTTPRSRSGSCSTWPPPQPFAGRTATPEEKAAAAAGRRQLMAMATHNHKSCSFRLLARPLLVVLVPRLRIRRGKNMLLLLWFLLRHCLPWPPQKERMLTVLPRLMALSGQMTVFPGGSLRLSTTMKLDHLLTRSHSQTRSNLGCSQVSTKYKDSHNEEHARVEGEVVRAEQRHVESWLGDEEGGRCWDRRRFPHDREAAGDTGWEWDSTVVCYRFVSSSRPPWSGCK

SEQ ID NO: 40432 - DNA, 1288 bp, Zea mays subsp. mays
  misc_feature (1)..(1288): Ceres Seq. ID no. 12418262
gcacgagaccattacctagaacatcctaatcgaaaaacaatcccacaacccaagaagccacaagaaagcagcagcagcaccgcacggacctgacctccaactacaagcgacgatccaggctccagagccccacgcaaggccggaaggagacaggcagcagcccggcagagcagctaagccatggcggtggacctcatgtcctgcggcggcggggcgtacgagcaactggcgttccaggaggcagccgcggcggggctccgcagcctggagttgctcgcttcctcgctctccccgtgcggcgcggggcgggcggagtcgccgccgctcgggcagatcgccgaccaggcggtgtcccggttccggcgcgtcatcaacctgctggaccgcacggggcacgcccgcttccgccgcgcgcccgccgtcgccgcggtggagcccatagagacggagacgccagcgtcacagcaggcggcggcggagccgcctcatcaggctcagaacaaagccctgacgctggacttcgccaagtctgtcccgccggcagcgaacaagaaggccccgcgggcgccggccgtgtccgcgacttcgacctcgttcctgtcgtccgtgaccgcgggcggcgaagggagcgtgtccaaggggtgcagcctcgccgccgtgtcctcgggcaagccgcctctcccgaagcgcacgtcgccgtgccccgccgctgctccgccgggggcgcaccacgccgagtccggcgctggaggttgccactgctcgaagaagaagcgcagccggcagggcctgtcccggcgcacggtgcgcctacccgcggccgcggcaacgccggggtcgcagccgcccggccacgtgccggcgtcgtcggacgtaccccacgacgagtactcgtggcgcaagtacgggcagaagcccatcaaggggtccccttacccgcgcggctactaccggtgcagcagcgccaagggttgccccgcgcggaagcacgtggagcgcgccgccgacgacccggccgtgctcgtcgtcacctacgagggcgaccaccgccacgacggcgacggcgacggcgacggcggcgttggcgctggcgctgcccgctcccgcgcggcgtgaagatcgtttgcttcccgccgtagcagtcagtgtagcagcggtagtcaagtcaatcgatactagtagtagacctcttgtttcatttgttcttcggattagtggtagatcgagctttgctcctgtaaaaggaattaaagagcatttaaacttaatctcgccatgaactttctcc

SEQ ID NO: 40433 - protein, 311 aa, Zea mays subsp. mays
  peptide (1)..(311): Ceres Seq. ID no. 12418263
  misc_feature (233)..(291): Pfam Name: Pfam Description:  WRKY DNA -binding domain
  misc_feature (1)..(291): NCBI GI NO: 38175580 NR Description: putative DNA-binding protein NtWRKY3
  misc_feature (1)..(294): NCBI GI NO: 4894963 NR Description: DNA-binding protein WRKY3 [Avena sativa]
  misc_feature (3)..(297): NCBI GI NO: 38568048 NR Description: OSJNBa0065J03.18
  misc_feature (1)..(291): NCBI GI NO: 4760596 NR Description: DNA-binding protein NtWRKY3 [Nicotiana tabacum]
  misc_feature (1)..(291): NCBI GI NO: 18400580 NR Description: WRKY family transcription factor
  misc_feature (1)..(291): NCBI GI NO: 25348152 NR Description: probable WRKY-type DNA binding protein
  misc_feature (1)..(292): NCBI GI NO: 30689072 NR Description: WRKY family transcription factor
  misc_feature (1)..(292): NCBI GI NO: 22329054 NR Description: WRKY family transcription factor
  misc_feature (1)..(292): NCBI GI NO: 16604573 NR Description: putative putaive DNA-binding protein
  misc_feature (1)..(292): NCBI GI NO: 21537078 NR Description: putaive DNA-binding protein [Arabidopsis thaliana]
MAVDLMSCGGGAYEQLAFQEAAAAGLRSLELLASSLSPCGAGRAESPPLGQIADQAVSRFRRVINLLDRTGHARFRRAPAVAAVEPIETETPASQQAAAEPPHQAQNKALTLDFAKSVPPAANKKAPRAPAVSATSTSFLSSVTAGGEGSVSKGCSLAAVSSGKPPLPKRTSPCPAAAPPGAHHAESGAGGCHCSKKKRSRQGLSRRTVRLPAAAATPGSQPPGHVPASSDVPHDEYSWRKYGQKPIKGSPYPRGYYRCSSAKGCPARKHVERAADDPAVLVVTYEGDHRHDGDGDGDGGVGAGAARSRAA

SEQ ID NO: 40434 - protein, 306 aa, Zea mays subsp. mays
  peptide (1)..(306): Ceres Seq. ID no. 12418264
  misc_feature (228)..(286): Pfam Name: Pfam Description:  WRKY DNA -binding domain
  misc_feature (1)..(286): NCBI GI NO: 38175580 NR Description: putative DNA-binding protein NtWRKY3
  misc_feature (1)..(289): NCBI GI NO: 4894963 NR Description: DNA-binding protein WRKY3 [Avena sativa]
  misc_feature (1)..(292): NCBI GI NO: 38568048 NR Description: OSJNBa0065J03.18
  misc_feature (1)..(286): NCBI GI NO: 4760596 NR Description: DNA-binding protein NtWRKY3 [Nicotiana tabacum]
  misc_feature (1)..(286): NCBI GI NO: 18400580 NR Description: WRKY family transcription factor
  misc_feature (1)..(286): NCBI GI NO: 25348152 NR Description: probable WRKY-type DNA binding protein
  misc_feature (1)..(287): NCBI GI NO: 30689072 NR Description: WRKY family transcription factor
  misc_feature (1)..(287): NCBI GI NO: 22329054 NR Description: WRKY family transcription factor
  misc_feature (1)..(287): NCBI GI NO: 16604573 NR Description: putative putaive DNA-binding protein
  misc_feature (1)..(287): NCBI GI NO: 21537078 NR Description: putaive DNA-binding protein [Arabidopsis thaliana]
MSCGGGAYEQLAFQEAAAAGLRSLELLASSLSPCGAGRAESPPLGQIADQAVSRFRRVINLLDRTGHARFRRAPAVAAVEPIETETPASQQAAAEPPHQAQNKALTLDFAKSVPPAANKKAPRAPAVSATSTSFLSSVTAGGEGSVSKGCSLAAVSSGKPPLPKRTSPCPAAAPPGAHHAESGAGGCHCSKKKRSRQGLSRRTVRLPAAAATPGSQPPGHVPASSDVPHDEYSWRKYGQKPIKGSPYPRGYYRCSSAKGCPARKHVERAADDPAVLVVTYEGDHRHDGDGDGDGGVGAGAARSRAA

SEQ ID NO: 40435 - DNA, 1211 bp, Zea mays subsp. mays
  misc_feature (1)..(1211): Ceres Seq. ID no. 12381600
aaaactgtcgtccccatccccttgctccagcgcgcggtgtgcacaggcagctaggctcatggcggccgctacccctagtccccacagcgcaagggtcgccgttgtcaccggcgggaacaaagggatcgggctggaggtgtgcaggcagctggccagcaacggcatcaccgtcgtcctaacagccagagacgagaagcggggcgccgcagccgtagaggagctcgcggacgcgggcctctccggcgtcgttttccatcagctggaggtcaccgacgcccagagcattgctagattggccggtttcctgaaggcgtggtttgggaagctagacatcctggtaaacaatgccgctatcggtggggttcagtcacttcccgttgaaaatgttggcgaaaagatcaagggcatggacgcgtcccagatggcggagctgatgtggaagagctgccgagagacaaacgacgccgcgaaggcaggcgtccagacgaactactacggggtgaagaacgtgaccgaggcgctgctgcccctgctcctgcaggcctcctcctccggcggaggaagggtcgtcaacgtctcctccgacttcgggctgctacgctatctcaggaacgaggaggtgaagcgtgagctggacgacattgagggcctgacggaggagaggctggacgagctgctgagcacgttcctccgggacttcgaggccggcgcgctggagtcccgcgggtggccgacggagttcgccgcgtacaaggtggccaaggccgccctgaactcctactcgagggtcctggcgaggcggcaccccgagctgcgcgtcaactgcgcgcacccgggctacgtcaagaccgacatgaccaggcagacgggcctgctgacgcccgcgcagggcgcggccaacgtcgtcaaggtggcgctgctcccggaaggcggccccaccggcgctttcttcgcgctaggcaaggaggcgccgttcgtgtgacgctgccgtactgggctggcggtggtgggttcacggtccggcgctaatgcgccgactctccgacttgcctgacgcctgctatctactacctctctctctgtgctgcgcagcgtagtttgctggtttgggacggcgaataaagaaaggatcgctgctgcctcttagttagttgggttctgttagtactaagcttcggtaataaaataaaatccccccagatagatatggc

SEQ ID NO: 40436 - protein, 326 aa, Zea mays subsp. mays
  peptide (1)..(326): Ceres Seq. ID no. 12381601
  misc_feature (31)..(326): NCBI GI NO: 38346769 NR Description: OSJNBa0081C01.20
  misc_feature (26)..(326): NCBI GI NO: 38346772 NR Description: OSJNBa0081C01.23
  misc_feature (20)..(326): NCBI GI NO: 38346774 NR Description: OSJNBa0081C01.25
  misc_feature (31)..(326): NCBI GI NO: 38346768 NR Description: OSJNBa0081C01.19
  misc_feature (21)..(326): NCBI GI NO: 38346767 NR Description: OSJNBa0081C01.18
  misc_feature (9)..(317): NCBI GI NO: 33146492 NR Description: carbonyl reductase -like protein
  misc_feature (30)..(317): NCBI GI NO: 25518668 NR Description: hypothetical protein T1N6
  misc_feature (31)..(317): NCBI GI NO: 18378884 NR Description: carbonyl reductase, putative; protein id:At1g01800
  misc_feature (31)..(321): NCBI GI NO: 34559416 NR Description: (-)-isopiperitenone reductase [Mentha x piperita]
  misc_feature (20)..(325): NCBI GI NO: 15233062 NR Description: putative protein; protein id: At3g61220
KLSSPSPCSSARCAQAARLMAAATPSPHSARVAVVTGGNKGIGLEVCRQLASNGITVVLTARDEKRGAAAVEELADAGLSGVVFHQLEVTDAQSIARLAGFLKAWFGKLDILVNNAAIGGVQSLPVENVGEKIKGMDASQMAELMWKSCRETNDAAKAGVQTNYYGVKNVTEALLPLLLQASSSGGGRVVNVSSDFGLLRYLRNEEVKRELDDIEGLTEERLDELLSTFLRDFEAGALESRGWPTEFAAYKVAKAALNSYSRVLARRHPELRVNCAHPGYVKTDMTRQTGLLTPAQGAANVVKVALLPEGGPTGAFFALGKEAPFV

SEQ ID NO: 40437 - protein, 307 aa, Zea mays subsp. mays
  peptide (1)..(307): Ceres Seq. ID no. 12381602
  misc_feature (12)..(307): NCBI GI NO: 38346769 NR Description: OSJNBa0081C01.20
  misc_feature (7)..(307): NCBI GI NO: 38346772 NR Description: OSJNBa0081C01.23
  misc_feature (1)..(307): NCBI GI NO: 38346774 NR Description: OSJNBa0081C01.25
  misc_feature (12)..(307): NCBI GI NO: 38346768 NR Description: OSJNBa0081C01.19
  misc_feature (2)..(307): NCBI GI NO: 38346767 NR Description: OSJNBa0081C01.18
  misc_feature (1)..(298): NCBI GI NO: 33146492 NR Description: carbonyl reductase -like protein
  misc_feature (11)..(298): NCBI GI NO: 25518668 NR Description: hypothetical protein T1N6
  misc_feature (12)..(298): NCBI GI NO: 18378884 NR Description: carbonyl reductase, putative; protein id:At1g01800
  misc_feature (12)..(302): NCBI GI NO: 34559416 NR Description: (-)-isopiperitenone reductase [Mentha x piperita]
  misc_feature (1)..(306): NCBI GI NO: 15233062 NR Description: putative protein; protein id: At3g61220
MAAATPSPHSARVAVVTGGNKGIGLEVCRQLASNGITVVLTARDEKRGAAAVEELADAGLSGVVFHQLEVTDAQSIARLAGFLKAWFGKLDILVNNAAIGGVQSLPVENVGEKIKGMDASQMAELMWKSCRETNDAAKAGVQTNYYGVKNVTEALLPLLLQASSSGGGRVVNVSSDFGLLRYLRNEEVKRELDDIEGLTEERLDELLSTFLRDFEAGALESRGWPTEFAAYKVAKAALNSYSRVLARRHPELRVNCAHPGYVKTDMTRQTGLLTPAQGAANVVKVALLPEGGPTGAFFALGKEAPFV

SEQ ID NO: 40438 - protein, 191 aa, Zea mays subsp. mays
  peptide (1)..(191): Ceres Seq. ID no. 12381603
  misc_feature (1)..(191): NCBI GI NO: 38346769 NR Description: OSJNBa0081C01.20
  misc_feature (1)..(191): NCBI GI NO: 38346772 NR Description: OSJNBa0081C01.23
  misc_feature (1)..(191): NCBI GI NO: 38346774 NR Description: OSJNBa0081C01.25
  misc_feature (1)..(191): NCBI GI NO: 38346768 NR Description: OSJNBa0081C01.19
  misc_feature (1)..(191): NCBI GI NO: 38346767 NR Description: OSJNBa0081C01.18
  misc_feature (1)..(182): NCBI GI NO: 33146492 NR Description: carbonyl reductase -like protein
  misc_feature (1)..(182): NCBI GI NO: 25518668 NR Description: hypothetical protein T1N6
  misc_feature (1)..(182): NCBI GI NO: 18378884 NR Description: carbonyl reductase, putative; protein id:At1g01800
  misc_feature (1)..(186): NCBI GI NO: 34559416 NR Description: (-)-isopiperitenone reductase [Mentha x piperita]
  misc_feature (1)..(190): NCBI GI NO: 15233062 NR Description: putative protein; protein id: At3g61220
MDASQMAELMWKSCRETNDAAKAGVQTNYYGVKNVTEALLPLLLQASSSGGGRVVNVSSDFGLLRYLRNEEVKRELDDIEGLTEERLDELLSTFLRDFEAGALESRGWPTEFAAYKVAKAALNSYSRVLARRHPELRVNCAHPGYVKTDMTRQTGLLTPAQGAANVVKVALLPEGGPTGAFFALGKEAPFV

SEQ ID NO: 40439 - DNA, 918 bp, Zea mays subsp. mays; identical to SEQ ID NO: 39560
  misc_feature (1)..(918): Ceres Seq. ID no. 12415286

SEQ ID NO: 40440 - protein, 196 aa, Zea mays subsp. mays; identical to SEQ ID NO: 39561
  peptide (1)..(196): Ceres Seq. ID no. 12415287
  misc_feature (50)..(172): Pfam Name: Pfam Description:  Atrophin-1 family
  misc_feature (4)..(196): NCBI GI NO: 30354095 NR Description: Similar to serine/arginine repetitive matrix 2
  misc_feature (38)..(196): NCBI GI NO: 30424862 NR Description: RIKEN cDNA 5033413A03 [Mus musculus]

SEQ ID NO: 40441 - protein, 160 aa, Zea mays subsp. mays; identical to SEQ ID NO: 39562
  peptide (1)..(160): Ceres Seq. ID no. 12415288
  misc_feature (1)..(105): Pfam Name: Pfam Description:  Enoyl-CoA hydratase/isomerase family
  misc_feature (1)..(158): NCBI GI NO: 34903766 NR Description: unnamed protein product
  misc_feature (1)..(160): NCBI GI NO: 21555734 NR Description: carnitine racemase like protein
  misc_feature (1)..(143): NCBI GI NO: 15236498 NR Description: carnitine racemase like protein
  misc_feature (1)..(143): NCBI GI NO: 15236499 NR Description: carnitine racemase like protein
  misc_feature (1)..(137): NCBI GI NO: 15218713 NR Description: hypothetical protein; protein id: At1g65520.1
  misc_feature (1)..(126): NCBI GI NO: 15828352 NR Description: possible enoyl-CoA hydratase
  misc_feature (1)..(136): NCBI GI NO: 23017142 NR Description: hypothetical protein [Thermobifida fusca]
  misc_feature (1)..(137): NCBI GI NO: 23016771 NR Description: hypothetical protein
  misc_feature (1)..(140): NCBI GI NO: 40739395 NR Description: hypothetical protein AN6767.2
  misc_feature (1)..(126): NCBI GI NO: 8896103 NR Description: enoyl-CoA hydratase-like protein

SEQ ID NO: 40442 - protein, 134 aa, Zea mays subsp. mays; identical to SEQ ID NO: 39563
  peptide (1)..(134): Ceres Seq. ID no. 12415289
  misc_feature (19)..(112): Pfam Name: Pfam Description:  HlyD family secretion protein
  misc_feature (21)..(134): NCBI GI NO: 22956890 NR Description: hypothetical protein [Rhodobacter sphaeroides]
  misc_feature (5)..(134): NCBI GI NO: 29247944 NR Description: GLP_26_54603_52153 [Giardia lamblia ATCC 50803]
  misc_feature (1)..(134): NCBI GI NO: 5821145 NR Description: RNA binding protein [Homo sapiens]
  misc_feature (1)..(134): NCBI GI NO: 5821143 NR Description: RNA binding protein [Homo sapiens]
  misc_feature (1)..(134): NCBI GI NO: 30424862 NR Description: RIKEN cDNA 5033413A03 [Mus musculus]
  misc_feature (1)..(134): NCBI GI NO: 6649242 NR Description: splicing coactivator subunit SRm300 [Homo sapiens]
  misc_feature (1)..(134): NCBI GI NO: 19923466 NR Description: splicing coactivator subunit SRm300
  misc_feature (80)..(134): NCBI GI NO: 29828813 NR Description: hypothetical protein

SEQ ID NO: 40443 - DNA, 1498 bp, Zea mays subsp. mays
  misc_feature (1)..(1498): Ceres Seq. ID no. 12361178
gcacgagaccattacctagaacatcctaatcaaaaaaacccccgggcagcggacaaacaagcacacagcacgagcgaagagacgcagccatggcgatggctccaccgcctgcctgctcgctcttcccccgggtcgccgctgctgcgcccagttccgtcacctccaactccgttttgacctcgcgtggccccggtatccttccttccccgcgtctcgctttcgcccgccgccacctctccgcggcatggtcatcgaaggcagcagcctccgcttctgtcgaaatccaggatgactacacggatgaggtggacgcggtgaacattgcgcaggatgtcacccagctcattggaaaaacaccaatggtgtatctcaatagagttgctgacggatgtgtggctaatatcgctgcaaagctcgagtacatgggaccttgccgaagtgtcaaagataggattggattaagcatgattaatgatgctgaagagaagggattaatttctccagacaagaccattttggtagaaccaacaactggaaatactggtgtagccattgcttctgtggctgcagcaagaggatacaagttgatagcaacaatgccttcatcattagatgtcgagagacgcattcttctgcgtgcattcggagcagagattgtgttaactgatcctaccaaaggactaaaaggagcttttgataaagctgaggaaatagtcctgagaacaccaaatgcgtatatgtttcagcagttcaacaatgaggcaaatagtgaggttattggggtagaacctgctgaaactagtgtgatttctggtgatagccctggttacattccaagtatattagatgtgcagttgattgatgaggttgtgaaggttagcacagcagaagccgttgattctgcaagggaacttgctctaaaagagggcttgctggttggtatttcctctggtgctgcagcggttgctgctatcaatgttggcaaaagacctgaaaatgccggaaagctgattgcggtcattttccccagctttggagagagatacatctccaccattctgttccgtccgatatatgactctgttcgaagaatgaggaagagatagcgagccttgaaccacttcaagcgcgtggccagtcccttctctagacctgacaggcttccatgacatgattgataaacgtgaagcagtgaagaccctgtttgattgcaacttcagggtccgaagttttgaagctgcacagagtttctatcaggtgagctgcaggcctgcagcttggttctagcaagactggaggagtgcctcatgtttagaccagctcatacaatcctggtgcaacacgcagaattgcgtgccgcagttagcttgggactttcgtttagtagtctaggaccgggtacaaaccgcttgttacctggtacgcacttgagctgattttagcgaccaactatctgcaaattctttttgccttccgaattttgattgtttcatctttt

SEQ ID NO: 40444 - protein, 338 aa, Zea mays subsp. mays
  peptide (1)..(338): Ceres Seq. ID no. 12361179
  misc_feature (82)..(229): Pfam Name: Pfam Description:  Pyridoxal-phosphate dependent enzyme
  misc_feature (66)..(229): NCBI GI NO: 15228596 NR Description: O-acetylserine (thiol) lyase; protein id:At3g03630
  misc_feature (228)..(336): NCBI GI NO: 15228596 NR Description: O-acetylserine (thiol) lyase; protein id:At3g03630
  misc_feature (37)..(229): NCBI GI NO: 12081921 NR Description: plastidic cysteine synthase 2 [Solanum tuberosum]
  misc_feature (62)..(229): NCBI GI NO: 399333 NR Description: Cysteine synthase, chloroplast precursor
  misc_feature (226)..(336): NCBI GI NO: 399333 NR Description: Cysteine synthase, chloroplast precursor
  misc_feature (226)..(336): NCBI GI NO: 12081921 NR Description: plastidic cysteine synthase 2 [Solanum tuberosum]
  misc_feature (37)..(229): NCBI GI NO: 12081919 NR Description: plastidic cysteine synthase 1 [Solanum tuberosum]
  misc_feature (226)..(336): NCBI GI NO: 12081919 NR Description: plastidic cysteine synthase 1 [Solanum tuberosum]
  misc_feature (42)..(229): NCBI GI NO: 11131628 NR Description: Cysteine synthase, chloroplast precursor
  misc_feature (226)..(336): NCBI GI NO: 11131628 NR Description: Cysteine synthase, chloroplast precursor
MAMAPPPACSLFPRVAAAAPSSVTSNSVLTSRGPGILPSPRLAFARRHLSAAWSSKAAASASVEIQDDYTDEVDAVNIAQDVTQLIGKTPMVYLNRVADGCVANIAAKLEYMGPCRSVKDRIGLSMINDAEEKGLISPDKTILVEPTTGNTGVAIASVAAARGYKLIATMPSSLDVERRILLRAFGAEIVLTDPTKGLKGAFDKAEEIVLRTPNAYMFQQFNNEANSEVIGVEPAETSVISGDSPGYIPSILDVQLIDEVVKVSTAEAVDSARELALKEGLLVGISSGAAAVAAINVGKRPENAGKLIAVIFPSFGERYISTILFRPIYDSVRRMRKR

SEQ ID NO: 40445 - protein, 336 aa, Zea mays subsp. mays
  peptide (1)..(336): Ceres Seq. ID no. 12361180
  misc_feature (80)..(227): Pfam Name: Pfam Description:  Pyridoxal-phosphate dependent enzyme
  misc_feature (64)..(227): NCBI GI NO: 15228596 NR Description: O-acetylserine (thiol) lyase; protein id:At3g03630
  misc_feature (226)..(334): NCBI GI NO: 15228596 NR Description: O-acetylserine (thiol) lyase; protein id:At3g03630
  misc_feature (35)..(227): NCBI GI NO: 12081921 NR Description: plastidic cysteine synthase 2 [Solanum tuberosum]
  misc_feature (60)..(227): NCBI GI NO: 399333 NR Description: Cysteine synthase, chloroplast precursor
  misc_feature (224)..(334): NCBI GI NO: 399333 NR Description: Cysteine synthase, chloroplast precursor
  misc_feature (224)..(334): NCBI GI NO: 12081921 NR Description: plastidic cysteine synthase 2 [Solanum tuberosum]
  misc_feature (35)..(227): NCBI GI NO: 12081919 NR Description: plastidic cysteine synthase 1 [Solanum tuberosum]
  misc_feature (224)..(334): NCBI GI NO: 12081919 NR Description: plastidic cysteine synthase 1 [Solanum tuberosum]
  misc_feature (40)..(227): NCBI GI NO: 11131628 NR Description: Cysteine synthase, chloroplast precursor
  misc_feature (224)..(334): NCBI GI NO: 11131628 NR Description: Cysteine synthase, chloroplast precursor
MAPPPACSLFPRVAAAAPSSVTSNSVLTSRGPGILPSPRLAFARRHLSAAWSSKAAASASVEIQDDYTDEVDAVNIAQDVTQLIGKTPMVYLNRVADGCVANIAAKLEYMGPCRSVKDRIGLSMINDAEEKGLISPDKTILVEPTTGNTGVAIASVAAARGYKLIATMPSSLDVERRILLRAFGAEIVLTDPTKGLKGAFDKAEEIVLRTPNAYMFQQFNNEANSEVIGVEPAETSVISGDSPGYIPSILDVQLIDEVVKVSTAEAVDSARELALKEGLLVGISSGAAAVAAINVGKRPENAGKLIAVIFPSFGERYISTILFRPIYDSVRRMRKR

SEQ ID NO: 40446 - protein, 248 aa, Zea mays subsp. mays
  peptide (1)..(248): Ceres Seq. ID no. 12361181
  misc_feature (1)..(139): Pfam Name: Pfam Description:  Pyridoxal-phosphate dependent enzyme
  misc_feature (1)..(139): NCBI GI NO: 15228596 NR Description: O-acetylserine (thiol) lyase; protein id:At3g03630
  misc_feature (138)..(246): NCBI GI NO: 15228596 NR Description: O-acetylserine (thiol) lyase; protein id:At3g03630
  misc_feature (1)..(139): NCBI GI NO: 12081921 NR Description: plastidic cysteine synthase 2 [Solanum tuberosum]
  misc_feature (1)..(139): NCBI GI NO: 399333 NR Description: Cysteine synthase, chloroplast precursor
  misc_feature (136)..(246): NCBI GI NO: 399333 NR Description: Cysteine synthase, chloroplast precursor
  misc_feature (136)..(246): NCBI GI NO: 12081921 NR Description: plastidic cysteine synthase 2 [Solanum tuberosum]
  misc_feature (1)..(139): NCBI GI NO: 12081919 NR Description: plastidic cysteine synthase 1 [Solanum tuberosum]
  misc_feature (136)..(246): NCBI GI NO: 12081919 NR Description: plastidic cysteine synthase 1 [Solanum tuberosum]
  misc_feature (1)..(139): NCBI GI NO: 11131628 NR Description: Cysteine synthase, chloroplast precursor
  misc_feature (136)..(246): NCBI GI NO: 11131628 NR Description: Cysteine synthase, chloroplast precursor
MVYLNRVADGCVANIAAKLEYMGPCRSVKDRIGLSMINDAEEKGLISPDKTILVEPTTGNTGVAIASVAAARGYKLIATMPSSLDVERRILLRAFGAEIVLTDPTKGLKGAFDKAEEIVLRTPNAYMFQQFNNEANSEVIGVEPAETSVISGDSPGYIPSILDVQLIDEVVKVSTAEAVDSARELALKEGLLVGISSGAAAVAAINVGKRPENAGKLIAVIFPSFGERYISTILFRPIYDSVRRMRKR

SEQ ID NO: 40447 - DNA, 2088 bp, Zea mays subsp. mays
  misc_feature (1)..(2088): Ceres Seq. ID no. 12418833
gcacgagaccattacctagaacatcctaatcgaaaaacccacgagcccaacaaaccactcccacccggtggctcgtcctcggacgccaagccactccgcgccccaatccggaagcgccgccgccgccgatcgaccggccgtcgacccatgctccgctcggcgctcttccgctcagcccccgggctccgccggtctccggcgacggcccacttatccaccgccgccgccgccgccgcagcgtggctctccaacggccctgcctccgccccgtctagggtgcgcctcctcatcggcggggagttcgtcgagtcgcgcgccgacgagcacgtcgacgtcaccaaccccgcgacgcaggaggtggtgtcccggatcccgctcaccacggccgatgagttcaaagctgccgtcgatgccgccaggacggccttccccggctggcggaacacgcccgtcacgacgcggcagcgcgtcatgttcaagttccaggagctcatccgggctaacatggacaagcttgcagagaacatcactacggagcaggggaagacgctaaaagatgcttggggcgacgtgttccgcggcctagaggtggtggagcatgcttgtggaatgggaacactgcaaatgggcgaatatgtatcaaatgtttctaatgggattgacaccttcagcattcgggagccacttggtgtttgcgctgggatatgcccatttaattttcctgctatgattcccctatggatgtttcccatagcagttacgtgtggcaatacttttgttcttaagccatcggaaaaggacccaggggctgctatgatgcttgcggagctagcaatggaagctggtttgcctaagggtgttttgaacatcgttcatggcaccaatgatgttgtcaataatatttgtgacgatgaggatattaaggctgtatcttttgttggttccaatacagctggtatgcatatttattctagagcatctgctgcaggcaagcgtgttcagtgcaatatgggagcaaagaatcatgcaattatccttcccgatgctgatagagatgctacattgaatgcccttattgctgctggatttggtgcagcagggcaaaggtgcatggcattgagcactgctgtttttgttggcggttcagaatcatgggaggatgaattagtcaaacgtgcaagtggccttgttgttagttcaggaatggttaatgatgtagaccttggtccagtgatcagccgacaggcaaaggatcgtatctgtaaattagttcaaagtggtgttgacagtggtgctcgtatattgcttgatggaagaaagatagtggttcctcgctatgaagatggaaattttgttggcccaaccattctggctgatgttaaaagtgacatggagtgttacaaggaggaaatatttggtccagtgcttctcttaatgaaggcggagagcctagaagatgccatccaaatcataaacagaaacaagtatggcaatggtgcttccatatttacaacatctggcgtctctgccaggaaatttcaaacagacattgaagctggccaggtgggcatcaacgtgccgattccagtccccctgccgttcttctccttcacgggcagcaaagcttcattcgcaggagatttgaatttctacggcaaggctggcgtgcagttcttcacccagatcaagacgatcacgcagcagtggaaggagtcgccggtgcagcgggtctcgctctccatgcccacctcgcagaagtgagacgtcaaaggacgctcacgccactctccaaagctccactcctctggacatagacccacgcatggccacaagagaaggataattggtaggcatggcgacactccatgcacggccatgatactagtgtgtgctcgctttgctcttttgtctggacatcttgcatgcgcattcagaacatccaatgacgaaggtttagatatatgtgagcgctgcccattatgctgttaggattactgtaaaagccccaggtcctttgatcgagtgtcatgtgtaaacccacaataagaggagaaataaaaatgtcgccgtgctggtttgtggcatctc

SEQ ID NO: 40448 - protein, 586 aa, Zea mays subsp. mays
  peptide (1)..(586): Ceres Seq. ID no. 12418834
  misc_feature (50)..(586): NCBI GI NO: 7431455 NR Description: probable methylmalonate-semialdehyde dehydrogenase
  misc_feature (76)..(586): NCBI GI NO: 15225601 NR Description: putative methylmalonate semi-aldehydedehydrogenase
  misc_feature (207)..(586): NCBI GI NO: 30144414 NR Description: methylmalonate semialdehyde dehydrogenase
  misc_feature (71)..(583): NCBI GI NO: 11095441 NR Description: aldehyde dehydrogenase 6A1 precursor
  misc_feature (71)..(583): NCBI GI NO: 19527258 NR Description: RIKEN cDNA 1110038I05 [Mus musculus]
  misc_feature (69)..(582): NCBI GI NO: 17533151 NR Description: Methylmalonate-semialdehyde dehydrogenase (56
  misc_feature (71)..(583): NCBI GI NO: 13591997 NR Description: methylmalonate semialdehyde dehydrogenase gene
  misc_feature (71)..(583): NCBI GI NO: 23271115 NR Description: RIKEN cDNA 1110038I05 gene [Mus musculus]
  misc_feature (64)..(583): NCBI GI NO: 7431479 NR Description: methylmalonate-semialdehyde dehydrogenase
  misc_feature (87)..(583): NCBI GI NO: 24638876 NR Description: CG17896-PB [Drosophila melanogaster]
ARDHYLEHPNRKTHEPNKPLPPGGSSSDAKPLRAPIRKRRRRRSTGRRPMLRSALFRSAPGLRRSPATAHLSTAAAAAAAWLSNGPASAPSRVRLLIGGEFVESRADEHVDVTNPATQEVVSRIPLTTADEFKAAVDAARTAFPGWRNTPVTTRQRVMFKFQELIRANMDKLAENITTEQGKTLKDAWGDVFRGLEVVEHACGMGTLQMGEYVSNVSNGIDTFSIREPLGVCAGICPFNFPAMIPLWMFPIAVTCGNTFVLKPSEKDPGAAMMLAELAMEAGLPKGVLNIVHGTNDVVNNICDDEDIKAVSFVGSNTAGMHIYSRASAAGKRVQCNMGAKNHAIILPDADRDATLNALIAAGFGAAGQRCMALSTAVFVGGSESWEDELVKRASGLVVSSGMVNDVDLGPVISRQAKDRICKLVQSGVDSGARILLDGRKIVVPRYEDGNFVGPTILADVKSDMECYKEEIFGPVLLLMKAESLEDAIQIINRNKYGNGASIFTTSGVSARKFQTDIEAGQVGINVPIPVPLPFFSFTGSKASFAGDLNFYGKAGVQFFTQIKTITQQWKESPVQRVSLSMPTSQK

SEQ ID NO: 40449 - protein, 537 aa, Zea mays subsp. mays
  peptide (1)..(537): Ceres Seq. ID no. 12418835
  misc_feature (1)..(537): NCBI GI NO: 7431455 NR Description: probable methylmalonate-semialdehyde dehydrogenase
  misc_feature (27)..(537): NCBI GI NO: 15225601 NR Description: putative methylmalonate semi-aldehydedehydrogenase
  misc_feature (158)..(537): NCBI GI NO: 30144414 NR Description: methylmalonate semialdehyde dehydrogenase
  misc_feature (22)..(534): NCBI GI NO: 11095441 NR Description: aldehyde dehydrogenase 6A1 precursor
  misc_feature (22)..(534): NCBI GI NO: 19527258 NR Description: RIKEN cDNA 1110038I05 [Mus musculus]
  misc_feature (20)..(533): NCBI GI NO: 17533151 NR Description: Methylmalonate-semialdehyde dehydrogenase (56
  misc_feature (22)..(534): NCBI GI NO: 13591997 NR Description: methylmalonate semialdehyde dehydrogenase gene
  misc_feature (22)..(534): NCBI GI NO: 23271115 NR Description: RIKEN cDNA 1110038I05 gene [Mus musculus]
  misc_feature (15)..(534): NCBI GI NO: 7431479 NR Description: methylmalonate-semialdehyde dehydrogenase
  misc_feature (38)..(534): NCBI GI NO: 24638876 NR Description: CG17896-PB [Drosophila melanogaster]
MLRSALFRSAPGLRRSPATAHLSTAAAAAAAWLSNGPASAPSRVRLLIGGEFVESRADEHVDVTNPATQEVVSRIPLTTADEFKAAVDAARTAFPGWRNTPVTTRQRVMFKFQELIRANMDKLAENITTEQGKTLKDAWGDVFRGLEVVEHACGMGTLQMGEYVSNVSNGIDTFSIREPLGVCAGICPFNFPAMIPLWMFPIAVTCGNTFVLKPSEKDPGAAMMLAELAMEAGLPKGVLNIVHGTNDVVNNICDDEDIKAVSFVGSNTAGMHIYSRASAAGKRVQCNMGAKNHAIILPDADRDATLNALIAAGFGAAGQRCMALSTAVFVGGSESWEDELVKRASGLVVSSGMVNDVDLGPVISRQAKDRICKLVQSGVDSGARILLDGRKIVVPRYEDGNFVGPTILADVKSDMECYKEEIFGPVLLLMKAESLEDAIQIINRNKYGNGASIFTTSGVSARKFQTDIEAGQVGINVPIPVPLPFFSFTGSKASFAGDLNFYGKAGVQFFTQIKTITQQWKESPVQRVSLSMPTSQK

SEQ ID NO: 40450 - protein, 429 aa, Zea mays subsp. mays
  peptide (1)..(429): Ceres Seq. ID no. 12418836
  misc_feature (1)..(429): NCBI GI NO: 7431455 NR Description: probable methylmalonate-semialdehyde dehydrogenase
  misc_feature (1)..(429): NCBI GI NO: 15225601 NR Description: putative methylmalonate semi-aldehydedehydrogenase
  misc_feature (50)..(429): NCBI GI NO: 30144414 NR Description: methylmalonate semialdehyde dehydrogenase
  misc_feature (1)..(426): NCBI GI NO: 11095441 NR Description: aldehyde dehydrogenase 6A1 precursor
  misc_feature (1)..(426): NCBI GI NO: 19527258 NR Description: RIKEN cDNA 1110038I05 [Mus musculus]
  misc_feature (1)..(425): NCBI GI NO: 17533151 NR Description: Methylmalonate-semialdehyde dehydrogenase (56
  misc_feature (1)..(426): NCBI GI NO: 13591997 NR Description: methylmalonate semialdehyde dehydrogenase gene
  misc_feature (1)..(426): NCBI GI NO: 23271115 NR Description: RIKEN cDNA 1110038I05 gene [Mus musculus]
  misc_feature (1)..(426): NCBI GI NO: 7431479 NR Description: methylmalonate-semialdehyde dehydrogenase
  misc_feature (1)..(426): NCBI GI NO: 24638876 NR Description: CG17896-PB [Drosophila melanogaster]
MFKFQELIRANMDKLAENITTEQGKTLKDAWGDVFRGLEVVEHACGMGTLQMGEYVSNVSNGIDTFSIREPLGVCAGICPFNFPAMIPLWMFPIAVTCGNTFVLKPSEKDPGAAMMLAELAMEAGLPKGVLNIVHGTNDVVNNICDDEDIKAVSFVGSNTAGMHIYSRASAAGKRVQCNMGAKNHAIILPDADRDATLNALIAAGFGAAGQRCMALSTAVFVGGSESWEDELVKRASGLVVSSGMVNDVDLGPVISRQAKDRICKLVQSGVDSGARILLDGRKIVVPRYEDGNFVGPTILADVKSDMECYKEEIFGPVLLLMKAESLEDAIQIINRNKYGNGASIFTTSGVSARKFQTDIEAGQVGINVPIPVPLPFFSFTGSKASFAGDLNFYGKAGVQFFTQIKTITQQWKESPVQRVSLSMPTSQK

SEQ ID NO: 40451 - DNA, 1349 bp, Zea mays subsp. mays
  misc_feature (1)..(1349): Ceres Seq. ID no. 12418584
  misc_feature (1339)..(1339): n is a, c, t, g, unknown, or other
gcacgagaccattacctagaacatcctaatcgaaaaataggcgccggctgagcgaggtcttcatctgcgcttcaccagcgacgattatccactagtttgggttgcctcctgctgattgctaggtaggggagcatccgatcatgtcgagcgcggcggtgaacgggctgtccggcgccggcggcggcatcatcgcgcagatcatcacctaccctctccaaaccgtgaacacccggcagcagacggagaggtcagcgaagaagaggaaggccaggagcggctccagcgccaccccagcctccaccatgtaccagatgctccagctgattcaaaccgaaggatggagtgggttgtacagcggcctcaagccctctctcatcggcactgccgcgtcgcagggaatctattactacttctaccagatcctcaagaacaaggtggaagatatagcggttgctcgtagcaagaagggccttggggatggtactgtcgggatgctttcttggcttggtattgcagctgttgctgggtcaatcaatgttcttctaaccaatccaatatgggttcttgtgacacgtatgcagacacatactcaagcgaaaagaaaaatattggagtctaagagggagcttttactgaaagaaatgtctagggcgaattcgttggaggttgcaattctgaaggataggctggttaaattggagtcagaaaaacctcgtccatatggtactcttcaagcgatccaggaggtttaccatgagtctggtataagaggattttggaaagggcttattccaacattaatcatggtatgtaatccatcgattcagttcatgatctatgaaacattggcaaagcgtctgcagtcaaagcgttctggaaagcagctaccaaaaaggcacctcacagctatggaggtttttttattgggtgcattagcaaaacttggagctactttagtcacctatccattgctagtcgtgaagtcaaggttgcaggcaaaacaagaaattggcagcaatgtgatgtccagatacacgggtacaatagatgcgataataaagatggtttcgctacgaaggactacacgggttttacaaaggaatgggcacaaagattgtacaaagtgtctttgctgcctcggttctctttatggttaaagaggaattggtcaagttagcagtgcttttagttgggagtagtaggactattcttattactacatccaagaaacaataggtggtcgtgtatttgggagaaaagttctttttttttttttgcctcaacttgtaatgtatagggtcccattatacatatcctgttcaagatcaatatgaaattntttactggtt

SEQ ID NO: 40452 - protein, 338 aa, Zea mays subsp. mays
  peptide (1)..(338): Ceres Seq. ID no. 12418585
  misc_feature (1)..(309): NCBI GI NO: 34901996 NR Description: unknown protein
  misc_feature (1)..(247): NCBI GI NO: 21593883 NR Description: putative peroxisomal membrane carrier protein
  misc_feature (1)..(247): NCBI GI NO: 15225602 NR Description: 36kDa-peroxisomal membrane protein
  misc_feature (186)..(309): NCBI GI NO: 21593883 NR Description: putative peroxisomal membrane carrier protein
  misc_feature (186)..(309): NCBI GI NO: 15225602 NR Description: 36kDa-peroxisomal membrane protein
  misc_feature (1)..(150): NCBI GI NO: 28828484 NR Description: hypothetical protein [Dictyostelium discoideum]
  misc_feature (173)..(308): NCBI GI NO: 28828484 NR Description: hypothetical protein [Dictyostelium discoideum]
  misc_feature (2)..(153): NCBI GI NO: 40739628 NR Description: hypothetical protein AN4280.2
  misc_feature (187)..(307): NCBI GI NO: 40739628 NR Description: hypothetical protein AN4280.2
  misc_feature (7)..(152): NCBI GI NO: 32404402 NR Description: hypothetical protein [Neurospora crassa]
MSSAAVNGLSGAGGGIIAQIITYPLQTVNTRQQTERSAKKRKARSGSSATPASTMYQMLQLIQTEGWSGLYSGLKPSLIGTAASQGIYYYFYQILKNKVEDIAVARSKKGLGDGTVGMLSWLGIAAVAGSINVLLTNPIWVLVTRMQTHTQAKRKILESKRELLLKEMSRANSLEVAILKDRLVKLESEKPRPYGTLQAIQEVYHESGIRGFWKGLIPTLIMVCNPSIQFMIYETLAKRLQSKRSGKQLPKRHLTAMEVFLLGALAKLGATLVTYPLLVVKSRLQAKQEIGSNVMSRYTGTIDAIIKMVSLRRTTRVLQRNGHKDCTKCLCCLGSLYG

SEQ ID NO: 40453 - protein, 284 aa, Zea mays subsp. mays
  peptide (1)..(284): Ceres Seq. ID no. 12418586
  misc_feature (1)..(255): NCBI GI NO: 34901996 NR Description: unknown protein
  misc_feature (1)..(193): NCBI GI NO: 21593883 NR Description: putative peroxisomal membrane carrier protein
  misc_feature (1)..(193): NCBI GI NO: 15225602 NR Description: 36kDa-peroxisomal membrane protein
  misc_feature (132)..(255): NCBI GI NO: 21593883 NR Description: putative peroxisomal membrane carrier protein
  misc_feature (132)..(255): NCBI GI NO: 15225602 NR Description: 36kDa-peroxisomal membrane protein
  misc_feature (1)..(96): NCBI GI NO: 28828484 NR Description: hypothetical protein [Dictyostelium discoideum]
  misc_feature (119)..(254): NCBI GI NO: 28828484 NR Description: hypothetical protein [Dictyostelium discoideum]
  misc_feature (1)..(99): NCBI GI NO: 40739628 NR Description: hypothetical protein AN4280.2
  misc_feature (133)..(253): NCBI GI NO: 40739628 NR Description: hypothetical protein AN4280.2
  misc_feature (1)..(98): NCBI GI NO: 32404402 NR Description: hypothetical protein [Neurospora crassa]
MYQMLQLIQTEGWSGLYSGLKPSLIGTAASQGIYYYFYQILKNKVEDIAVARSKKGLGDGTVGMLSWLGIAAVAGSINVLLTNPIWVLVTRMQTHTQAKRKILESKRELLLKEMSRANSLEVAILKDRLVKLESEKPRPYGTLQAIQEVYHESGIRGFWKGLIPTLIMVCNPSIQFMIYETLAKRLQSKRSGKQLPKRHLTAMEVFLLGALAKLGATLVTYPLLVVKSRLQAKQEIGSNVMSRYTGTIDAIIKMVSLRRTTRVLQRNGHKDCTKCLCCLGSLYG

SEQ ID NO: 40454 - protein, 281 aa, Zea mays subsp. mays
  peptide (1)..(281): Ceres Seq. ID no. 12418587
  misc_feature (1)..(252): NCBI GI NO: 34901996 NR Description: unknown protein
  misc_feature (1)..(190): NCBI GI NO: 21593883 NR Description: putative peroxisomal membrane carrier protein
  misc_feature (1)..(190): NCBI GI NO: 15225602 NR Description: 36kDa-peroxisomal membrane protein
  misc_feature (129)..(252): NCBI GI NO: 21593883 NR Description: putative peroxisomal membrane carrier protein
  misc_feature (129)..(252): NCBI GI NO: 15225602 NR Description: 36kDa-peroxisomal membrane protein
  misc_feature (1)..(93): NCBI GI NO: 28828484 NR Description: hypothetical protein [Dictyostelium discoideum]
  misc_feature (116)..(251): NCBI GI NO: 28828484 NR Description: hypothetical protein [Dictyostelium discoideum]
  misc_feature (1)..(96): NCBI GI NO: 40739628 NR Description: hypothetical protein AN4280.2
  misc_feature (130)..(250): NCBI GI NO: 40739628 NR Description: hypothetical protein AN4280.2
  misc_feature (1)..(95): NCBI GI NO: 32404402 NR Description: hypothetical protein [Neurospora crassa]
MLQLIQTEGWSGLYSGLKPSLIGTAASQGIYYYFYQILKNKVEDIAVARSKKGLGDGTVGMLSWLGIAAVAGSINVLLTNPIWVLVTRMQTHTQAKRKILESKRELLLKEMSRANSLEVAILKDRLVKLESEKPRPYGTLQAIQEVYHESGIRGFWKGLIPTLIMVCNPSIQFMIYETLAKRLQSKRSGKQLPKRHLTAMEVFLLGALAKLGATLVTYPLLVVKSRLQAKQEIGSNVMSRYTGTIDAIIKMVSLRRTTRVLQRNGHKDCTKCLCCLGSLYG

SEQ ID NO: 40455 - DNA, 1333 bp, Zea mays subsp. mays
  misc_feature (1)..(1333): Ceres Seq. ID no. 12425320
  misc_feature (601)..(601): n is a, c, t, g, unknown, or other
gccgcacgccggggctcaatctgctccgattccctccagcctttgtttcctccatcccccgcgtcaatcctgcagcctcctgctcgcgcgcttactgtagccgcagctttctccacccttggcaatggaggccgcgatcgctcacgctccatctgctccggtcctgcgccgctcgcgtagcctcaaccccacgcccgccgtccggccgcacccaaaaccctggcagggggtgctttcggcgaggcacccgtcgaacgccgtcaggtgcgagccgtcccagcgcccagaggcgcgcccgcgcctgcgcgcggcgcagccggctggtgctgacgcggcggccgggaggaagcggctggcagtgttcgtgtccggagggggatcaaacttccgggcgatccatgaggccgcgctgggcggtgccgtgcacggagatgtcgtcgcgcttgtcaccgacaagccaggtgaaggaaactgcatcccgcgacgctacccacattgttagcggaggctaaaactgcaataactacattgcaggttgtggtggcgcggaatatgctaggagcaatgacatccctgtgctcgtatttcccaagtccaagtntgcgcccgaggggatttcggttgctcaactgctggatactctgaggggaaacaatgtagattttgttcttcttgccggttacctgaagcttatacccactgaattgatccaggaatacccaaaatccatattaaatatccacccttctctccttccagcattcggagggaaaggtttctatggttcaaaggtgcataaagctgttattgcctctggagcaagatactcgggtccaaccgtacattttgtggatgagcactatgataccggtaaaacgttagcccagagggttgtgcctgtgttcgcagatgacacgccagagttattggctgcaagagtcctccatgaggaacatatggtctatgttgaagcagttgctgctttgtgcgaggaccgcgtcgtatggagggaagatggtgtcccacttatcaaaagtcggacaaatccagctgtgtacatctaattgacaatacggcaatagtagcactattttggagtaataatggaatttgtagagcccttgccacttttcccggtaaaaggggtacttagcagttgacgtagggttgatatacagggcacaacttatttgccaccgaaacatttccatgcgttggaagtgagaaacattgcccccaataggccgcagtatccattactgcatggaacaaggttgaaattttaccttgatttgagataactatcaaatactgcgaatgcattattcttccg

SEQ ID NO: 40456 - protein, 169 aa, Zea mays subsp. mays
  peptide (1)..(169): Ceres Seq. ID no. 12425321
  misc_feature (133)..(169): NCBI GI NO: 39936115 NR Description: phosphoribosylglycinamide formyltransferase
RTPGLNLLRFPPAFVSSIPRVNPAASCSRAYCSRSFLHPWQWRPRSLTLHLLRSCAARVASTPRPPSGRTQNPGRGCFRRGTRRTPSGASRPSAQRRARACARRSRLVLTRRPGGSGWQCSCPEGDQTSGRSMRPRWAVPCTEMSSRLSPTSQVKETASRDATHIVSGG

SEQ ID NO: 40457 - protein, 125 aa, Zea mays subsp. mays
  peptide (1)..(125): Ceres Seq. ID no. 12425322
  misc_feature (1)..(111): NCBI GI NO: 12644307 NR Description: Phosphoribosylglycinamide formyltransferase
  misc_feature (1)..(111): NCBI GI NO: 7433568 NR Description: phosphoribosylglycinamide formyltransferase (EC2
  misc_feature (32)..(111): NCBI GI NO: 15221650 NR Description: putative phosphoribosylglycinamideformyltransferase
  misc_feature (1)..(111): NCBI GI NO: 32815066 NR Description: glycinamide ribonucleotide transformylase
  misc_feature (66)..(111): NCBI GI NO: 37992753 NR Description: glycinamide ribonucleotide transformylase
  misc_feature (1)..(111): NCBI GI NO: 32815065 NR Description: glycinamide ribonucleotide transformylase
  misc_feature (74)..(111): NCBI GI NO: 480622 NR Description: phosphoribosylglycinamide formyltransferase (EC2
  misc_feature (1)..(111): NCBI GI NO: 12229915 NR Description: Phosphoribosylglycinamide formyltransferase
  misc_feature (74)..(111): NCBI GI NO: 21673158 NR Description: phosphoribosylglycinamide formyltransferase
  misc_feature (68)..(115): NCBI GI NO: 15888477 NR Description: AGR_C_2109p [Agrobacterium tumefaciens]
MEAAIAHAPSAPVLRRSRSLNPTPAVRPHPKPWQGVLSARHPSNAVRCEPSQRPEARPRLRAAQPAGADAAAGRKRLAVFVSGGGSNFRAIHEAALGGAVHGDVVALVTDKPGEGNCIPRRYPHC

SEQ ID NO: 40458 - DNA, 1231 bp, Zea mays subsp. mays
  misc_feature (1)..(1231): Ceres Seq. ID no. 12388992
aggctctagttccaacctccacctgcgccgcccgatagcaaaacgcagcgacctcgccccccctgccccgctcctccccttttcccggtagcagagacggagcaccgcagcccgccagaaaggaagacgaaacgcgccgcggcgcaacgcaccgcgtgctagtgaaagggcgcagcggaaggccgccgccgcgctgctatttagacaggaagcggggcgatcgaatcgcgtctctcaaccaatcgataaatctgccggtaggtcgatcaaggagagcgcggtccacgtctccgttccgttccgttgcggggaaggaaggaaggagagagaggagcgatggcgtccgggtaccgcgcggaggaggagtacgactacctgttcaaggtggtgctgatcggggacagcggcgtggggaagtcgaacctgctgtcgcggttcgccagggacgagttcagcctcgagaccaggtccaccatcggcgtcgagttcgccaccaagaccgtccaggtcgacgacaagctcgtcaaggcacagatctgggacaccgccgggcaggagaggtaccgcgccatcacgagcgcatactaccgcggcgcggtgggcgcgctggtggtgtacgacgtgagccgccgcaccaccttcgacaacgcggagcgctggctgcgggagccgcgggaccacacggacgccaacatcgtggtcatgctggtgggcaacaaggccgacctgcgccacctccgcgccgtctcgcccgaggacgcggcggccttcgccgagcggcacggcaccttctccatggagacgtcggcgctggacgccaccaacgtggagcgcgccttcgccgaggtgctccgccagatctaccacgtcgtcagccggaacgcgctcgacatcggggacgaccccgccgcgccgcccaggggcaagaccatcgacgtcagcgccgccaaggacgaggtctcccctgtgaacgcgggcgggtgctgctcgtcggcttagccctggtcaaacatacgctttgctgattaaggaagacataacgtgatgacaatctttgttgacttcgtcaagcggttgggggtggttggcgctcgtgatgtgtttgcagactagcaatcgctgtcctcgattgtatttttcgggctattttttgattgatgcacttgggtgacgcacacatttacaagtggcaggttatggaccatatggggagcgatttacactgatttgg

SEQ ID NO: 40459 - protein, 220 aa, Zea mays subsp. mays
  peptide (1)..(220): Ceres Seq. ID no. 12388993
  misc_feature (16)..(176): Pfam Name: Pfam Description:  Ras family
  misc_feature (1)..(219): NCBI GI NO: 34910940 NR Description: putative GTP-binding protein
  misc_feature (3)..(219): NCBI GI NO: 15239462 NR Description: GTP-binding protein, putative
  misc_feature (1)..(219): NCBI GI NO: 3024504 NR Description: RAS-RELATED PROTEIN RAB11B
  misc_feature (5)..(219): NCBI GI NO: 7438432 NR Description: GTP-binding protein - garden pea
  misc_feature (12)..(219): NCBI GI NO: 7438389 NR Description: GTP-binding protein, ras-like
  misc_feature (3)..(219): NCBI GI NO: 15232477 NR Description: Ras family GTP-binding protein, putative
  misc_feature (5)..(219): NCBI GI NO: 1370156 NR Description: RAB11H [Lotus japonicus]
  misc_feature (5)..(219): NCBI GI NO: 15218719 NR Description: GTP-binding protein, putative
  misc_feature (5)..(218): NCBI GI NO: 15233873 NR Description: membrane-bound small GTP-binding - like protein
  misc_feature (1)..(218): NCBI GI NO: 13195452 NR Description: GTP-binding protein [Oryza sativa]
MASGYRAEEEYDYLFKVVLIGDSGVGKSNLLSRFARDEFSLETRSTIGVEFATKTVQVDDKLVKAQIWDTAGQERYRAITSAYYRGAVGALVVYDVSRRTTFDNAERWLREPRDHTDANIVVMLVGNKADLRHLRAVSPEDAAAFAERHGTFSMETSALDATNVERAFAEVLRQIYHVVSRNALDIGDDPAAPPRGKTIDVSAAKDEVSPVNAGGCCSSA

SEQ ID NO: 40460 - DNA, 1471 bp, Zea mays subsp. mays
  misc_feature (1)..(1471): Ceres Seq. ID no. 13585990
gattactacgatccaacagttctagagcaagagagaggaagacacaccgcagagttagcaggctaataacttgcaggagcagcaggaatggcggcgacgcgtcgcctctcttgctttctcctcgccgtgcttctggcaggagtggccgctgccaccgccttcgacgaagcggctgctgccggcttcgggcttggccacggcgcgcgtttcgcgcgcaagcatggacgtgctgccgctgagatgccccagccggagccacaacctaaaactaagccggagccccatatgcagccactgccccagccagaacctaaaccgaaacctatgccacatccagagccaaagcctgaacctcaaccaaagcccaaccctgaacctcaaccaatgcccaagcctcaaccaaaatccaaaccagagccattgcctacaccgaagcctgaacctaagcccgaacctaagccagagcctaagcccgaacctaaaataaaaccaaagccaaaacctgaaccaaaaccagagcctaagccagagcataaacctgagccaaagccagagcctaaacccaaaccgaaaccagagccaaagccagagccacaaccaaaaccagagcctaagccagagcctaaacccgaaccgaaaccggagccaaagccagagccccaacctaagccagagcctaagcctgagccgaaaccagaaccaaagccagagccacaaccaaagcctgagcctaaaccagaaccaaaaccagagccaaagccagagcctaagcccgaaccaaaaccagagccaaagcctgagcctaaacccgaaccaaggccagaacctaagccagagccaaagcctgagccgaaaccgaaaccagatccaaagccagagccacaaccaaagccagagcctaagccagaaccaaaaccagagccaaagccagagcctaagcccgaaccaaaaccagagccaaagcctgagcctaaacccgaaccaagaccagaaccagaaccaaagccagagcctaaacctgaaccaaaaccgaaaccagaaccggagccacaaccaaagccagagcctaagcctgatccaaaaccagagcctaaacccgaaccaaaaccagagccccaaccaaaaccagaacctaagcccgaaccaaaaccacagccagaacctaagcccgagcccaaaccaaagcctgaccctccacacatcccaccagcagctatcaactgaggaagtggctattaacaattattgtagtgtttaaataaaatgccatgttgcagcgtgcttttgtaggtgctgctacttgttgtatctatcctatcttttctttgtcattttttgtatgttatgctattatatgatcttagtgcagtttagcttgttccgtgtatacacgcatttatgcactcagtgggtttttgttatatgttggttgttatgtatatatgttcgctgtttcgagcagctaactaac

SEQ ID NO: 40461 - protein, 378 aa, Zea mays subsp. mays
  peptide (1)..(378): Ceres Seq. ID no. 13585991
  misc_feature (3)..(111): Pfam Name: PARP Pfam Description: Procyclic acidic repetitive protein
  misc_feature (1)..(378): NCBI GI NO: 4138732 NR Description: proline-rich protein [Zea mays]
  misc_feature (5)..(373): NCBI GI NO: 29367369 NR Description: proline-rich protein
  misc_feature (53)..(375): NCBI GI NO: 29367369 NR Description: proline-rich protein
  misc_feature (11)..(370): NCBI GI NO: 100798 NR Description: proline-rich protein - wheat
  misc_feature (53)..(374): NCBI GI NO: 29367369 NR Description: proline-rich protein
  misc_feature (5)..(375): NCBI GI NO: 18478606 NR Description: repetitive proline rich protein [Oryza sativa]
  misc_feature (53)..(373): NCBI GI NO: 11610622 NR Description: GABA-A epsilon subunit splice variant
  misc_feature (53)..(373): NCBI GI NO: 12831207 NR Description: gamma-aminobutyric acid  A receptor, epsilon
  misc_feature (53)..(369): NCBI GI NO: 8393396 NR Description: gamma-aminobutyric acid
  misc_feature (53)..(369): NCBI GI NO: 7861746 NR Description: GABA-A receptor epsilon-like subunit
MAATRRLSCFLLAVLLAGVAAATAFDEAAAAGFGLGHGARFARKHGRAAAEMPQPEPQPKTKPEPHMQPLPQPEPKPKPMPHPEPKPEPQPKPNPEPQPMPKPQPKSKPEPLPTPKPEPKPEPKPEPKPEPKIKPKPKPEPKPEPKPEHKPEPKPEPKPKPKPEPKPEPQPKPEPKPEPKPEPKPEPKPEPQPKPEPKPEPKPEPKPEPQPKPEPKPEPKPEPKPEPKPEPKPEPKPEPKPEPRPEPKPEPKPEPKPKPDPKPEPQPKPEPKPEPKPEPKPEPKPEPKPEPKPEPKPEPRPEPEPKPEPKPEPKPKPEPEPQPKPEPKPDPKPEPKPEPKPEPQPKPEPKPEPKPQPEPKPEPKPKPDPPHIPPAAIN

SEQ ID NO: 40462 - protein, 327 aa, Zea mays subsp. mays
  peptide (1)..(327): Ceres Seq. ID no. 13585992
  misc_feature (1)..(60): Pfam Name: PARP Pfam Description: Procyclic acidic repetitive protein
  misc_feature (1)..(327): NCBI GI NO: 4138732 NR Description: proline-rich protein [Zea mays]
  misc_feature (1)..(322): NCBI GI NO: 29367369 NR Description: proline-rich protein
  misc_feature (2)..(324): NCBI GI NO: 29367369 NR Description: proline-rich protein
  misc_feature (1)..(319): NCBI GI NO: 100798 NR Description: proline-rich protein - wheat
  misc_feature (2)..(323): NCBI GI NO: 29367369 NR Description: proline-rich protein
  misc_feature (1)..(324): NCBI GI NO: 18478606 NR Description: repetitive proline rich protein [Oryza sativa]
  misc_feature (2)..(322): NCBI GI NO: 11610622 NR Description: GABA-A epsilon subunit splice variant
  misc_feature (2)..(322): NCBI GI NO: 12831207 NR Description: gamma-aminobutyric acid  A receptor, epsilon
  misc_feature (2)..(318): NCBI GI NO: 8393396 NR Description: gamma-aminobutyric acid
  misc_feature (2)..(318): NCBI GI NO: 7861746 NR Description: GABA-A receptor epsilon-like subunit
MPQPEPQPKTKPEPHMQPLPQPEPKPKPMPHPEPKPEPQPKPNPEPQPMPKPQPKSKPEPLPTPKPEPKPEPKPEPKPEPKIKPKPKPEPKPEPKPEHKPEPKPEPKPKPKPEPKPEPQPKPEPKPEPKPEPKPEPKPEPQPKPEPKPEPKPEPKPEPQPKPEPKPEPKPEPKPEPKPEPKPEPKPEPKPEPRPEPKPEPKPEPKPKPDPKPEPQPKPEPKPEPKPEPKPEPKPEPKPEPKPEPKPEPRPEPEPKPEPKPEPKPKPEPEPQPKPEPKPDPKPEPKPEPKPEPQPKPEPKPEPKPQPEPKPEPKPKPDPPHIPPAAIN

SEQ ID NO: 40463 - protein, 312 aa, Zea mays subsp. mays
  peptide (1)..(312): Ceres Seq. ID no. 13585993
  misc_feature (5)..(291): Pfam Name: Pfam Description:  Formin Homology 2 Domain
  misc_feature (1)..(312): NCBI GI NO: 4138732 NR Description: proline-rich protein [Zea mays]
  misc_feature (1)..(307): NCBI GI NO: 29367369 NR Description: proline-rich protein
  misc_feature (1)..(309): NCBI GI NO: 29367369 NR Description: proline-rich protein
  misc_feature (1)..(304): NCBI GI NO: 100798 NR Description: proline-rich protein - wheat
  misc_feature (1)..(308): NCBI GI NO: 29367369 NR Description: proline-rich protein
  misc_feature (1)..(309): NCBI GI NO: 18478606 NR Description: repetitive proline rich protein [Oryza sativa]
  misc_feature (1)..(307): NCBI GI NO: 11610622 NR Description: GABA-A epsilon subunit splice variant
  misc_feature (1)..(307): NCBI GI NO: 12831207 NR Description: gamma-aminobutyric acid  A receptor, epsilon
  misc_feature (1)..(303): NCBI GI NO: 8393396 NR Description: gamma-aminobutyric acid
  misc_feature (1)..(303): NCBI GI NO: 7861746 NR Description: GABA-A receptor epsilon-like subunit
MQPLPQPEPKPKPMPHPEPKPEPQPKPNPEPQPMPKPQPKSKPEPLPTPKPEPKPEPKPEPKPEPKIKPKPKPEPKPEPKPEHKPEPKPEPKPKPKPEPKPEPQPKPEPKPEPKPEPKPEPKPEPQPKPEPKPEPKPEPKPEPQPKPEPKPEPKPEPKPEPKPEPKPEPKPEPKPEPRPEPKPEPKPEPKPKPDPKPEPQPKPEPKPEPKPEPKPEPKPEPKPEPKPEPKPEPRPEPEPKPEPKPEPKPKPEPEPQPKPEPKPDPKPEPKPEPKPEPQPKPEPKPEPKPQPEPKPEPKPKPDPPHIPPAAIN

SEQ ID NO: 40464 - DNA, 1491 bp, Zea mays subsp. mays
  misc_feature (1)..(1491): Ceres Seq. ID no. 15180137
gcacgttgtcctgctccctagcgccggcatgggccacctggtcccgttcgcccgcctggcggtggcgctgtcggagggacacggctgcaacgtgtccgtggccgcggtgcagcccaccgtgtcgtcggcggagtccaggctcctcgacgcgctcttcgtcgccgcggccccggccgtccgccggctcgacttccgcctggcgccgttcgacgagtccgagttcccgggcgccgaccctttcttcctccgcttcgaggccacgcgccggtccgcgccgctgctcggcccgctcctcgacgccgccgaggcgtccgcgctcgtcacggacatcgttctggcgtccgtcgccctgcccgtcgccagggagcggggcgtcccgtgctacgtcctcttcacgtcctctgccgcgatgctctccctatgcgcctatttccccgcctacctcgacgcccacgccgccgccggcagcgtgggcgtgggcgtcggcaatgtcgacatccccggcgtgttccggatcccaaagtcatccgtcccgcaggcgctgcacgaccccgaccatctcttcacccaacagttcgtcgccaacggtcgctgcctcgtggcctgtgacggcatccttgtcaacacgttcgacgcctttgagccggacgccgttacggccctgcgccaaggctccattactgtctccggcggcttcccgcctgtgttctccgtggggcccatgcttccggtgagatttcaggcggaggagacggcggattacatgagatggctcagcgcgcagccgccacggtctgtggtgtacgtcagcttcggcagccgtaaggccataccgagggaccagctccgggagctcgcagccgggctcgaggccagcggcaaacggttcctgtgggtggtgaagagcaccatcgtggaccgggacgacaccgccgacctcggcggcctgcttggtgacgggttcctcgagcgagtgcaggggcgcgcgttcgttaccatggggtgggtggagcaagaggagatcctgcagcacggttccgtcggcctattcatcagtcactgcgggtggaactcgttgacggaggcagcggcgttcggtgtgccggtgctagcgtggccgaggttcggcgaccagcgcgtcaacgccgcactggtggcgcgcagcgggctgggcgcgtgggaggaggggtggacctgggatggagaggaagggctgacgactcgaaaggaggtggctaagaagataaaaggcatgatggggtatgatgcggtggcggaaaaggcagcgaaggtcggcgacgccgccgccgcggcaatagccaagtgcggcacgagctaccagagcttagaggaattcgttcagcggtgtcgggacgcggagcgtaagtaggctcgactgatttctgcgagcctgtaacagatacttggttcctgtgacgctgactgtagatcattttcggttgctagagttattttcgccggcctcttcct

SEQ ID NO: 40465 - protein, 462 aa, Zea mays subsp. mays
  peptide (1)..(462): Ceres Seq. ID no. 15180138
  misc_feature (2)..(422): Pfam Name: Pfam Description:  UDP-glucoronosyl and UDP-glucosyl transferase
  misc_feature (2)..(459): NCBI GI NO: 22535568 NR Description: putative glucosyltransferase
  misc_feature (2)..(454): NCBI GI NO: 34910204 NR Description: putative flavonol glucosyltransferase
  misc_feature (1)..(453): NCBI GI NO: 34912752 NR Description: putative UTP-glucose glucosyltransferase
  misc_feature (2)..(453): NCBI GI NO: 34910218 NR Description: putative flavonol glucosyltransferase
  misc_feature (2)..(453): NCBI GI NO: 34910222 NR Description: putative flavonol glucosyltransferase
  misc_feature (1)..(462): NCBI GI NO: 15223396 NR Description: glycosyltransferase family [Arabidopsis thaliana]
  misc_feature (99)..(453): NCBI GI NO: 21954072 NR Description: putative UDP-glucose glucosyltransferase
  misc_feature (1)..(455): NCBI GI NO: 19911209 NR Description: glucosyltransferase-13 [Vigna angularis]
  misc_feature (2)..(454): NCBI GI NO: 11994646 NR Description: UTP-glucose glucosyltransferase
  misc_feature (104)..(454): NCBI GI NO: 7488111 NR Description: probable glucosyltransferase - Arabidopsis thaliana
HVVLLPSAGMGHLVPFARLAVALSEGHGCNVSVAAVQPTVSSAESRLLDALFVAAAPAVRRLDFRLAPFDESEFPGADPFFLRFEATRRSAPLLGPLLDAAEASALVTDIVLASVALPVARERGVPCYVLFTSSAAMLSLCAYFPAYLDAHAAAGSVGVGVGNVDIPGVFRIPKSSVPQALHDPDHLFTQQFVANGRCLVACDGILVNTFDAFEPDAVTALRQGSITVSGGFPPVFSVGPMLPVRFQAEETADYMRWLSAQPPRSVVYVSFGSRKAIPRDQLRELAAGLEASGKRFLWVVKSTIVDRDDTADLGGLLGDGFLERVQGRAFVTMGWVEQEEILQHGSVGLFISHCGWNSLTEAAAFGVPVLAWPRFGDQRVNAALVARSGLGAWEEGWTWDGEEGLTTRKEVAKKIKGMMGYDAVAEKAAKVGDAAAAAIAKCGTSYQSLEEFVQRCRDAERK

SEQ ID NO: 40466 - protein, 453 aa, Zea mays subsp. mays
  peptide (1)..(453): Ceres Seq. ID no. 15180139
  misc_feature (1)..(413): Pfam Name: Pfam Description:  UDP-glucoronosyl and UDP-glucosyl transferase
  misc_feature (1)..(450): NCBI GI NO: 22535568 NR Description: putative glucosyltransferase
  misc_feature (1)..(445): NCBI GI NO: 34910204 NR Description: putative flavonol glucosyltransferase
  misc_feature (1)..(444): NCBI GI NO: 34912752 NR Description: putative UTP-glucose glucosyltransferase
  misc_feature (1)..(444): NCBI GI NO: 34910218 NR Description: putative flavonol glucosyltransferase
  misc_feature (1)..(444): NCBI GI NO: 34910222 NR Description: putative flavonol glucosyltransferase
  misc_feature (1)..(453): NCBI GI NO: 15223396 NR Description: glycosyltransferase family [Arabidopsis thaliana]
  misc_feature (90)..(444): NCBI GI NO: 21954072 NR Description: putative UDP-glucose glucosyltransferase
  misc_feature (1)..(446): NCBI GI NO: 19911209 NR Description: glucosyltransferase-13 [Vigna angularis]
  misc_feature (1)..(445): NCBI GI NO: 11994646 NR Description: UTP-glucose glucosyltransferase
  misc_feature (95)..(445): NCBI GI NO: 7488111 NR Description: probable glucosyltransferase - Arabidopsis thaliana
MGHLVPFARLAVALSEGHGCNVSVAAVQPTVSSAESRLLDALFVAAAPAVRRLDFRLAPFDESEFPGADPFFLRFEATRRSAPLLGPLLDAAEASALVTDIVLASVALPVARERGVPCYVLFTSSAAMLSLCAYFPAYLDAHAAAGSVGVGVGNVDIPGVFRIPKSSVPQALHDPDHLFTQQFVANGRCLVACDGILVNTFDAFEPDAVTALRQGSITVSGGFPPVFSVGPMLPVRFQAEETADYMRWLSAQPPRSVVYVSFGSRKAIPRDQLRELAAGLEASGKRFLWVVKSTIVDRDDTADLGGLLGDGFLERVQGRAFVTMGWVEQEEILQHGSVGLFISHCGWNSLTEAAAFGVPVLAWPRFGDQRVNAALVARSGLGAWEEGWTWDGEEGLTTRKEVAKKIKGMMGYDAVAEKAAKVGDAAAAAIAKCGTSYQSLEEFVQRCRDAERK

SEQ ID NO: 40467 - protein, 326 aa, Zea mays subsp. mays
  peptide (1)..(326): Ceres Seq. ID no. 15180140
  misc_feature (1)..(286): Pfam Name: Pfam Description:  UDP-glucoronosyl and UDP-glucosyl transferase
  misc_feature (1)..(323): NCBI GI NO: 22535568 NR Description: putative glucosyltransferase
  misc_feature (1)..(318): NCBI GI NO: 34910204 NR Description: putative flavonol glucosyltransferase
  misc_feature (1)..(317): NCBI GI NO: 34912752 NR Description: putative UTP-glucose glucosyltransferase
  misc_feature (1)..(317): NCBI GI NO: 34910218 NR Description: putative flavonol glucosyltransferase
  misc_feature (1)..(317): NCBI GI NO: 34910222 NR Description: putative flavonol glucosyltransferase
  misc_feature (1)..(326): NCBI GI NO: 15223396 NR Description: glycosyltransferase family [Arabidopsis thaliana]
  misc_feature (1)..(317): NCBI GI NO: 21954072 NR Description: putative UDP-glucose glucosyltransferase
  misc_feature (1)..(319): NCBI GI NO: 19911209 NR Description: glucosyltransferase-13 [Vigna angularis]
  misc_feature (1)..(318): NCBI GI NO: 11994646 NR Description: UTP-glucose glucosyltransferase
  misc_feature (1)..(318): NCBI GI NO: 7488111 NR Description: probable glucosyltransferase - Arabidopsis thaliana
MLSLCAYFPAYLDAHAAAGSVGVGVGNVDIPGVFRIPKSSVPQALHDPDHLFTQQFVANGRCLVACDGILVNTFDAFEPDAVTALRQGSITVSGGFPPVFSVGPMLPVRFQAEETADYMRWLSAQPPRSVVYVSFGSRKAIPRDQLRELAAGLEASGKRFLWVVKSTIVDRDDTADLGGLLGDGFLERVQGRAFVTMGWVEQEEILQHGSVGLFISHCGWNSLTEAAAFGVPVLAWPRFGDQRVNAALVARSGLGAWEEGWTWDGEEGLTTRKEVAKKIKGMMGYDAVAEKAAKVGDAAAAAIAKCGTSYQSLEEFVQRCRDAERK

SEQ ID NO: 40468 - DNA, 1441 bp, Zea mays subsp. mays
  misc_feature (1)..(1441): Ceres Seq. ID no. 12434855
agcgcttctcccagccacgtcttcatcacacacggtcgcggcgcgaagcaatggcgaccacggcgccgctgctctcgccccagcgcgcttgccctacccatctccggcgccgcctctcgcccctacatctcgtattccccctcgacgcgtcagcgaggcggctgcgccttcgccgggcgccgccaccttgttcggccaagttcggcaagttcgacgcctccgacgccccggcggaggccgaggaggcggggggcgcgacggatggtgggctggcgcagcccgtggaggaggacgacagttgcttgccatcggatttggagggcgcgattcggcagtcagggaaggcgagcgcagatttcgtaaactccggaggcatgcgagctatcgcagaactgctgatccctcagttggaattcctcaacgaggaaggagcacaggctgaactctgggcgttgtcaaagattttcctggacacacttgtacaagagacaggacagaaagttactgccattttccctgacgctggagcagctgcccttctcaagcatcaatggaaagatgcacaattcaagtgtgccagtttaggtgaccggaagccagttggtcctgaagatgaggtcgcagttatgattatccctgatcatcagatgctggaagctgttgaacgcatcacatctcaactctctgatgatcctataaaacctcttgtcatgtggaacccacggcttgttagtggagatgttggagtaggctttaatgtacggaatctgcggagaaatttcttaagcacttttaccactgtttactcgatgaggccattgccaactggtgcagtctttagatgctttccagggcagtggaaagtgttttatgatgatccaaataggccaaatcggtatttgcttgcccgagaactcacaagtaggcccgatgcaactgatattgagagaatatttggtggtgccgatgagcaatctgaagaggcaccatcgttgatgaacaatgtcatgggcgtgttcagttccgtgagtcggtttatgagggtcatctccaagtgagagtcgaagcaaacattggtcacacttgaagccatcaacaatcatcatgatgcttgagttatacaagaagattattttagtgcatccatgttgttttcagtctgtaattactccatggtactgctattcggaacagtatagtttggcgttccggcacatgccaccaaatgtgtgcacataccataccgtggattcctggagtcatctgctgatcctacaccgtgaggtcatttatgtaacttaggaaaaaaaagtagatagatcctcattctggaaaaggccgggtatctgattgtaattcaatactgtgcttgatatatcacaatcagctcgcattttgtaattcaatactggacgaatataaattcaatcctttgttttgc

SEQ ID NO: 40469 - protein, 351 aa, Zea mays subsp. mays
  peptide (1)..(351): Ceres Seq. ID no. 12434856
  misc_feature (66)..(347): NCBI GI NO: 18421131 NR Description: putative protein; protein id: At5g27560
  misc_feature (101)..(350): NCBI GI NO: 23130464 NR Description: hypothetical protein [Nostoc punctiforme]
  misc_feature (101)..(350): NCBI GI NO: 17230608 NR Description: hypothetical protein [Nostoc sp. PCC 7120]
  misc_feature (101)..(350): NCBI GI NO: 23040759 NR Description: hypothetical protein
  misc_feature (101)..(351): NCBI GI NO: 16329818 NR Description: unknown protein [Synechocystis sp. PCC 6803]
  misc_feature (101)..(316): NCBI GI NO: 37522361 NR Description: hypothetical protein glr2792
  misc_feature (170)..(325): NCBI GI NO: 33865786 NR Description: conserved hypothetical protein
  misc_feature (101)..(310): NCBI GI NO: 33861443 NR Description: conserved hypothetical protein
RFSQPRLHHTRSRREAMATTAPLLSPQRACPTHLRRRLSPLHLVFPLDASARRLRLRRAPPPCSAKFGKFDASDAPAEAEEAGGATDGGLAQPVEEDDSCLPSDLEGAIRQSGKASADFVNSGGMRAIAELLIPQLEFLNEEGAQAELWALSKIFLDTLVQETGQKVTAIFPDAGAAALLKHQWKDAQFKCASLGDRKPVGPEDEVAVMIIPDHQMLEAVERITSQLSDDPIKPLVMWNPRLVSGDVGVGFNVRNLRRNFLSTFTTVYSMRPLPTGAVFRCFPGQWKVFYDDPNRPNRYLLARELTSRPDATDIERIFGGADEQSEEAPSLMNNVMGVFSSVSRFMRVISK

SEQ ID NO: 40470 - protein, 335 aa, Zea mays subsp. mays
  peptide (1)..(335): Ceres Seq. ID no. 12434857
  misc_feature (50)..(331): NCBI GI NO: 18421131 NR Description: putative protein; protein id: At5g27560
  misc_feature (85)..(334): NCBI GI NO: 23130464 NR Description: hypothetical protein [Nostoc punctiforme]
  misc_feature (85)..(334): NCBI GI NO: 17230608 NR Description: hypothetical protein [Nostoc sp. PCC 7120]
  misc_feature (85)..(334): NCBI GI NO: 23040759 NR Description: hypothetical protein
  misc_feature (85)..(335): NCBI GI NO: 16329818 NR Description: unknown protein [Synechocystis sp. PCC 6803]
  misc_feature (85)..(300): NCBI GI NO: 37522361 NR Description: hypothetical protein glr2792
  misc_feature (154)..(309): NCBI GI NO: 33865786 NR Description: conserved hypothetical protein
  misc_feature (85)..(294): NCBI GI NO: 33861443 NR Description: conserved hypothetical protein
MATTAPLLSPQRACPTHLRRRLSPLHLVFPLDASARRLRLRRAPPPCSAKFGKFDASDAPAEAEEAGGATDGGLAQPVEEDDSCLPSDLEGAIRQSGKASADFVNSGGMRAIAELLIPQLEFLNEEGAQAELWALSKIFLDTLVQETGQKVTAIFPDAGAAALLKHQWKDAQFKCASLGDRKPVGPEDEVAVMIIPDHQMLEAVERITSQLSDDPIKPLVMWNPRLVSGDVGVGFNVRNLRRNFLSTFTTVYSMRPLPTGAVFRCFPGQWKVFYDDPNRPNRYLLARELTSRPDATDIERIFGGADEQSEEAPSLMNNVMGVFSSVSRFMRVISK

SEQ ID NO: 40471 - protein, 227 aa, Zea mays subsp. mays
  peptide (1)..(227): Ceres Seq. ID no. 12434858
  misc_feature (1)..(223): NCBI GI NO: 18421131 NR Description: putative protein; protein id: At5g27560
  misc_feature (1)..(226): NCBI GI NO: 23130464 NR Description: hypothetical protein [Nostoc punctiforme]
  misc_feature (1)..(226): NCBI GI NO: 17230608 NR Description: hypothetical protein [Nostoc sp. PCC 7120]
  misc_feature (1)..(226): NCBI GI NO: 23040759 NR Description: hypothetical protein
  misc_feature (1)..(227): NCBI GI NO: 16329818 NR Description: unknown protein [Synechocystis sp. PCC 6803]
  misc_feature (1)..(192): NCBI GI NO: 37522361 NR Description: hypothetical protein glr2792
  misc_feature (46)..(201): NCBI GI NO: 33865786 NR Description: conserved hypothetical protein
  misc_feature (1)..(186): NCBI GI NO: 33861443 NR Description: conserved hypothetical protein
MRAIAELLIPQLEFLNEEGAQAELWALSKIFLDTLVQETGQKVTAIFPDAGAAALLKHQWKDAQFKCASLGDRKPVGPEDEVAVMIIPDHQMLEAVERITSQLSDDPIKPLVMWNPRLVSGDVGVGFNVRNLRRNFLSTFTTVYSMRPLPTGAVFRCFPGQWKVFYDDPNRPNRYLLARELTSRPDATDIERIFGGADEQSEEAPSLMNNVMGVFSSVSRFMRVISK

SEQ ID NO: 40472 - DNA, 1848 bp, Zea mays subsp. mays
  misc_feature (1)..(1848): Ceres Seq. ID no. 12566909
gcacgagaccattacctagaacatcctaatcgaaaaatacacaaacacacggagctagcagcacggatcgagagaacaatggaggaaacaagcaggatccctgggtacttcaagaacaagggcatcctgatcacgggcgcaacaggcttccttggaaagagtaagcattcctcgtggagaagatactgagggtccagccggacgtaaagaggatctacctccccgtgcgtgcgccggatgctgcatcagccaagaaacgggtggagactgaggtgatcgggaaggagctgtttgggcttctccgagagacgcacggcaagaggttccactccttcatcgaggagaaggtggtcccgttggccggcgacatcatccacgagaacctgggcgtggaggggccccagctgaggcggatgactcgggagctcaacgtcatcgtcaatggagctgccacaacaaacttctacgagaggtacgacgtggccctggacgtgaacgtgatgggagtgaagcatatctgccagttggccaagcagtgccccaatctggaggtcgtcctccatgtgtccacggcctatgtggtgggggagaagcaggggatgatcctggagcgggcgttcaagcagggcgagaccctgcggatggagacggagctggacatggacgccgagctgcgggtggccagggactaccagcagcaggtcgccggggacgacgccgagcagaagaacgagaggaaggccatgaaggagctgggcctcgccagggcccgggagttgggctggcccaacacgtacgtcttcaccaaggcgctaggggagatgatgctggcgcgggagctgggcggcgtcgtccccgccgtgatcgtgcggcccagcatcatcacaagcatccataaggagccgctgccggggtggatggaagggaccaggaccatcgacgccatcctcattggctacgccaagcagagcctctcctgcttcctagccgacctccagctcaccatggacgtgatccccggggacatggtggtgaacgcgatgatggccgcgacggtggcgcacgcgtccgcccccggcggccacaaggaggagtcgccgacggtgtaccacgcgacgtcttccctccgcaaccctgcgccgtacgcggtgctgtaccggacgggaatccgctacttctgcgaccacccgcgcgtgggcaaggacggccgccccgtgcgtacccgcaaggtgcacttcttcggcaccgtcgcagccttcaccgcctacatgctgctccgctacaggctgccgctggagcttctgcgcctgctcagcctcctctccggcggcctcctcttctcgcgcctctacgccgacctggaccgcaagtacaggttcgtcatgcatctcgtcgacctctacgggcccttcgcgctcttcaagggcatcttcgacgacgccaacatggagagactcaggatggccatgcctgttgccgaccggctggagttcaacttcgacccaaacaccatcgactgggacgactacttctacaagatccacattccaggggtcatgaagtacgtcctcaagtagcagctacatgcactgatcgccgtcgttcgtactacctacatgtacatcatgatccatccagattagtactattaattaattaaatccaccaattggcgcgcgtttgtatacacattgctatatattgttgctacgctcgacgtggatcccacccatcctctctattcctcatcaaaatgtatccagttattagcagctctgctttagctaccactacgtacttctgctctggcttgtttatttagtgttaatttagcaggacctgatgatg

SEQ ID NO: 40473 - protein, 387 aa, Zea mays subsp. mays
  peptide (1)..(387): Ceres Seq. ID no. 12566910
  misc_feature (179)..(385): Pfam Name: Pfam Description:  Male sterility protein
  misc_feature (1)..(387): NCBI GI NO: 22003082 NR Description: fatty acyl coA reductase [Triticum aestivum]
  misc_feature (1)..(386): NCBI GI NO: 22003090 NR Description: fatty acyl coA reductase [Triticum aestivum]
  misc_feature (1)..(363): NCBI GI NO: 22003086 NR Description: fatty acyl coA reductase [Triticum aestivum]
  misc_feature (1)..(385): NCBI GI NO: 35215152 NR Description: putative fatty acyl coA reductase
  misc_feature (1)..(384): NCBI GI NO: 38346864 NR Description: OSJNBb0002N06.4
  misc_feature (1)..(384): NCBI GI NO: 38346871 NR Description: OSJNBb0002N06.11
  misc_feature (1)..(349): NCBI GI NO: 34394121 NR Description: putative fatty acyl coA reductase
  misc_feature (1)..(387): NCBI GI NO: 15242260 NR Description: male sterility 2-like protein (emb|CAA68191
  misc_feature (1)..(387): NCBI GI NO: 11357157 NR Description: acyl CoA reductase-protein - Arabidopsis thaliana
  misc_feature (1)..(386): NCBI GI NO: 5020215 NR Description: acyl CoA reductase [Simmondsia chinensis]
MTRELNVIVNGAATTNFYERYDVALDVNVMGVKHICQLAKQCPNLEVVLHVSTAYVVGEKQGMILERAFKQGETLRMETELDMDAELRVARDYQQQVAGDDAEQKNERKAMKELGLARARELGWPNTYVFTKALGEMMLARELGGVVPAVIVRPSIITSIHKEPLPGWMEGTRTIDAILIGYAKQSLSCFLADLQLTMDVIPGDMVVNAMMAATVAHASAPGGHKEESPTVYHATSSLRNPAPYAVLYRTGIRYFCDHPRVGKDGRPVRTRKVHFFGTVAAFTAYMLLRYRLPLELLRLLSLLSGGLLFSRLYADLDRKYRFVMHLVDLYGPFALFKGIFDDANMERLRMAMPVADRLEFNFDPNTIDWDDYFYKIHIPGVMKYVLK

SEQ ID NO: 40474 - protein, 358 aa, Zea mays subsp. mays
  peptide (1)..(358): Ceres Seq. ID no. 12566911
  misc_feature (150)..(356): Pfam Name: Pfam Description:  Male sterility protein
  misc_feature (1)..(358): NCBI GI NO: 22003082 NR Description: fatty acyl coA reductase [Triticum aestivum]
  misc_feature (1)..(357): NCBI GI NO: 22003090 NR Description: fatty acyl coA reductase [Triticum aestivum]
  misc_feature (1)..(334): NCBI GI NO: 22003086 NR Description: fatty acyl coA reductase [Triticum aestivum]
  misc_feature (1)..(356): NCBI GI NO: 35215152 NR Description: putative fatty acyl coA reductase
  misc_feature (1)..(355): NCBI GI NO: 38346864 NR Description: OSJNBb0002N06.4
  misc_feature (1)..(355): NCBI GI NO: 38346871 NR Description: OSJNBb0002N06.11
  misc_feature (1)..(320): NCBI GI NO: 34394121 NR Description: putative fatty acyl coA reductase
  misc_feature (1)..(358): NCBI GI NO: 15242260 NR Description: male sterility 2-like protein (emb|CAA68191
  misc_feature (1)..(358): NCBI GI NO: 11357157 NR Description: acyl CoA reductase-protein - Arabidopsis thaliana
  misc_feature (1)..(357): NCBI GI NO: 5020215 NR Description: acyl CoA reductase [Simmondsia chinensis]
MGVKHICQLAKQCPNLEVVLHVSTAYVVGEKQGMILERAFKQGETLRMETELDMDAELRVARDYQQQVAGDDAEQKNERKAMKELGLARARELGWPNTYVFTKALGEMMLARELGGVVPAVIVRPSIITSIHKEPLPGWMEGTRTIDAILIGYAKQSLSCFLADLQLTMDVIPGDMVVNAMMAATVAHASAPGGHKEESPTVYHATSSLRNPAPYAVLYRTGIRYFCDHPRVGKDGRPVRTRKVHFFGTVAAFTAYMLLRYRLPLELLRLLSLLSGGLLFSRLYADLDRKYRFVMHLVDLYGPFALFKGIFDDANMERLRMAMPVADRLEFNFDPNTIDWDDYFYKIHIPGVMKYVLK

SEQ ID NO: 40475 - protein, 325 aa, Zea mays subsp. mays
  peptide (1)..(325): Ceres Seq. ID no. 12566912
  misc_feature (117)..(323): Pfam Name: Pfam Description:  Male sterility protein
  misc_feature (1)..(325): NCBI GI NO: 22003082 NR Description: fatty acyl coA reductase [Triticum aestivum]
  misc_feature (1)..(324): NCBI GI NO: 22003090 NR Description: fatty acyl coA reductase [Triticum aestivum]
  misc_feature (1)..(301): NCBI GI NO: 22003086 NR Description: fatty acyl coA reductase [Triticum aestivum]
  misc_feature (1)..(323): NCBI GI NO: 35215152 NR Description: putative fatty acyl coA reductase
  misc_feature (1)..(322): NCBI GI NO: 38346864 NR Description: OSJNBb0002N06.4
  misc_feature (1)..(322): NCBI GI NO: 38346871 NR Description: OSJNBb0002N06.11
  misc_feature (1)..(287): NCBI GI NO: 34394121 NR Description: putative fatty acyl coA reductase
  misc_feature (1)..(325): NCBI GI NO: 15242260 NR Description: male sterility 2-like protein (emb|CAA68191
  misc_feature (1)..(325): NCBI GI NO: 11357157 NR Description: acyl CoA reductase-protein - Arabidopsis thaliana
  misc_feature (1)..(324): NCBI GI NO: 5020215 NR Description: acyl CoA reductase [Simmondsia chinensis]
MILERAFKQGETLRMETELDMDAELRVARDYQQQVAGDDAEQKNERKAMKELGLARARELGWPNTYVFTKALGEMMLARELGGVVPAVIVRPSIITSIHKEPLPGWMEGTRTIDAILIGYAKQSLSCFLADLQLTMDVIPGDMVVNAMMAATVAHASAPGGHKEESPTVYHATSSLRNPAPYAVLYRTGIRYFCDHPRVGKDGRPVRTRKVHFFGTVAAFTAYMLLRYRLPLELLRLLSLLSGGLLFSRLYADLDRKYRFVMHLVDLYGPFALFKGIFDDANMERLRMAMPVADRLEFNFDPNTIDWDDYFYKIHIPGVMKYVLK

SEQ ID NO: 40476 - DNA, 1364 bp, Zea mays subsp. mays
  misc_feature (1)..(1364): Ceres Seq. ID no. 12435531
gcacgagaccattacctagaacatcctaatcgaaaacccccgtcacctcctctgctccgtagcgccgccatccgtggcggcggcaatctaccgaacaccgtgcgtgcgtgtgttgccgcaatggcctcgcaccacctcgccagccccgccgcggccgcaacctccgccgccaccgtctccagggctctcttcaagcatgcctacactaaaccctcttactcccttctccacgccccgctcctccgcgccgtcgccgcccggcccgcgctcctctccgccgccaccgcggtctccactacggcggcgcccgcggccgcagctatggacaacgtggaggagtgggggctgaggccgctggccgaggtcgacccggaggtgtacgacctaatcgagcgcgagaagcggcggcagcgagcgggtatcgagctcatcgcctcggagaacttcacctcgctcgctgtcatggaggcgctgggctccccgctcaccaacaagtactcggagggcatgccgggggcgcgctactacggcggcaacgaggtcatcgacgaaatcgaggagctctgccggacccgcgcgctcgccgccttccacctcgaccccgcccgctggggcgtcaacgtgcagccctactcggggtcccccgccaatttcgcggcttacacggggctgctccagccgaacgacaggatcatggggctcgacctgccgtccgggggccacctcacccacgggtactacacggcgagtggcaagaagatttctgcaacctccatctacttccagagcctgccgtataaggtgagctccgacaccgggtacgtcgactacgataagctggaggaaaaggccatggatttccgccccaagcttatcatctgtggcggtagtgcgtgccctcgggagtgggattacgccaggttcagggccatcgcagacaagtgcggggccatgttgctctgcgacatggctcatatcagtggtctcgttgctgcgcaggaggctttggatccttttgagttctctgatgtggttaccactacgacccacaaaagtcttcgagggccaaggtctggtatgattttctacaggaagggcccaaagcctccaaaaaaaggccagcctgagggtgctctgtatgactacgaggacaagatcaactttgctgtgttcccgtcactccagggggggcctcacaatcaccaaattgctgctctagctgtagccttgaaacaggccatgtcacctggattcaaggcctatatccagcaggtcaaggcaaacacagtttcccttggtaaccatttgatgagtaagggctacaagttggttactgatggaacagagaaccaccttgttctctg

SEQ ID NO: 40477 - protein, 454 aa, Zea mays subsp. mays
  peptide (1)..(454): Ceres Seq. ID no. 12435532
  misc_feature (119)..(453): Pfam Name: Pfam Description:  Serine hydroxymethyltransferase
  misc_feature (108)..(453): NCBI GI NO: 15236375 NR Description: hydroxymethyltransferase; protein id: At4g13930
  misc_feature (108)..(453): NCBI GI NO: 21592544 NR Description: hydroxymethyltransferase [Arabidopsis thaliana]
  misc_feature (108)..(453): NCBI GI NO: 11762130 NR Description: AT4g13930 [Arabidopsis thaliana]
  misc_feature (108)..(453): NCBI GI NO: 15236371 NR Description: glycine hydroxymethyltransferase - like protein
  misc_feature (96)..(453): NCBI GI NO: 34907298 NR Description: putative hydroxymethyltransferase
  misc_feature (111)..(453): NCBI GI NO: 18400090 NR Description: putative hydroxymethyltransferase
  misc_feature (111)..(453): NCBI GI NO: 25286207 NR Description: probable hydroxymethyltransferase, 49598-47322
  misc_feature (111)..(453): NCBI GI NO: 15219182 NR Description: glycine hydroxymethyltransferase, putative
  misc_feature (111)..(453): NCBI GI NO: 21537165 NR Description: putative hydroxymethyltransferase
  misc_feature (82)..(453): NCBI GI NO: 17066746 NR Description: serine hydroxymethyltransferase
ARDHYLEHPNRKPPSPPLLRSAAIRGGGNLPNTVRACVAAMASHHLASPAAAATSAATVSRALFKHAYTKPSYSLLHAPLLRAVAARPALLSAATAVSTTAAPAAAAMDNVEEWGLRPLAEVDPEVYDLIEREKRRQRAGIELIASENFTSLAVMEALGSPLTNKYSEGMPGARYYGGNEVIDEIEELCRTRALAAFHLDPARWGVNVQPYSGSPANFAAYTGLLQPNDRIMGLDLPSGGHLTHGYYTASGKKISATSIYFQSLPYKVSSDTGYVDYDKLEEKAMDFRPKLIICGGSACPREWDYARFRAIADKCGAMLLCDMAHISGLVAAQEALDPFEFSDVVTTTTHKSLRGPRSGMIFYRKGPKPPKKGQPEGALYDYEDKINFAVFPSLQGGPHNHQIAALAVALKQAMSPGFKAYIQQVKANTVSLGNHLMSKGYKLVTDGTENHLVL

SEQ ID NO: 40478 - protein, 414 aa, Zea mays subsp. mays
  peptide (1)..(414): Ceres Seq. ID no. 12435533
  misc_feature (79)..(413): Pfam Name: Pfam Description:  Serine hydroxymethyltransferase
  misc_feature (68)..(413): NCBI GI NO: 15236375 NR Description: hydroxymethyltransferase; protein id: At4g13930
  misc_feature (68)..(413): NCBI GI NO: 21592544 NR Description: hydroxymethyltransferase [Arabidopsis thaliana]
  misc_feature (68)..(413): NCBI GI NO: 11762130 NR Description: AT4g13930 [Arabidopsis thaliana]
  misc_feature (68)..(413): NCBI GI NO: 15236371 NR Description: glycine hydroxymethyltransferase - like protein
  misc_feature (56)..(413): NCBI GI NO: 34907298 NR Description: putative hydroxymethyltransferase
  misc_feature (71)..(413): NCBI GI NO: 18400090 NR Description: putative hydroxymethyltransferase
  misc_feature (71)..(413): NCBI GI NO: 25286207 NR Description: probable hydroxymethyltransferase, 49598-47322
  misc_feature (71)..(413): NCBI GI NO: 15219182 NR Description: glycine hydroxymethyltransferase, putative
  misc_feature (71)..(413): NCBI GI NO: 21537165 NR Description: putative hydroxymethyltransferase
  misc_feature (42)..(413): NCBI GI NO: 17066746 NR Description: serine hydroxymethyltransferase
MASHHLASPAAAATSAATVSRALFKHAYTKPSYSLLHAPLLRAVAARPALLSAATAVSTTAAPAAAAMDNVEEWGLRPLAEVDPEVYDLIEREKRRQRAGIELIASENFTSLAVMEALGSPLTNKYSEGMPGARYYGGNEVIDEIEELCRTRALAAFHLDPARWGVNVQPYSGSPANFAAYTGLLQPNDRIMGLDLPSGGHLTHGYYTASGKKISATSIYFQSLPYKVSSDTGYVDYDKLEEKAMDFRPKLIICGGSACPREWDYARFRAIADKCGAMLLCDMAHISGLVAAQEALDPFEFSDVVTTTTHKSLRGPRSGMIFYRKGPKPPKKGQPEGALYDYEDKINFAVFPSLQGGPHNHQIAALAVALKQAMSPGFKAYIQQVKANTVSLGNHLMSKGYKLVTDGTENHLVL

SEQ ID NO: 40479 - protein, 347 aa, Zea mays subsp. mays
  peptide (1)..(347): Ceres Seq. ID no. 12435534
  misc_feature (12)..(346): Pfam Name: Pfam Description:  Serine hydroxymethyltransferase
  misc_feature (1)..(346): NCBI GI NO: 15236375 NR Description: hydroxymethyltransferase; protein id: At4g13930
  misc_feature (1)..(346): NCBI GI NO: 21592544 NR Description: hydroxymethyltransferase [Arabidopsis thaliana]
  misc_feature (1)..(346): NCBI GI NO: 11762130 NR Description: AT4g13930 [Arabidopsis thaliana]
  misc_feature (1)..(346): NCBI GI NO: 15236371 NR Description: glycine hydroxymethyltransferase - like protein
  misc_feature (1)..(346): NCBI GI NO: 34907298 NR Description: putative hydroxymethyltransferase
  misc_feature (4)..(346): NCBI GI NO: 18400090 NR Description: putative hydroxymethyltransferase
  misc_feature (4)..(346): NCBI GI NO: 25286207 NR Description: probable hydroxymethyltransferase, 49598-47322
  misc_feature (4)..(346): NCBI GI NO: 15219182 NR Description: glycine hydroxymethyltransferase, putative
  misc_feature (4)..(346): NCBI GI NO: 21537165 NR Description: putative hydroxymethyltransferase
  misc_feature (1)..(346): NCBI GI NO: 17066746 NR Description: serine hydroxymethyltransferase
MDNVEEWGLRPLAEVDPEVYDLIEREKRRQRAGIELIASENFTSLAVMEALGSPLTNKYSEGMPGARYYGGNEVIDEIEELCRTRALAAFHLDPARWGVNVQPYSGSPANFAAYTGLLQPNDRIMGLDLPSGGHLTHGYYTASGKKISATSIYFQSLPYKVSSDTGYVDYDKLEEKAMDFRPKLIICGGSACPREWDYARFRAIADKCGAMLLCDMAHISGLVAAQEALDPFEFSDVVTTTTHKSLRGPRSGMIFYRKGPKPPKKGQPEGALYDYEDKINFAVFPSLQGGPHNHQIAALAVALKQAMSPGFKAYIQQVKANTVSLGNHLMSKGYKLVTDGTENHLVL

SEQ ID NO: 40480 - DNA, 777 bp, Zea mays subsp. mays
  misc_feature (1)..(777): Ceres Seq. ID no. 13499348
aatcgaaaaacatgtctctctccttggagcgaagcagcagcgtggtccgcgacgtcgccacgcccgcgcctccggcgaccagtggcgccagtgcgccgtatccacgcgcgggcgcgggcgcgtcgctctccctgcccggcgcagcggcggcgcacgggcacagccagtacctgcccctcaacgaggacgactccctggacatggtcctcttcgacgtgctccgcgaggcatccggctccgcctccacctccgccgcggcgcccgccacctaccagccgccctcgtcgctgcctacgctgaaggcgctcgcttccggagccgcgcgcaggggcagcaggaccgcgtacgcaccgaaggcggccacggcggggcgccactaccgcggggtgaggcggcggccgtggggcaagtacgccgcggagatccgtgacccggcgcggcacggggcgcggctctggctcggcaccttcgccacggccgaggaggcagccgccgcgtaggaccgcgccgcggtccgcatgcgcggagccaaggcgctgctcaacttcccgccggcggtcgcgggctgcgggagcgccgcaaccgccacggcgaagcaggctgggctgacggaagccaagtgaacagcgaatgcgatctcaaaggaaccagctgcgaaactgtgtgtaatgtaattgtgtggaatagtagtatataatgtaaatgtggatgaactagagagagatttccattcatcattgaacggaccacaccaaggattccaaggcgccggttccc

SEQ ID NO: 40481 - protein, 165 aa, Zea mays subsp. mays
  peptide (1)..(165): Ceres Seq. ID no. 13499349
  misc_feature (4)..(165): NCBI GI NO: 34909594 NR Description: P0046E05.31
  misc_feature (17)..(165): NCBI GI NO: 7528276 NR Description: AP2-related transcription factor
  misc_feature (23)..(165): NCBI GI NO: 7489077 NR Description: transcription factor Pti4 - tomato (fragment)
  misc_feature (57)..(165): NCBI GI NO: 21264420 NR Description: Ethylene responsive element binding factor 1
  misc_feature (57)..(165): NCBI GI NO: 25350257 NR Description: EREBP-2 protein [imported] - Arabidopsis thaliana
  misc_feature (57)..(165): NCBI GI NO: 25350258 NR Description: ethylene responsive element binding factor 1
  misc_feature (33)..(165): NCBI GI NO: 8809571 NR Description: ethylene-responsive element binding factor
  misc_feature (18)..(165): NCBI GI NO: 7489123 NR Description: ethylene-responsive transcription factor ERF1 -common tobacco
  misc_feature (57)..(165): NCBI GI NO: 7489113 NR Description: DNA binding protein EREBP-2 - common tobacco
  misc_feature (57)..(165): NCBI GI NO: 21594007 NR Description: putative ethylene response element binding protein
SKNMSLSLERSSSVVRDVATPAPPATSGASAPYPRAGAGASLSLPGAAAAHGHSQYLPLNEDDSLDMVLFDVLREASGSASTSAAAPATYQPPSSLPTLKALASGAARRGSRTAYAPKAATAGRHYRGVRRRPWGKYAAEIRDPARHGARLWLGTFATAEEAAAA

SEQ ID NO: 40482 - protein, 162 aa, Zea mays subsp. mays
  peptide (1)..(162): Ceres Seq. ID no. 13499350
  misc_feature (1)..(162): NCBI GI NO: 34909594 NR Description: P0046E05.31
  misc_feature (14)..(162): NCBI GI NO: 7528276 NR Description: AP2-related transcription factor
  misc_feature (20)..(162): NCBI GI NO: 7489077 NR Description: transcription factor Pti4 - tomato (fragment)
  misc_feature (54)..(162): NCBI GI NO: 21264420 NR Description: Ethylene responsive element binding factor 1
  misc_feature (54)..(162): NCBI GI NO: 25350258 NR Description: ethylene responsive element binding factor 1
  misc_feature (54)..(162): NCBI GI NO: 25350257 NR Description: EREBP-2 protein [imported] - Arabidopsis thaliana
  misc_feature (30)..(162): NCBI GI NO: 8809571 NR Description: ethylene-responsive element binding factor
  misc_feature (15)..(162): NCBI GI NO: 7489123 NR Description: ethylene-responsive transcription factor ERF1 -common tobacco
  misc_feature (54)..(162): NCBI GI NO: 7489113 NR Description: DNA binding protein EREBP-2 - common tobacco
  misc_feature (54)..(162): NCBI GI NO: 21594007 NR Description: putative ethylene response element binding protein
MSLSLERSSSVVRDVATPAPPATSGASAPYPRAGAGASLSLPGAAAAHGHSQYLPLNEDDSLDMVLFDVLREASGSASTSAAAPATYQPPSSLPTLKALASGAARRGSRTAYAPKAATAGRHYRGVRRRPWGKYAAEIRDPARHGARLWLGTFATAEEAAAA

SEQ ID NO: 40483 - protein, 142 aa, Zea mays subsp. mays
  peptide (1)..(142): Ceres Seq. ID no. 13499351
IEKHVSLLGAKQQRGPRRRHARASGDQWRQCAVSTRGRGRVALPARRSGGARAQPVPAPQRGRLPGHGPLRRAPRGIRLRLHLRRGARHLPAALVAAYAEGARFRSRAQGQQDRVRTEGGHGGAPLPRGEAAAVGQVRRGDP

SEQ ID NO: 40484 - DNA, 484 bp, Zea mays subsp. mays
  misc_feature (1)..(484): Ceres Seq. ID no. 4613295
attggccgggctccagtgctgggcgttgtatgagaggtgagcctcccggtggagcgtgggtggtgccggggatgagctgcaacgggtgccgcgtgcttcgcaaggggtgcagcgacgcgtgcgtgctgcggccgtgcctgcagtggatcgacggcgccgaggcgcagggccacgccaccgtcttcgtcgccaagttcttcggccgcgccggcctcatgtccttcctcaccgccgtccccgagccgcagcgcccagcggtgttccagtcgttgatgtacgaggcggccgggcggacgatcaaccctgtgagcggcgccgtggggctgctcggcgcgggcagctggcagctgtgccaggcggcggtggagacggtgcttcggggcggcgccatcgggccgctgcccgagttcgacgggggccgcgacaacacgtttgctctggcggcgacggcgaggcgggccgtggggtgctcgacgttctccac

SEQ ID NO: 40485 - protein, 160 aa, Zea mays subsp. mays
  peptide (1)..(160): Ceres Seq. ID no. 4613296
  misc_feature (25)..(130): Pfam Name: Pfam Description:  Protein of unknown function DUF260
  misc_feature (24)..(159): NCBI GI NO: 34394489 NR Description: putative lateral organ boundaries
  misc_feature (24)..(139): NCBI GI NO: 15229644 NR Description: putative protein; protein id: At3g49940
  misc_feature (24)..(139): NCBI GI NO: 21553886 NR Description: unknown [Arabidopsis thaliana]
  misc_feature (24)..(135): NCBI GI NO: 15240739 NR Description: putative protein; protein id: At5g67420
  misc_feature (24)..(135): NCBI GI NO: 21593577 NR Description: unknown [Arabidopsis thaliana]
  misc_feature (24)..(135): NCBI GI NO: 15235604 NR Description: putative protein; protein id: At4g37540
  misc_feature (24)..(135): NCBI GI NO: 21592894 NR Description: unknown [Arabidopsis thaliana]
  misc_feature (24)..(159): NCBI GI NO: 40539088 NR Description: expressed protein
  misc_feature (24)..(134): NCBI GI NO: 34895540 NR Description: unnamed protein product
  misc_feature (24)..(133): NCBI GI NO: 15219829 NR Description: hypothetical protein; protein id: At1g67100.1
WPGSSAGRCMRGEPPGGAWVVPGMSCNGCRVLRKGCSDACVLRPCLQWIDGAEAQGHATVFVAKFFGRAGLMSFLTAVPEPQRPAVFQSLMYEAAGRTINPVSGAVGLLGAGSWQLCQAAVETVLRGGAIGPLPEFDGGRDNTFALAATARRAVGCSTFS

SEQ ID NO: 40486 - protein, 151 aa, Zea mays subsp. mays
  peptide (1)..(151): Ceres Seq. ID no. 4613297
  misc_feature (16)..(121): Pfam Name: Pfam Description:  Protein of unknown function DUF260
  misc_feature (15)..(150): NCBI GI NO: 34394489 NR Description: putative lateral organ boundaries
  misc_feature (15)..(130): NCBI GI NO: 15229644 NR Description: putative protein; protein id: At3g49940
  misc_feature (15)..(130): NCBI GI NO: 21553886 NR Description: unknown [Arabidopsis thaliana]
  misc_feature (15)..(126): NCBI GI NO: 15240739 NR Description: putative protein; protein id: At5g67420
  misc_feature (15)..(126): NCBI GI NO: 21593577 NR Description: unknown [Arabidopsis thaliana]
  misc_feature (15)..(126): NCBI GI NO: 15235604 NR Description: putative protein; protein id: At4g37540
  misc_feature (15)..(126): NCBI GI NO: 21592894 NR Description: unknown [Arabidopsis thaliana]
  misc_feature (15)..(150): NCBI GI NO: 40539088 NR Description: expressed protein
  misc_feature (15)..(125): NCBI GI NO: 34895540 NR Description: unnamed protein product
  misc_feature (15)..(124): NCBI GI NO: 15219829 NR Description: hypothetical protein; protein id: At1g67100.1
MRGEPPGGAWVVPGMSCNGCRVLRKGCSDACVLRPCLQWIDGAEAQGHATVFVAKFFGRAGLMSFLTAVPEPQRPAVFQSLMYEAAGRTINPVSGAVGLLGAGSWQLCQAAVETVLRGGAIGPLPEFDGGRDNTFALAATARRAVGCSTFS

SEQ ID NO: 40487 - protein, 137 aa, Zea mays subsp. mays
  peptide (1)..(137): Ceres Seq. ID no. 4613298
  misc_feature (2)..(107): Pfam Name: Pfam Description:  Protein of unknown function DUF260
  misc_feature (1)..(136): NCBI GI NO: 34394489 NR Description: putative lateral organ boundaries
  misc_feature (1)..(116): NCBI GI NO: 15229644 NR Description: putative protein; protein id: At3g49940
  misc_feature (1)..(116): NCBI GI NO: 21553886 NR Description: unknown [Arabidopsis thaliana]
  misc_feature (1)..(112): NCBI GI NO: 15240739 NR Description: putative protein; protein id: At5g67420
  misc_feature (1)..(112): NCBI GI NO: 21593577 NR Description: unknown [Arabidopsis thaliana]
  misc_feature (1)..(112): NCBI GI NO: 15235604 NR Description: putative protein; protein id: At4g37540
  misc_feature (1)..(112): NCBI GI NO: 21592894 NR Description: unknown [Arabidopsis thaliana]
  misc_feature (1)..(136): NCBI GI NO: 40539088 NR Description: expressed protein
  misc_feature (1)..(111): NCBI GI NO: 34895540 NR Description: unnamed protein product
  misc_feature (1)..(110): NCBI GI NO: 15219829 NR Description: hypothetical protein; protein id: At1g67100.1
MSCNGCRVLRKGCSDACVLRPCLQWIDGAEAQGHATVFVAKFFGRAGLMSFLTAVPEPQRPAVFQSLMYEAAGRTINPVSGAVGLLGAGSWQLCQAAVETVLRGGAIGPLPEFDGGRDNTFALAATARRAVGCSTFS

SEQ ID NO: 40488 - DNA, 1830 bp, Zea mays subsp. mays
  misc_feature (1)..(1830): Ceres Seq. ID no. 12376720
gcacgagaccattacctagaacatcctaatcaaaaagcgtactgccaccgcaatcgtctcgtttcatacagggcagggaagtcaggaggaagatgatgcagcaggagccctggaacgccgccgccgccatggggctcctccgcccgaccaagtcggctccctgctcgcccatcaagccgccgccggcgaccatgctgcggactcacttccacgtcgcgcacaaggtgccggtcggcgacacgccctacgtgcgagccaagcgcgtccagctggtggacaaggatccggagaaggcgatcgcgctgttctggagtgcgatcaacgccggagaccgcgttgacagcgcgctcaaggacatggccatcgtgatgaagcagcagaaccgcgccgaggaggccatcgaggccatcaagtcgctgcgcagccgatgctccgaccaggcgcaggagtccctcgacaacatcctcctcgatctctacaagagatgcgggcggctggacgaccaaatctcgctgctcaagcacaagctgcagctgatcaaccagggccacgccttcaacggcaagcggaccaaaacggctcgctctcagggccgcaagttccaggtcaccctggagcaagaagccaccaggctccttggtaacctggggtgggcgctgatgcagaaggagaactacacggaagcggagggagcgtaccgtcgggcgctgctcatcgggccggacaacaacaagatgtgcaatcggcatctgccttatgaagcaggcccgcgtgctcgaggccaaggatgtgctcaagcaggtacgccccgcggcggttgatggtctgcgcggcgccgactctcacctcaaggcctacgagcgagcgcaggagatgctgcgggacctcgagaccaagctcatcggccgcccgcgcgctgaccagctcgacacgaactggctcttcgatgcgctgctgctgggatcgtcctcaagcatctggcagccgcagccgtgcaccgatcacttgctgccacctcctgttccggctccagccacggcgccgcgcggccacttcgccgatgaaaacgccggtgtgagcaagaagctggcggtgctccaggagaacatgcttaatgtggacgcgcagcccttctactctttgcgggtgtcgtcgctcgcagccaagtcacataacacgctgcctcagcggcaacagcagcagaagccagctcctgtccatgatcccctgggcaacctgaagagaacacggtccggcaattgcatggacaaggcaggagcagtggtgttcaaggagcagagcatcgacgagaacagcggcaggaggaagtcgctgtcagctgaggacaggtggccagagctacccgaccacagcgcgttcgatgaggccctcgtcgcggccgtcctggctccagtgctcgacgacgaaccaacagctactgaagtcaagctgccggcgagctgcggcacgagtccagcggtgaaggaaaagatcggcaagaggctgaggattttccaggacatcacacagacagtgaacagtttctgattcgttttggttttcttcaatttcctactcacaaattaatcagggaaggagaaagggcttgttctcctgggagctaaattaatcagggattcgattcgatttttaatttgatgctgattttaatttaatttattaacacacaaaaataacagctgattcgcttcttcagcttgacactttagaagcgcgcgcttcctttaccgcaagattctcctcgtaatagaagtggactgcatcttgttctaatttcatttcttttgaaataacaaagttcatttgtgg

SEQ ID NO: 40489 - protein, 263 aa, Zea mays subsp. mays
  peptide (1)..(263): Ceres Seq. ID no. 12376721
  misc_feature (1)..(131): NCBI GI NO: 15230439 NR Description: MS5-like protein; protein id: At3g51280.1
  misc_feature (1)..(190): NCBI GI NO: 3859112 NR Description: male sterility MS5 [Arabidopsis thaliana]
  misc_feature (1)..(55): NCBI GI NO: 4028970 NR Description: pollenless3 [Arabidopsis thaliana]
  misc_feature (1)..(190): NCBI GI NO: 15233432 NR Description: putative protein; protein id: At4g20900.1
  misc_feature (1)..(131): NCBI GI NO: 25455795 NR Description: MS5-like protein
MKQARVLEAKDVLKQVRPAAVDGLRGADSHLKAYERAQEMLRDLETKLIGRPRADQLDTNWLFDALLLGSSSSIWQPQPCTDHLLPPPVPAPATAPRGHFADENAGVSKKLAVLQENMLNVDAQPFYSLRVSSLAAKSHNTLPQRQQQQKPAPVHDPLGNLKRTRSGNCMDKAGAVVFKEQSIDENSGRRKSLSAEDRWPELPDHSAFDEALVAAVLAPVLDDEPTATEVKLPASCGTSPAVKEKIGKRLRIFQDITQTVNSF

SEQ ID NO: 40490 - protein, 242 aa, Zea mays subsp. mays
  peptide (1)..(242): Ceres Seq. ID no. 12376722
  misc_feature (179)..(212): Pfam Name: Pfam Description:  TPR Domain
  misc_feature (15)..(217): NCBI GI NO: 15230439 NR Description: MS5-like protein; protein id: At3g51280.1
  misc_feature (36)..(217): NCBI GI NO: 3859112 NR Description: male sterility MS5 [Arabidopsis thaliana]
  misc_feature (36)..(217): NCBI GI NO: 4028970 NR Description: pollenless3 [Arabidopsis thaliana]
  misc_feature (39)..(217): NCBI GI NO: 9758884 NR Description: gb|AAC72543
  misc_feature (39)..(217): NCBI GI NO: 30695554 NR Description: male sterility MS5 family [Arabidopsis thaliana]
  misc_feature (39)..(217): NCBI GI NO: 3859116 NR Description: unknown [Oryza sativa]
  misc_feature (39)..(217): NCBI GI NO: 25406811 NR Description: hypothetical protein
  misc_feature (39)..(217): NCBI GI NO: 30678993 NR Description: male sterility MS5 family [Arabidopsis thaliana]
  misc_feature (36)..(217): NCBI GI NO: 15233432 NR Description: putative protein; protein id: At4g20900.1
  misc_feature (142)..(217): NCBI GI NO: 25455795 NR Description: MS5-like protein
MMQQEPWNAAAAMGLLRPTKSAPCSPIKPPPATMLRTHFHVAHKVPVGDTPYVRAKRVQLVDKDPEKAIALFWSAINAGDRVDSALKDMAIVMKQQNRAEEAIEAIKSLRSRCSDQAQESLDNILLDLYKRCGRLDDQISLLKHKLQLINQGHAFNGKRTKTARSQGRKFQVTLEQEATRLLGNLGWALMQKENYTEAEGAYRRALLIGPDNNKMCNRHLPYEAGPRARGQGCAQAGTPRGG

SEQ ID NO: 40491 - protein, 241 aa, Zea mays subsp. mays
  peptide (1)..(241): Ceres Seq. ID no. 12376723
  misc_feature (178)..(211): Pfam Name: Pfam Description:  TPR Domain
  misc_feature (14)..(216): NCBI GI NO: 15230439 NR Description: MS5-like protein; protein id: At3g51280.1
  misc_feature (35)..(216): NCBI GI NO: 3859112 NR Description: male sterility MS5 [Arabidopsis thaliana]
  misc_feature (35)..(216): NCBI GI NO: 4028970 NR Description: pollenless3 [Arabidopsis thaliana]
  misc_feature (38)..(216): NCBI GI NO: 9758884 NR Description: gb|AAC72543
  misc_feature (38)..(216): NCBI GI NO: 30695554 NR Description: male sterility MS5 family [Arabidopsis thaliana]
  misc_feature (38)..(216): NCBI GI NO: 3859116 NR Description: unknown [Oryza sativa]
  misc_feature (38)..(216): NCBI GI NO: 25406811 NR Description: hypothetical protein
  misc_feature (38)..(216): NCBI GI NO: 30678993 NR Description: male sterility MS5 family [Arabidopsis thaliana]
  misc_feature (35)..(216): NCBI GI NO: 15233432 NR Description: putative protein; protein id: At4g20900.1
  misc_feature (141)..(216): NCBI GI NO: 25455795 NR Description: MS5-like protein
MQQEPWNAAAAMGLLRPTKSAPCSPIKPPPATMLRTHFHVAHKVPVGDTPYVRAKRVQLVDKDPEKAIALFWSAINAGDRVDSALKDMAIVMKQQNRAEEAIEAIKSLRSRCSDQAQESLDNILLDLYKRCGRLDDQISLLKHKLQLINQGHAFNGKRTKTARSQGRKFQVTLEQEATRLLGNLGWALMQKENYTEAEGAYRRALLIGPDNNKMCNRHLPYEAGPRARGQGCAQAGTPRGG

SEQ ID NO: 40492 - DNA, 1055 bp, Zea mays subsp. mays
  misc_feature (1)..(1055): Ceres Seq. ID no. 12367864
accgtcgtcctcttcttcctcctcgccctcgtcgcggagcggagtggaggcgcgcgttccgggacggcacgggacaggagcggaggaagctcatctgggtgttggcctcatcccctgcacaagctgaggaatggggcaaaaggactccaagccttcaaatggatatggctactcttctgattacgggggtacttcatcgggatataacttgagaaatactggaagtacgtcctccagttatggcgcgaggtatgtgccttcttcagagaacaatgtacagccagaaacacatgccaggttgcagaggaagtattccaggattggtgatgactatcgttctctgagtcaggtgactgaagctttggcgcaagcaggccttgaatcttcaaatcttatcgtaggcattgattttacaaagagcaatgaatggacaggtaaaatttcatttaatcgccgctgcctacatgatattggaaacactccgaacccatatgagcaagctatatctattattggaaggacactttcagtatttgatgaagataacttgattccctgctttggatttggtgacgcatcaactcatgatcaggaggtattcagcttttacccagagaaccgcccatgcaacggatttgaagaggcactagacagatacagagaaatcgttccaactcttcgattagcaggacctacatctttcgctccgatgatcgagacagcaattggaattgttgacagcactggtggtcaatatcatgttcttctgataatcgcagatggacaggttacccgaagtgtcgatacacaatctggacaattgagtccacaggagcgggatactatagatgcaatagtaagagcaagccagttccccctgtcaattgttcttgttggggttggtgatggaccatgggacatgatgcaccagtttgatgacaatatacctgctcggtcatttgacaatttccagtttgtgaacttcacggagattatgtcaaagagcatagcagctgacagaaaggaggcagaatttgcattgtcagcgctgatgg

SEQ ID NO: 40493 - protein, 308 aa, Zea mays subsp. mays
  peptide (1)..(308): Ceres Seq. ID no. 12367865
  misc_feature (11)..(307): NCBI GI NO: 20804894 NR Description: P0497A05.19
  misc_feature (8)..(307): NCBI GI NO: 15241400 NR Description: putative protein; protein id: At5g14420
  misc_feature (21)..(307): NCBI GI NO: 15232157 NR Description: unknown protein; protein id: At3g01650.1
  misc_feature (1)..(307): NCBI GI NO: 18408863 NR Description: F12A21
  misc_feature (1)..(307): NCBI GI NO: 30697566 NR Description: copine-related [Arabidopsis thaliana]
  misc_feature (55)..(307): NCBI GI NO: 18481708 NR Description: hypothetical protein [Sorghum bicolor]
  misc_feature (41)..(307): NCBI GI NO: 34905794 NR Description: P0401G10.23
  misc_feature (20)..(307): NCBI GI NO: 18412353 NR Description: expressed protein; protein id: At1g79380
  misc_feature (62)..(307): NCBI GI NO: 8777310 NR Description: gb|AAF01562
  misc_feature (62)..(307): NCBI GI NO: 22328041 NR Description: putative protein; protein id: At5g63970
MGQKDSKPSNGYGYSSDYGGTSSGYNLRNTGSTSSSYGARYVPSSENNVQPETHARLQRKYSRIGDDYRSLSQVTEALAQAGLESSNLIVGIDFTKSNEWTGKISFNRRCLHDIGNTPNPYEQAISIIGRTLSVFDEDNLIPCFGFGDASTHDQEVFSFYPENRPCNGFEEALDRYREIVPTLRLAGPTSFAPMIETAIGIVDSTGGQYHVLLIIADGQVTRSVDTQSGQLSPQERDTIDAIVRASQFPLSIVLVGVGDGPWDMMHQFDDNIPARSFDNFQFVNFTEIMSKSIAADRKEAEFALSALM

SEQ ID NO: 40494 - DNA, 947 bp, Zea mays subsp. mays
  misc_feature (1)..(947): Ceres Seq. ID no. 12633396
aagtaaaatgataagacgtgttgtagcctgcaagacgcggcaaatttatcttgtttgagtgagcagctgacgtcaacatcgtccactgcatgctctgaaaccgtagaatgtacctccagccatcagaaacggtcacatgctagtgcaaggtccaaagatgacacccagtcctccggaaacaagcacaaggtcgacggagcccgtgtcggtgctggcacaggtgcaccttcttgcagcgccgacgttccaaagtctgatccgagcccttccacggatgctaagttggtagcgacccagcctgccagtattcgcgcaacggacctgatggaagctaccgttccgcgttgggatgatgtagacgtgccaaatataaaggtcgctgagccgcagtccaaacgcaagagcggtggctacatcttagatgagtgggacgaggagtacgaccgagggaagacgaagaaggtgcggaggtcaaagcaagactttggcgggccaaacccgttccaggaggaggcggactacgtatcgcagcggaggacgaagcagaaatcctaccgaggcaagtcttggaacaagcgggcctaacacggtagagaggggggagttgagagaatacgcgcgcgagagagagaatccccggacgcacatgctgtttgttgttacgttttagcacccattggtgagggagatttacgttaaaaaccatccgttgtcggtagtccccattagctgtcgaagttatgacgttttgggcagttttcgtagaacatttgaaacatttgttcggttgtaacggagtgctgtttagttgagttggggggaacaaaattggcgagactattttgctgcattctgctctgctgtttagttactgatgaagaataaaacgatggtggtgatcagttttatgattcagtgcttgccaatgcgatctttatccttttggg

SEQ ID NO: 40495 - protein, 86 aa, Zea mays subsp. mays
  peptide (1)..(86): Ceres Seq. ID no. 12633397
  misc_feature (1)..(86): NCBI GI NO: 29367503 NR Description: putative ubiquitin-specific protease
  misc_feature (1)..(75): NCBI GI NO: 9758368 NR Description: contains similarity to deubiquitinatingenzyme~gene_id:MTI20
  misc_feature (1)..(75): NCBI GI NO: 11993486 NR Description: ubiquitin-specific protease 23
  misc_feature (1)..(75): NCBI GI NO: 18424054 NR Description: ubiquitin-specific protease 23
MEATVPRWDDVDVPNIKVAEPQSKRKSGGYILDEWDEEYDRGKTKKVRRSKQDFGGPNPFQEEADYVSQRRTKQKSYRGKSWNKRA

SEQ ID NO: 40496 - protein, 82 aa, Zea mays subsp. mays
  peptide (1)..(82): Ceres Seq. ID no. 12633398
MSGTRSTTEGRRRRCGGQSKTLAGQTRSRRRRTTYRSGGRSRNPTEASLGTSGPNTVERGELREYARERENPRTHMLFVVTF

SEQ ID NO: 40497 - protein, 50 aa, Zea mays subsp. mays
  peptide (1)..(50): Ceres Seq. ID no. 12633399
MLVQGPKMTPSPPETSTRSTEPVSVLAQVHLLAAPTFQSLIRALPRMLSW

SEQ ID NO: 40498 - DNA, 1270 bp, Zea mays subsp. mays
  misc_feature (1)..(1270): Ceres Seq. ID no. 12375639
gcacgagaccattacctagaacatcctaatcaaaaaaaccgcgagcgcctccgcatttcgaaccaaagggggcagaactgagagatcgagagaaataataaaaaaaaatccgtcttcttgtggtcttctccaaaccctagcgcccccggccccggtctccgcccccccgccttcgccgtcgcggtcgcgccccatggcggggaagtcgcgaccgcccaagcggatcctcgagtcctataccatcaagggttcggacagagtcatcaagcctggcgattgcgtgctaatgagggcatctgatgcttcaaagccaccttatgtggcaagagttgaggcaattgaagcagcaggatctcgaggcaccaatgtgagagtacgagtgcggtggtattatcgaccagaggagtccataggtggtcggcggccatttcatggttccaaggaggttttcctctctgaccactatgatgtacaaagtgctgacaccattgaggggaaatgcaatgtccacagcttccgtagctatacaaagcttgattctgtcaatgctgaggatttcttctgccgcttcgagtataaatcagctactggcagctttgtaccagatcgtatagcagtgttttgcaagtgcgagatgccatacaatccagatgaccttatgatccaatgcgaggaatgttctgactggtttcaccctgcttgcattgggatgacaatcaaagaagcaaagaaactcgagcattttttctgccagacctgtacagctgaaaatggtaagatggttgagaattcacatgaagctacagcgcaatcagaagaaaagccggtggagtcaaaaaggcggcgaaggtgatggccgtgctgattaaatttatgaaatctatgctcggttgtacaaagccttcccacgtttcacgtttgagaactgtaattttattgttcgtcgcagtttgtggtcctgggctggggtccctctaatgtcaggcacactgtatatagcttgtaacctggtcagattgttgtattagagcacactagggtttgtgtgatagcacggaagttcggactactgagtatgtgtagagtatggcattataatgccagcatcaggtgatcaggcttcttctgggcattaggactcctgcatgatccagcaataatacttccatgcagctggacctggttagtcactagtaagttgtcaggaaacttagtactgccatgtgaactttttttgaaaccctctatgtaatgtaagcatctgtgtcct

SEQ ID NO: 40499 - protein, 219 aa, Zea mays subsp. mays
  peptide (1)..(219): Ceres Seq. ID no. 12375640
  misc_feature (23)..(139): Pfam Name: Pfam Description:  BAH domain
  misc_feature (4)..(219): NCBI GI NO: 33146914 NR Description: putative ES43 protein
  misc_feature (3)..(219): NCBI GI NO: 629783 NR Description: ES43 protein - barley
  misc_feature (1)..(219): NCBI GI NO: 34897170 NR Description: putative DNA-binding protein
  misc_feature (4)..(219): NCBI GI NO: 37573088 NR Description: receptor like protein
  misc_feature (4)..(216): NCBI GI NO: 18420377 NR Description: ES43 like protein; protein id: At4g39100
  misc_feature (4)..(216): NCBI GI NO: 21595796 NR Description: ES43 like protein [Arabidopsis thaliana]
  misc_feature (4)..(210): NCBI GI NO: 7484948 NR Description: ES43 protein homolog F19H22
  misc_feature (4)..(213): NCBI GI NO: 34904940 NR Description: OSJNBa0077M12.13
  misc_feature (27)..(210): NCBI GI NO: 11292613 NR Description: receptor like protein - Arabidopsis thaliana
  misc_feature (32)..(210): NCBI GI NO: 15234729 NR Description: receptor like protein
MAGKSRPPKRILESYTIKGSDRVIKPGDCVLMRASDASKPPYVARVEAIEAAGSRGTNVRVRVRWYYRPEESIGGRRPFHGSKEVFLSDHYDVQSADTIEGKCNVHSFRSYTKLDSVNAEDFFCRFEYKSATGSFVPDRIAVFCKCEMPYNPDDLMIQCEECSDWFHPACIGMTIKEAKKLEHFFCQTCTAENGKMVENSHEATAQSEEKPVESKRRRR

SEQ ID NO: 40500 - protein, 188 aa, Zea mays subsp. mays
  peptide (1)..(188): Ceres Seq. ID no. 12375641
  misc_feature (1)..(108): Pfam Name: Pfam Description:  BAH domain
  misc_feature (1)..(188): NCBI GI NO: 33146914 NR Description: putative ES43 protein
  misc_feature (1)..(188): NCBI GI NO: 629783 NR Description: ES43 protein - barley
  misc_feature (1)..(188): NCBI GI NO: 34897170 NR Description: putative DNA-binding protein
  misc_feature (1)..(188): NCBI GI NO: 37573088 NR Description: receptor like protein
  misc_feature (1)..(185): NCBI GI NO: 18420377 NR Description: ES43 like protein; protein id: At4g39100
  misc_feature (1)..(185): NCBI GI NO: 21595796 NR Description: ES43 like protein [Arabidopsis thaliana]
  misc_feature (1)..(179): NCBI GI NO: 7484948 NR Description: ES43 protein homolog F19H22
  misc_feature (1)..(182): NCBI GI NO: 34904940 NR Description: OSJNBa0077M12.13
  misc_feature (1)..(179): NCBI GI NO: 11292613 NR Description: receptor like protein - Arabidopsis thaliana
  misc_feature (1)..(179): NCBI GI NO: 15234729 NR Description: receptor like protein
MRASDASKPPYVARVEAIEAAGSRGTNVRVRVRWYYRPEESIGGRRPFHGSKEVFLSDHYDVQSADTIEGKCNVHSFRSYTKLDSVNAEDFFCRFEYKSATGSFVPDRIAVFCKCEMPYNPDDLMIQCEECSDWFHPACIGMTIKEAKKLEHFFCQTCTAENGKMVENSHEATAQSEEKPVESKRRRR

SEQ ID NO: 40501 - DNA, 1270 bp, Zea mays subsp. mays
  misc_feature (1)..(1270): Ceres Seq. ID no. 12366459
gcacgagaccattacctagaacatcctaatcgaaaacgatatgcggacacctgttcggaagtatcttgtgcagatactatccggagtcgaaataagccactgaaatcgacacaacgaaagccaccgcaacttcatacagcaaatagagctaggccaccaagtgtgaaaagttctcaggaacttgaactggaggagctggagaaggcccccaagttcagggccaagccactaaacaaaaagattcttgagagtaagggagacattggagtgtttgtccatcctaagtctcaggtcacagctcccaaagaattccgtttttgtaccgatgttcgcttgggtcctccatcagttgctgacttatttgacaagctctctcttcactctgaatgttcttcaaacagtaacaggcaaggtgtgcctagatgcaccataccaaaccctttcagtctacaaacagaggaaagaggtcaattaaaagagaggcagctagaagcacaactcttacaaaagaaggtggaggaggaaaaggccagggttcacaaagctaacccttacccatacaccacagactatccgatggtgccgccgaagcctgaacctaagccctgtacgagaccagaaggctttcaactagagagtttggtgagacacgaattagagcagcaaaggctgatggaagaaaggcagagaatggagagagaagaagctcagaggagaatcgtcaaagctcaacctgtactgaaagaggaccctatcccacttccggagaaagagcggaaacctctcactgaagttcaacaatttgtgttgcatgttgatgagagggctgtgcatagatcagaatttgatagcatgataaaagagaaagaaaagacttacaaaaggttgagagaggagaacgaattcgcgcaaaagattgaggaggagaaggcgctgaagcagctgaggagaaccatggtgccacatgcccggcaggtccccaagtttgacaaaccattccgaccacagaaatcgacgaagcaggtgacaagaccgaagtcgccacagcttcaggtggatgagcgaggggcgaggaggcatgctttaatcagatgaccaccatcctcgcctcaagatctctgcgacgttgtttatgtatctgttcgtcgggctactaagattcttttttcgctgaccaatttgtagagcaggccagcaacccattgccgctgctgtgtgtgtaggttggtgatgttttatgattatctcaatgatgacactttttaatcgg

SEQ ID NO: 40502 - protein, 364 aa, Zea mays subsp. mays
  peptide (1)..(364): Ceres Seq. ID no. 12366460
  misc_feature (2)..(349): NCBI GI NO: 25406742 NR Description: hypothetical protein
  misc_feature (2)..(286): NCBI GI NO: 30678673 NR Description: expressed protein [Arabidopsis thaliana]
  misc_feature (282)..(364): NCBI GI NO: 25406742 NR Description: hypothetical protein
  misc_feature (30)..(80): NCBI GI NO: 25406742 NR Description: hypothetical protein
  misc_feature (239)..(359): NCBI GI NO: 15241452 NR Description: putative protein; protein id: At5g44270.1
  misc_feature (209)..(354): NCBI GI NO: 30685394 NR Description: expressed protein [Arabidopsis thaliana]
  misc_feature (209)..(354): NCBI GI NO: 15232025 NR Description: hypothetical protein; protein id: At3g01015.1
  misc_feature (59)..(348): NCBI GI NO: 28071277 NR Description: restricted expression proliferation associated protein-100
  misc_feature (209)..(354): NCBI GI NO: 11358122 NR Description: hypothetical protein T20K14_120 - Arabidopsisthaliana
  misc_feature (32)..(294): NCBI GI NO: 28071277 NR Description: restricted expression proliferation associated protein-100
ARDHYLEHPNRKRYADTCSEVSCADTIRSRNKPLKSTQRKPPQLHTANRARPPSVKSSQELELEELEKAPKFRAKPLNKKILESKGDIGVFVHPKSQVTAPKEFRFCTDVRLGPPSVADLFDKLSLHSECSSNSNRQGVPRCTIPNPFSLQTEERGQLKERQLEAQLLQKKVEEEKARVHKANPYPYTTDYPMVPPKPEPKPCTRPEGFQLESLVRHELEQQRLMEERQRMEREEAQRRIVKAQPVLKEDPIPLPEKERKPLTEVQQFVLHVDERAVHRSEFDSMIKEKEKTYKRLREENEFAQKIEEEKALKQLRRTMVPHARQVPKFDKPFRPQKSTKQVTRPKSPQLQVDERGARRHALIR

SEQ ID NO: 40503 - DNA, 1517 bp, Zea mays subsp. mays
  misc_feature (1)..(1517): Ceres Seq. ID no. 12375635
gcacgagaccattacctagaacatcctaatcgaaaaatcattcatctatctgatctcatctcctatcttccctctctctcctccccgtcgtctgcctcctttgcccggcaagaccgcctgcccatgtccgtggcgccgtgcaatccgcttcttcagcgcagctccgatccgccaacgccgcccaaggagccgggatcggccgagagagcgtgctgacgagaggcaggcagcggaacagagcagcggcccgcaaggcgattgctctattctgccctgttccagcgttccatgcatggatgccaaggaactcatctcacagtccgacctgcagtcgttctaccagcagcaacaacagcagcaccgtgccttcggcggccaccatagcccgtcctcgctggctgggatgcactccgtcatccgacccatgcccaacatgaatatgagcccaactgctatccttaactccatcagcgggggttccctcgccggcatgcagttccagatggacccgcccccaccattgctgcacaagatcaacgccaccggcgctgtcacaccggcccctgcggagcctctcaagcgcaaacgaggaaggccgcgcaaatacggacctgatggcaccatgaggcaacaacaacaacagcaacaggccgcgtcatcgcagcagcagcagcagcagctcgtcgctacacaaccgaggatatgttctctatcatcgggtcccgacatgctcggcagctccggtatggaggaccccgcgcagaagaagcggcgcggccggccgccgggcaccggcaagaagcaccagccctcgacctcacaaggcaacgcgttcgccggttcggctggaacgaacttcactccgcacatcatcacggcgtctccttcagaggacgtggcggcgaagatcgttgcgttcgccagccagtcgtcaaaggcgatgtgcgtcctctcggcgatgggttccgtctccagggccgtcctccgccacccggccgacggctctcccatggcgagggttcacgcgtcgccgcagccgtacaagaaccctgctgtctacgagggtttctacgagatcctgagcctaaccggctcgtacaacctggcacacggcggcggcctcagcgtcacgctctgcagccctgagaggaacgtgatcggaggcgttctgggcggcccactggtagctgcaggcaccgtgcaggtggttctggggagttttcaccagggagggtcgagatccaagtccaagaaagccgggaagcagcagcaggcggcggccttcagccccgactcgctcaccggcggccaggaggcgtcgccccagctccgggcacaaccaaaatctaacgccgccgccctccgtgacgggagggtggcccacctccggcatatttgacaccagaagttccagcattgatatcaactcgtctagaggctagctcattcgtcgatatagttccagctcgacagaaattttctgttttcgcacaagaatacccaaaaaccatacttcc

SEQ ID NO: 40504 - protein, 368 aa, Zea mays subsp. mays
  peptide (1)..(368): Ceres Seq. ID no. 12375636
  misc_feature (156)..(367): NCBI GI NO: 15225902 NR Description: putative AT-hook DNA-binding protein
  misc_feature (1)..(111): NCBI GI NO: 15225902 NR Description: putative AT-hook DNA-binding protein
  misc_feature (141)..(356): NCBI GI NO: 38346715 NR Description: OSJNBa0086O06.13
  misc_feature (32)..(124): NCBI GI NO: 38346715 NR Description: OSJNBa0086O06.13
  misc_feature (139)..(321): NCBI GI NO: 11281387 NR Description: probable DNA-binding protein - Arabidopsis thaliana
  misc_feature (139)..(321): NCBI GI NO: 30695388 NR Description: DNA-binding protein -related
  misc_feature (17)..(109): NCBI GI NO: 11281387 NR Description: probable DNA-binding protein - Arabidopsis thaliana
  misc_feature (17)..(109): NCBI GI NO: 30695388 NR Description: DNA-binding protein -related
  misc_feature (139)..(343): NCBI GI NO: 2213534 NR Description: DNA-binding PD1-like protein [Pisum sativum]
  misc_feature (1)..(126): NCBI GI NO: 2213534 NR Description: DNA-binding PD1-like protein [Pisum sativum]
MDAKELISQSDLQSFYQQQQQQHRAFGGHHSPSSLAGMHSVIRPMPNMNMSPTAILNSISGGSLAGMQFQMDPPPPLLHKINATGAVTPAPAEPLKRKRGRPRKYGPDGTMRQQQQQQQAASSQQQQQQLVATQPRICSLSSGPDMLGSSGMEDPAQKKRRGRPPGTGKKHQPSTSQGNAFAGSAGTNFTPHIITASPSEDVAAKIVAFASQSSKAMCVLSAMGSVSRAVLRHPADGSPMARVHASPQPYKNPAVYEGFYEILSLTGSYNLAHGGGLSVTLCSPERNVIGGVLGGPLVAAGTVQVVLGSFHQGGSRSKSKKAGKQQQAAAFSPDSLTGGQEASPQLRAQPKSNAAALRDGRVAHLRHI

SEQ ID NO: 40505 - protein, 331 aa, Zea mays subsp. mays
  peptide (1)..(331): Ceres Seq. ID no. 12375637
  misc_feature (119)..(330): NCBI GI NO: 15225902 NR Description: putative AT-hook DNA-binding protein
  misc_feature (1)..(74): NCBI GI NO: 15225902 NR Description: putative AT-hook DNA-binding protein
  misc_feature (104)..(319): NCBI GI NO: 38346715 NR Description: OSJNBa0086O06.13
  misc_feature (1)..(87): NCBI GI NO: 38346715 NR Description: OSJNBa0086O06.13
  misc_feature (102)..(284): NCBI GI NO: 11281387 NR Description: probable DNA-binding protein - Arabidopsis thaliana
  misc_feature (102)..(284): NCBI GI NO: 30695388 NR Description: DNA-binding protein -related
  misc_feature (1)..(72): NCBI GI NO: 11281387 NR Description: probable DNA-binding protein - Arabidopsis thaliana
  misc_feature (1)..(72): NCBI GI NO: 30695388 NR Description: DNA-binding protein -related
  misc_feature (102)..(306): NCBI GI NO: 2213534 NR Description: DNA-binding PD1-like protein [Pisum sativum]
  misc_feature (1)..(89): NCBI GI NO: 2213534 NR Description: DNA-binding PD1-like protein [Pisum sativum]
MHSVIRPMPNMNMSPTAILNSISGGSLAGMQFQMDPPPPLLHKINATGAVTPAPAEPLKRKRGRPRKYGPDGTMRQQQQQQQAASSQQQQQQLVATQPRICSLSSGPDMLGSSGMEDPAQKKRRGRPPGTGKKHQPSTSQGNAFAGSAGTNFTPHIITASPSEDVAAKIVAFASQSSKAMCVLSAMGSVSRAVLRHPADGSPMARVHASPQPYKNPAVYEGFYEILSLTGSYNLAHGGGLSVTLCSPERNVIGGVLGGPLVAAGTVQVVLGSFHQGGSRSKSKKAGKQQQAAAFSPDSLTGGQEASPQLRAQPKSNAAALRDGRVAHLRHI

SEQ ID NO: 40506 - protein, 324 aa, Zea mays subsp. mays
  peptide (1)..(324): Ceres Seq. ID no. 12375638
  misc_feature (112)..(323): NCBI GI NO: 15225902 NR Description: putative AT-hook DNA-binding protein
  misc_feature (1)..(67): NCBI GI NO: 15225902 NR Description: putative AT-hook DNA-binding protein
  misc_feature (97)..(312): NCBI GI NO: 38346715 NR Description: OSJNBa0086O06.13
  misc_feature (1)..(80): NCBI GI NO: 38346715 NR Description: OSJNBa0086O06.13
  misc_feature (95)..(277): NCBI GI NO: 11281387 NR Description: probable DNA-binding protein - Arabidopsis thaliana
  misc_feature (95)..(277): NCBI GI NO: 30695388 NR Description: DNA-binding protein -related
  misc_feature (1)..(65): NCBI GI NO: 11281387 NR Description: probable DNA-binding protein - Arabidopsis thaliana
  misc_feature (1)..(65): NCBI GI NO: 30695388 NR Description: DNA-binding protein -related
  misc_feature (95)..(299): NCBI GI NO: 2213534 NR Description: DNA-binding PD1-like protein [Pisum sativum]
  misc_feature (1)..(82): NCBI GI NO: 2213534 NR Description: DNA-binding PD1-like protein [Pisum sativum]
MPNMNMSPTAILNSISGGSLAGMQFQMDPPPPLLHKINATGAVTPAPAEPLKRKRGRPRKYGPDGTMRQQQQQQQAASSQQQQQQLVATQPRICSLSSGPDMLGSSGMEDPAQKKRRGRPPGTGKKHQPSTSQGNAFAGSAGTNFTPHIITASPSEDVAAKIVAFASQSSKAMCVLSAMGSVSRAVLRHPADGSPMARVHASPQPYKNPAVYEGFYEILSLTGSYNLAHGGGLSVTLCSPERNVIGGVLGGPLVAAGTVQVVLGSFHQGGSRSKSKKAGKQQQAAAFSPDSLTGGQEASPQLRAQPKSNAAALRDGRVAHLRHI

SEQ ID NO: 40507 - DNA, 1683 bp, Zea mays subsp. mays
  misc_feature (1)..(1683): Ceres Seq. ID no. 12362573
aacagctcaccacggcgcagcaaccgcagcccacgcaggcgacgaaaagctgccgaaccaccagcagaggagagcgagggaccgcgcaaccgagccactccctagtccctccttctccctctctctctcttcgcctccggatctcgcatgcgcggtggccaccgccgcgcccgacggtggagggtgaggagttagcgaggggccctgaccctgagtgctggacggcggcgtgatggggggagcgcagctggtggggagatgggtggagtcgtacacggggatgtcgacggacaacatcaagggcctgctgctcgcgctctcctccagcctcttcatcggtgccagcttcatcgtgaagaagaaggggctcaagaaggccgccgcgtccggcgtccgagcaggcgttggtggctactcatacttgcttgagccactgtggtgggcaggaatggtaacaatgattgttggcgaaatcgctaactttgcagcttatgcatttgctcctgctatcttagtcactccacttggtgcacttagcataattatcagtgctgttcttgcccatataatgttgcgggagaaacttcatacatttggtatacttggctgtattctttgtgtggtcggttcgacaacaattgtgcttcatgcccctccagagcgtcaaattgagtctgtggcagaagtgtgggatcttgcgactgaaccagcattcctgtgctatgcagctgttgtgcttgcagcagcttttgtgctcatattccattttgtccctgagtatggtcagacacatatcatggtatatgttggcatatgttctcttgtgggatctttatcggtcatgagtgtcaaagctcttgggatagccttgaagctgacattttctgggatgaaccagctagtctatccacaaacatgggtgttctcatccgttgtaaccttatgcattgtaacacagatgaactatctgaacaaggccctcgacacattcaacactgcagttgtttcacccatatattacacaatgtttacatccttgaccatcttggctagtgtaataatgttcaaggattgggatcgtcaaaatccaacacaaattgtaaggagatgtgcggcttcgttacaatcctttctggaacttttcttcttcacaagacaaaggatatggtggatggtctcccaccaaatttaccgattcggcttcctaaacatgcggatgaggacggctacgctgctgaaggaattcctctcagatccgctgctgacggtattccgctcaggtcaccaagggctacagattcatttcgctcgtcatgatgccccgctgagatttgcatgcgcactcaaatcgtgtcacttgaaggctcatacccagcaggcgtcagtcctatatatacatgggaagggaaagataaccctccattcactcggttggatacacaacgtaggtttagctgtaggattcaaaaggtaacagctcggctgcccccttgtaaattctgaggcattggtacagaattttgaggattatatcagttatactcgtccgggtaagatcaccaggatgaccaagagcccaagtttttgggttgtatacttgtatgtatattgcggtgagccatataggtcactatcttgaattgctgtattttttcaacacaactctcagagtacaggatgttg

SEQ ID NO: 40508 - protein, 413 aa, Zea mays subsp. mays
  peptide (1)..(413): Ceres Seq. ID no. 12362574
  misc_feature (17)..(290): Pfam Name: DUF803 Pfam Description: Protein of unknown function
  misc_feature (8)..(290): NCBI GI NO: 20161440 NR Description: B1065E10.15
  misc_feature (4)..(290): NCBI GI NO: 18399280 NR Description: expressed protein; protein id: At1g34470
  misc_feature (4)..(290): NCBI GI NO: 18409942 NR Description: expressed protein; protein id: At1g71900
  misc_feature (4)..(290): NCBI GI NO: 25406128 NR Description: unknown protein F17M19.5
  misc_feature (17)..(289): NCBI GI NO: 18414079 NR Description: expressed protein; protein id: At4g13800
  misc_feature (17)..(289): NCBI GI NO: 21593618 NR Description: unknown [Arabidopsis thaliana]
  misc_feature (17)..(289): NCBI GI NO: 15229534 NR Description: unknown protein; protein id: At3g23870.1
  misc_feature (17)..(289): NCBI GI NO: 30681265 NR Description: expressed protein [Arabidopsis thaliana]
  misc_feature (17)..(289): NCBI GI NO: 21742149 NR Description: OSJNBa0069D17.4
  misc_feature (17)..(289): NCBI GI NO: 26449939 NR Description: unknown protein [Arabidopsis thaliana]
MGGAQLVGRWVESYTGMSTDNIKGLLLALSSSLFIGASFIVKKKGLKKAAASGVRAGVGGYSYLLEPLWWAGMVTMIVGEIANFAAYAFAPAILVTPLGALSIIISAVLAHIMLREKLHTFGILGCILCVVGSTTIVLHAPPERQIESVAEVWDLATEPAFLCYAAVVLAAAFVLIFHFVPEYGQTHIMVYVGICSLVGSLSVMSVKALGIALKLTFSGMNQLVYPQTWVFSSVVTLCIVTQMNYLNKALDTFNTAVVSPIYYTMFTSLTILASVIMFKDWDRQNPTQIVRRCAASLQSFLELFFFTRQRIWWMVSHQIYRFGFLNMRMRTATLLKEFLSDPLLTVFRSGHQGLQIHFARHDAPLRFACALKSCHLKAHTQQASVLYIHGKGKITLHSLGWIHNVGLAVGFKR

SEQ ID NO: 40509 - protein, 397 aa, Zea mays subsp. mays
  peptide (1)..(397): Ceres Seq. ID no. 12362575
  misc_feature (1)..(274): Pfam Name: DUF803 Pfam Description: Protein of unknown function
  misc_feature (1)..(274): NCBI GI NO: 20161440 NR Description: B1065E10.15
  misc_feature (1)..(274): NCBI GI NO: 18399280 NR Description: expressed protein; protein id: At1g34470
  misc_feature (1)..(274): NCBI GI NO: 18409942 NR Description: expressed protein; protein id: At1g71900
  misc_feature (1)..(274): NCBI GI NO: 25406128 NR Description: unknown protein F17M19.5
  misc_feature (1)..(273): NCBI GI NO: 18414079 NR Description: expressed protein; protein id: At4g13800
  misc_feature (1)..(273): NCBI GI NO: 21593618 NR Description: unknown [Arabidopsis thaliana]
  misc_feature (1)..(273): NCBI GI NO: 15229534 NR Description: unknown protein; protein id: At3g23870.1
  misc_feature (1)..(273): NCBI GI NO: 30681265 NR Description: expressed protein [Arabidopsis thaliana]
  misc_feature (1)..(273): NCBI GI NO: 21742149 NR Description: OSJNBa0069D17.4
  misc_feature (1)..(273): NCBI GI NO: 26449939 NR Description: unknown protein [Arabidopsis thaliana]
MSTDNIKGLLLALSSSLFIGASFIVKKKGLKKAAASGVRAGVGGYSYLLEPLWWAGMVTMIVGEIANFAAYAFAPAILVTPLGALSIIISAVLAHIMLREKLHTFGILGCILCVVGSTTIVLHAPPERQIESVAEVWDLATEPAFLCYAAVVLAAAFVLIFHFVPEYGQTHIMVYVGICSLVGSLSVMSVKALGIALKLTFSGMNQLVYPQTWVFSSVVTLCIVTQMNYLNKALDTFNTAVVSPIYYTMFTSLTILASVIMFKDWDRQNPTQIVRRCAASLQSFLELFFFTRQRIWWMVSHQIYRFGFLNMRMRTATLLKEFLSDPLLTVFRSGHQGLQIHFARHDAPLRFACALKSCHLKAHTQQASVLYIHGKGKITLHSLGWIHNVGLAVGFKR

SEQ ID NO: 40510 - protein, 341 aa, Zea mays subsp. mays
  peptide (1)..(341): Ceres Seq. ID no. 12362576
  misc_feature (1)..(218): Pfam Name: DUF803 Pfam Description: Protein of unknown function
  misc_feature (1)..(218): NCBI GI NO: 20161440 NR Description: B1065E10.15
  misc_feature (1)..(218): NCBI GI NO: 18399280 NR Description: expressed protein; protein id: At1g34470
  misc_feature (1)..(218): NCBI GI NO: 18409942 NR Description: expressed protein; protein id: At1g71900
  misc_feature (1)..(218): NCBI GI NO: 25406128 NR Description: unknown protein F17M19.5
  misc_feature (1)..(217): NCBI GI NO: 18414079 NR Description: expressed protein; protein id: At4g13800
  misc_feature (1)..(217): NCBI GI NO: 21593618 NR Description: unknown [Arabidopsis thaliana]
  misc_feature (1)..(217): NCBI GI NO: 15229534 NR Description: unknown protein; protein id: At3g23870.1
  misc_feature (1)..(217): NCBI GI NO: 30681265 NR Description: expressed protein [Arabidopsis thaliana]
  misc_feature (1)..(217): NCBI GI NO: 21742149 NR Description: OSJNBa0069D17.4
  misc_feature (1)..(217): NCBI GI NO: 26449939 NR Description: unknown protein [Arabidopsis thaliana]
MVTMIVGEIANFAAYAFAPAILVTPLGALSIIISAVLAHIMLREKLHTFGILGCILCVVGSTTIVLHAPPERQIESVAEVWDLATEPAFLCYAAVVLAAAFVLIFHFVPEYGQTHIMVYVGICSLVGSLSVMSVKALGIALKLTFSGMNQLVYPQTWVFSSVVTLCIVTQMNYLNKALDTFNTAVVSPIYYTMFTSLTILASVIMFKDWDRQNPTQIVRRCAASLQSFLELFFFTRQRIWWMVSHQIYRFGFLNMRMRTATLLKEFLSDPLLTVFRSGHQGLQIHFARHDAPLRFACALKSCHLKAHTQQASVLYIHGKGKITLHSLGWIHNVGLAVGFKR

SEQ ID NO: 40511 - DNA, 990 bp, Zea mays subsp. mays
  misc_feature (1)..(990): Ceres Seq. ID no. 12375677
cttcgatcggtccatggctgtcgtcacgagggacgcggcgtgcctgcccctcgtcctcttgctcctagtcttctccgcggccccgtctccggctgacggctgcgaccgctgcgtgcgccggtccaaggccacctactaccaggcctcctcgctcgccctcaacgccgggtcgtgcgggtacggctccttggccgcgtccctcaacggcggcctgctcgccgcagccagccccgagctgtacaggggcggcgtcggctgcggcgcctgcttccaggtgcggtgcagggacagcgagctgtgcagcgccgccggcgccaaggtggtggtgacggaccaggcgcggacgtcgaaccgcacggcgctggtgctgagcgccgcggcgtacgcggccatggccagtgccggcaaggccgcgcgcctcagggaccggcgcgtcgtcgacgtcgagtacaagagggtaccctgcgagtacgcgaaggaccgcaacctgttgatacgcgtggaggagaagagccggccgccaagcaacctgtccatcaggttcctgtaccagggcggccagaccgacatcgtcgccgtcgacgtcgccaccgtggggtcgtccaactggcggttcatggcgcgggaccacgggccggcgtggagcacggcgcaggcgccgccggggccgctgcagttccggctggtggtgaccggtggctacgacggcaagtgggtgtgggcggagtcggaggtgctgccgcgccggtgggaggccggccgcgtctacgacgccggggtgcaggtctccgacgtcgcgcaggaagggtgctacccctgcgacacgcgcgagtggcagtgacgtgacgcgcgcacgggctggattgtagtagattgtacagttttttttttttggtcgggaatgggacgaaagatatgaaatgatgatgagcggagccggagagccgaatcaaaccaaatcaaacaaacgtgccgttgcaagttggttct

SEQ ID NO: 40512 - protein, 279 aa, Zea mays subsp. mays
  peptide (1)..(279): Ceres Seq. ID no. 12375678
  misc_feature (163)..(247): Pfam Name: Pfam Description:  Pollen allergen
  misc_feature (13)..(279): NCBI GI NO: 37536544 NR Description: putative pollen allergen
  misc_feature (18)..(279): NCBI GI NO: 21654743 NR Description: expansin-like protein 1 [Oryza sativa]
  misc_feature (18)..(279): NCBI GI NO: 20502989 NR Description: Putative pollen allergen
  misc_feature (69)..(279): NCBI GI NO: 25136297 NR Description: expansin-like protein
  misc_feature (19)..(279): NCBI GI NO: 34901594 NR Description: P0571D04.11
  misc_feature (15)..(278): NCBI GI NO: 21555265 NR Description: Expansin-like 1 precursor
  misc_feature (17)..(278): NCBI GI NO: 15231303 NR Description: putative protein; protein id: At3g45970
  misc_feature (15)..(273): NCBI GI NO: 20138389 NR Description: Expansin-like 3 precursor
  misc_feature (18)..(279): NCBI GI NO: 33111959 NR Description: expansin-like protein [Quercus robur]
  misc_feature (17)..(278): NCBI GI NO: 15233841 NR Description: putative pollen allergen; protein id: At4g38400
FDRSMAVVTRDAACLPLVLLLLVFSAAPSPADGCDRCVRRSKATYYQASSLALNAGSCGYGSLAASLNGGLLAAASPELYRGGVGCGACFQVRCRDSELCSAAGAKVVVTDQARTSNRTALVLSAAAYAAMASAGKAARLRDRRVVDVEYKRVPCEYAKDRNLLIRVEEKSRPPSNLSIRFLYQGGQTDIVAVDVATVGSSNWRFMARDHGPAWSTAQAPPGPLQFRLVVTGGYDGKWVWAESEVLPRRWEAGRVYDAGVQVSDVAQEGCYPCDTREWQ

SEQ ID NO: 40513 - protein, 275 aa, Zea mays subsp. mays
  peptide (1)..(275): Ceres Seq. ID no. 12375679
  misc_feature (159)..(243): Pfam Name: Pfam Description:  Pollen allergen
  misc_feature (9)..(275): NCBI GI NO: 37536544 NR Description: putative pollen allergen
  misc_feature (14)..(275): NCBI GI NO: 21654743 NR Description: expansin-like protein 1 [Oryza sativa]
  misc_feature (14)..(275): NCBI GI NO: 20502989 NR Description: Putative pollen allergen
  misc_feature (65)..(275): NCBI GI NO: 25136297 NR Description: expansin-like protein
  misc_feature (15)..(275): NCBI GI NO: 34901594 NR Description: P0571D04.11
  misc_feature (11)..(274): NCBI GI NO: 21555265 NR Description: Expansin-like 1 precursor
  misc_feature (13)..(274): NCBI GI NO: 15231303 NR Description: putative protein; protein id: At3g45970
  misc_feature (11)..(269): NCBI GI NO: 20138389 NR Description: Expansin-like 3 precursor
  misc_feature (14)..(275): NCBI GI NO: 33111959 NR Description: expansin-like protein [Quercus robur]
  misc_feature (13)..(274): NCBI GI NO: 15233841 NR Description: putative pollen allergen; protein id: At4g38400
MAVVTRDAACLPLVLLLLVFSAAPSPADGCDRCVRRSKATYYQASSLALNAGSCGYGSLAASLNGGLLAAASPELYRGGVGCGACFQVRCRDSELCSAAGAKVVVTDQARTSNRTALVLSAAAYAAMASAGKAARLRDRRVVDVEYKRVPCEYAKDRNLLIRVEEKSRPPSNLSIRFLYQGGQTDIVAVDVATVGSSNWRFMARDHGPAWSTAQAPPGPLQFRLVVTGGYDGKWVWAESEVLPRRWEAGRVYDAGVQVSDVAQEGCYPCDTREWQ

SEQ ID NO: 40514 - protein, 149 aa, Zea mays subsp. mays
  peptide (1)..(149): Ceres Seq. ID no. 12375680
  misc_feature (33)..(117): Pfam Name: Pfam Description:  Pollen allergen
  misc_feature (1)..(149): NCBI GI NO: 37536544 NR Description: putative pollen allergen
  misc_feature (1)..(149): NCBI GI NO: 21654743 NR Description: expansin-like protein 1 [Oryza sativa]
  misc_feature (1)..(149): NCBI GI NO: 20502989 NR Description: Putative pollen allergen
  misc_feature (1)..(149): NCBI GI NO: 25136297 NR Description: expansin-like protein
  misc_feature (1)..(149): NCBI GI NO: 34901594 NR Description: P0571D04.11
  misc_feature (1)..(148): NCBI GI NO: 21555265 NR Description: Expansin-like 1 precursor
  misc_feature (1)..(148): NCBI GI NO: 15231303 NR Description: putative protein; protein id: At3g45970
  misc_feature (1)..(143): NCBI GI NO: 20138389 NR Description: Expansin-like 3 precursor
  misc_feature (1)..(149): NCBI GI NO: 33111959 NR Description: expansin-like protein [Quercus robur]
  misc_feature (1)..(148): NCBI GI NO: 15233841 NR Description: putative pollen allergen; protein id: At4g38400
MASAGKAARLRDRRVVDVEYKRVPCEYAKDRNLLIRVEEKSRPPSNLSIRFLYQGGQTDIVAVDVATVGSSNWRFMARDHGPAWSTAQAPPGPLQFRLVVTGGYDGKWVWAESEVLPRRWEAGRVYDAGVQVSDVAQEGCYPCDTREWQ

SEQ ID NO: 40515 - DNA, 528 bp, Zea mays subsp. mays; identical to SEQ ID NO: 33386
  misc_feature (1)..(528): Ceres Seq. ID no. 13492510

SEQ ID NO: 40516 - protein, 175 aa, Zea mays subsp. mays; identical to SEQ ID NO: 33387
  peptide (1)..(175): Ceres Seq. ID no. 13492511
  misc_feature (83)..(171): Pfam Name: Pfam Description:  Elongation factor Tu GTP binding domain
  misc_feature (20)..(171): NCBI GI NO: 11181616 NR Description: translational elongation factor EF-TuM [Zea mays]
  misc_feature (20)..(171): NCBI GI NO: 18001149 NR Description: translational elongation factor Tu [Oryza sativa]
  misc_feature (20)..(171): NCBI GI NO: 15236220 NR Description: elongation factor Tu (EF-Tu), putative
  misc_feature (67)..(171): NCBI GI NO: 1149571 NR Description: mitochondrial elongation factor Tu
  misc_feature (75)..(171): NCBI GI NO: 18311389 NR Description: elongation factor Tu [Clostridium perfringens]
  misc_feature (35)..(171): NCBI GI NO: 22966137 NR Description: hypothetical protein [Rhodospirillum rubrum]
  misc_feature (79)..(171): NCBI GI NO: 20808662 NR Description: GTPases - translation elongation factors
  misc_feature (79)..(171): NCBI GI NO: 20808676 NR Description: GTPases - translation elongation factors
  misc_feature (72)..(171): NCBI GI NO: 22965193 NR Description: hypothetical protein [Rhodopseudomonas palustris]
  misc_feature (77)..(171): NCBI GI NO: 39997951 NR Description: translation elongation factor Tu

SEQ ID NO: 40517 - protein, 156 aa, Zea mays subsp. mays; identical to SEQ ID NO: 33388
  peptide (1)..(156): Ceres Seq. ID no. 13492512
  misc_feature (64)..(152): Pfam Name: Pfam Description:  Elongation factor Tu GTP binding domain
  misc_feature (1)..(152): NCBI GI NO: 11181616 NR Description: translational elongation factor EF-TuM [Zea mays]
  misc_feature (1)..(152): NCBI GI NO: 18001149 NR Description: translational elongation factor Tu [Oryza sativa]
  misc_feature (1)..(152): NCBI GI NO: 15236220 NR Description: elongation factor Tu (EF-Tu), putative
  misc_feature (48)..(152): NCBI GI NO: 1149571 NR Description: mitochondrial elongation factor Tu
  misc_feature (56)..(152): NCBI GI NO: 18311389 NR Description: elongation factor Tu [Clostridium perfringens]
  misc_feature (16)..(152): NCBI GI NO: 22966137 NR Description: hypothetical protein [Rhodospirillum rubrum]
  misc_feature (60)..(152): NCBI GI NO: 20808662 NR Description: GTPases - translation elongation factors
  misc_feature (60)..(152): NCBI GI NO: 20808676 NR Description: GTPases - translation elongation factors
  misc_feature (53)..(152): NCBI GI NO: 22965193 NR Description: hypothetical protein [Rhodopseudomonas palustris]
  misc_feature (58)..(152): NCBI GI NO: 39997951 NR Description: translation elongation factor Tu

SEQ ID NO: 40518 - protein, 143 aa, Zea mays subsp. mays; identical to SEQ ID NO: 33389
  peptide (1)..(143): Ceres Seq. ID no. 13492513

SEQ ID NO: 40519 - DNA, 1643 bp, Zea mays subsp. mays
  misc_feature (1)..(1643): Ceres Seq. ID no. 12368456
gcacgagaccattacctagaacatcctaatcgaaaagcttgcttcaggcacttgagagttgagactcactcagtcactagcaagtgcctcgtcacatggcagcggcagcgctagcggcgtggtggtggtctctgtcgctcctggctaccatcgtcggcggaggcagcgcctcaccgtcaccggtgcccggctgctacacgcgcatcttcagcttcggcgactcgctgaccgacacgggcaactacgtccacctgacggcgagcagccacagcccctacggcgcgccgccgtacgggaggacgttcttcggcaaacctaccggccgcgccagcgacggacgcctcgtcatcgacttcatcgcggaagagttcgggctggcgaaggtgacggcgatccaggcgggcacggcgccaggggacttccagaacggcgccaacttcgccatcatctcggccaccgccaacaacggctccttcttcgcgggcaacggcatggacatcaggcccttctcgctggacacgcagatgctgtggttcaggacccacctccgcgagctcgtgcaggcggcggcggcggcacagcagaacggcagcgtgggcgcgctgctgagcggcgcgctggtggcgctgggcgagatcggagggaacgactacaacttcgccttctcgcggggcgtgccgcgggacgcggtgcgcaggttcgtgccggccgtggtggacaagctggcgggcgccatggaggagctcatcgccatgggggcgcgcgccttcgtggtgcccgggaacctacccttcggctgcacgccgctgtacctgcagcggttccgcgccaacggcgggtggtgggactacgacccggccacgggctgcctcgcctggttcaaccgcttcgcccagtaccacaaccgggtgctcgcggcgcgcctcgacaggctccggcgcctgcacccggacgtgaccatcgtctacgccgactggtacgaggccacgatgagcatcttccaggaccccgggaagctagggttcacaaacgctctgcggacttgctgcgggaaccagaccgtgccgtgtggcaggcccgggtgctccgtctgcaaggacccgtccacgtacgggtcctgggacgggacgcacccgacggaggcggtgtacaaggtgatcgccgacggggtgctgcacgggccgcacgcgtcccctgttcctctcgccgacacctgtcctccgacatgacccttagaagatttataattggcagctttaagagcggtggtaacatctgaatcgtacttgcgtgattttaaggatggcacgataatagctttgtttaagaatacaggtgaggttggcatatttcgatagcataagcatacacacgaagctctgaagtgataattgagtttgtataaacatcatcattgatttagggggtgtttggttagagggactaaagattagtctctagtttttagtctcttttagtctcttttttaccaaacattaggactaaaatatgaactaaaatgatttagtctgtagtccttcacatatgtgctaaaagggactaaaccatattaattccacatttaccctttatttagttcaattgtactaatagtaggagaatgttaaaggctattttagtct

SEQ ID NO: 40520 - protein, 377 aa, Zea mays subsp. mays
  peptide (1)..(377): Ceres Seq. ID no. 12368457
  misc_feature (37)..(317): Pfam Name: Pfam Description:  GDSL-like Lipase/Acylhydrolase
  misc_feature (12)..(317): NCBI GI NO: 34911834 NR Description: lipase-like protein
  misc_feature (170)..(375): NCBI GI NO: 34911804 NR Description: lipase-like protein
  misc_feature (13)..(148): NCBI GI NO: 34911804 NR Description: lipase-like protein
  misc_feature (15)..(375): NCBI GI NO: 34911800 NR Description: lipase-like protein
  misc_feature (32)..(374): NCBI GI NO: 34911826 NR Description: lipase-like protein
  misc_feature (14)..(374): NCBI GI NO: 10764858 NR Description: F1K23.17 [Arabidopsis thaliana]
  misc_feature (14)..(374): NCBI GI NO: 15218731 NR Description: lipase, putative; protein id: At1g28600
  misc_feature (1)..(374): NCBI GI NO: 34904730 NR Description: lipase-like protein~predicted by FGENESH etc.
  misc_feature (14)..(374): NCBI GI NO: 21593234 NR Description: lipase, putative [Arabidopsis thaliana]
  misc_feature (34)..(374): NCBI GI NO: 12322540 NR Description: unknown protein [Arabidopsis thaliana]
MAAAALAAWWWSLSLLATIVGGGSASPSPVPGCYTRIFSFGDSLTDTGNYVHLTASSHSPYGAPPYGRTFFGKPTGRASDGRLVIDFIAEEFGLAKVTAIQAGTAPGDFQNGANFAIISATANNGSFFAGNGMDIRPFSLDTQMLWFRTHLRELVQAAAAAQQNGSVGALLSGALVALGEIGGNDYNFAFSRGVPRDAVRRFVPAVVDKLAGAMEELIAMGARAFVVPGNLPFGCTPLYLQRFRANGGWWDYDPATGCLAWFNRFAQYHNRVLAARLDRLRRLHPDVTIVYADWYEATMSIFQDPGKLGFTNALRTCCGNQTVPCGRPGCSVCKDPSTYGSWDGTHPTEAVYKVIADGVLHGPHASPVPLADTCPPT

SEQ ID NO: 40521 - protein, 245 aa, Zea mays subsp. mays
  peptide (1)..(245): Ceres Seq. ID no. 12368458
  misc_feature (1)..(185): Pfam Name: Pfam Description:  GDSL-like Lipase/Acylhydrolase
  misc_feature (1)..(185): NCBI GI NO: 34911834 NR Description: lipase-like protein
  misc_feature (38)..(243): NCBI GI NO: 34911804 NR Description: lipase-like protein
  misc_feature (1)..(16): NCBI GI NO: 34911804 NR Description: lipase-like protein
  misc_feature (1)..(243): NCBI GI NO: 34911800 NR Description: lipase-like protein
  misc_feature (1)..(242): NCBI GI NO: 34911826 NR Description: lipase-like protein
  misc_feature (1)..(242): NCBI GI NO: 10764858 NR Description: F1K23.17 [Arabidopsis thaliana]
  misc_feature (1)..(242): NCBI GI NO: 15218731 NR Description: lipase, putative; protein id: At1g28600
  misc_feature (1)..(242): NCBI GI NO: 34904730 NR Description: lipase-like protein~predicted by FGENESH etc.
  misc_feature (1)..(242): NCBI GI NO: 21593234 NR Description: lipase, putative [Arabidopsis thaliana]
  misc_feature (1)..(242): NCBI GI NO: 12322540 NR Description: unknown protein [Arabidopsis thaliana]
MDIRPFSLDTQMLWFRTHLRELVQAAAAAQQNGSVGALLSGALVALGEIGGNDYNFAFSRGVPRDAVRRFVPAVVDKLAGAMEELIAMGARAFVVPGNLPFGCTPLYLQRFRANGGWWDYDPATGCLAWFNRFAQYHNRVLAARLDRLRRLHPDVTIVYADWYEATMSIFQDPGKLGFTNALRTCCGNQTVPCGRPGCSVCKDPSTYGSWDGTHPTEAVYKVIADGVLHGPHASPVPLADTCPPT

SEQ ID NO: 40522 - protein, 234 aa, Zea mays subsp. mays
  peptide (1)..(234): Ceres Seq. ID no. 12368459
  misc_feature (1)..(174): Pfam Name: Pfam Description:  GDSL-like Lipase/Acylhydrolase
  misc_feature (1)..(174): NCBI GI NO: 34911834 NR Description: lipase-like protein
  misc_feature (27)..(232): NCBI GI NO: 34911804 NR Description: lipase-like protein
  misc_feature (1)..(232): NCBI GI NO: 34911800 NR Description: lipase-like protein
  misc_feature (1)..(231): NCBI GI NO: 34911826 NR Description: lipase-like protein
  misc_feature (1)..(231): NCBI GI NO: 10764858 NR Description: F1K23.17 [Arabidopsis thaliana]
  misc_feature (1)..(231): NCBI GI NO: 15218731 NR Description: lipase, putative; protein id: At1g28600
  misc_feature (1)..(231): NCBI GI NO: 34904730 NR Description: lipase-like protein~predicted by FGENESH etc.
  misc_feature (1)..(231): NCBI GI NO: 21593234 NR Description: lipase, putative [Arabidopsis thaliana]
  misc_feature (1)..(231): NCBI GI NO: 12322540 NR Description: unknown protein [Arabidopsis thaliana]
  misc_feature (1)..(231): NCBI GI NO: 12597843 NR Description: lipase, putative [Arabidopsis thaliana]
MLWFRTHLRELVQAAAAAQQNGSVGALLSGALVALGEIGGNDYNFAFSRGVPRDAVRRFVPAVVDKLAGAMEELIAMGARAFVVPGNLPFGCTPLYLQRFRANGGWWDYDPATGCLAWFNRFAQYHNRVLAARLDRLRRLHPDVTIVYADWYEATMSIFQDPGKLGFTNALRTCCGNQTVPCGRPGCSVCKDPSTYGSWDGTHPTEAVYKVIADGVLHGPHASPVPLADTCPPT

SEQ ID NO: 40523 - DNA, 1199 bp, Zea mays subsp. mays
  misc_feature (1)..(1199): Ceres Seq. ID no. 12368694
gcacgagaccattacctagaacatcctaaaaaaaaaaaaaaagatggcccctaaattagtctttttcttcctgttgtgctcctcgccttggcgctgcaggcgatcctccggccaccgccgccaaagctctgtggctccccaggtggccctcctctgacatctcccaggatcaagctcagggacggaaggtaccttgcgtacaaagaggatggagtacagagagacaaggccaggtacaagatcatcacagtgcacgcatttgatagcaccaaggacttcccctcgcctgtttctaaggagctcgtggaaggactgggaatttacctccttgcttatgacagagctggatatggggaaagtgaccccaatcccaaccggcatgtcaagagcgaggcgctagatatcgaggagcttgccgaccagctgggccttggccacaagttctatgtgctaggggcctcaatgggaggatactcggtttggggatgcctccagtatatacctcacaggcttgcaggagctgcgctggttgtgccaattatcaactactggtggccttcgttcccagctgaattatccaagcaggccttcaacagactgattgtgccagagcagagaactctttggattgcacacaacataccttccttgctttacctgtggatgacccagaggtggttcccttcttctgcagcagccatgcaccaccctgaaatatttagcaagcatgacatggaggttcttcagaagatgatggcaatgccaagaaccattgagaacaaatcaaggcagcaaggcatttatgaatcgatccaccgtgatttacttgtcgcttttggaacttgggagttcgatccaatgaatgtcaccaatccatttcctcaaaatgagggctctgtgcacatctggcaaggacgcgaagataggttggtgcttgttgagctgcagaggtacattgccaagaagcttccgtggatcaagtatcatgaagtcccagaaggtggacacatgttcgtgatggtagatggatggacagaccgaattctcaaggcactcttgttaggagaagagcccctagatgtgtgacagtagttccattttcaaaatgtcaaaaactgcagctgccagctgttattttacttaattttattcccaatttgtacacttgtattcctacaacaccaagactagtctaattc

SEQ ID NO: 40524 - protein, 207 aa, Zea mays subsp. mays
  peptide (1)..(207): Ceres Seq. ID no. 12368695
  misc_feature (1)..(203): Pfam Name: Pfam Description:  alpha/beta hydrolase fold
  misc_feature (1)..(207): NCBI GI NO: 34908462 NR Description: P0683F02.22
  misc_feature (1)..(202): NCBI GI NO: 18404095 NR Description: expressed protein; protein id: At2g36290
  misc_feature (1)..(202): NCBI GI NO: 28416665 NR Description: At2g36290 [Arabidopsis thaliana]
  misc_feature (1)..(203): NCBI GI NO: 15228377 NR Description: putative protein; protein id: At3g48410
  misc_feature (1)..(200): NCBI GI NO: 15242253 NR Description: putative protein; protein id: At5g22460
  misc_feature (1)..(199): NCBI GI NO: 21592662 NR Description: unknown [Arabidopsis thaliana]
  misc_feature (1)..(199): NCBI GI NO: 18410582 NR Description: expressed protein; protein id: At1g74300
  misc_feature (1)..(199): NCBI GI NO: 21537089 NR Description: unknown [Arabidopsis thaliana]
  misc_feature (1)..(202): NCBI GI NO: 18410575 NR Description: expressed protein; protein id: At1g74280
  misc_feature (1)..(199): NCBI GI NO: 11357595 NR Description: hypothetical protein F24B22
MGGYSVWGCLQYIPHRLAGAALVVPIINYWWPSFPAELSKQAFNRLIVPEQRTLWIAHNIPSLLYLWMTQRWFPSSAAAMHHPEIFSKHDMEVLQKMMAMPRTIENKSRQQGIYESIHRDLLVAFGTWEFDPMNVTNPFPQNEGSVHIWQGREDRLVLVELQRYIAKKLPWIKYHEVPEGGHMFVMVDGWTDRILKALLLGEEPLDV

SEQ ID NO: 40525 - protein, 140 aa, Zea mays subsp. mays
  peptide (1)..(140): Ceres Seq. ID no. 12368696
  misc_feature (1)..(136): Pfam Name: Pfam Description:  alpha/beta hydrolase fold
  misc_feature (1)..(140): NCBI GI NO: 34908462 NR Description: P0683F02.22
  misc_feature (1)..(135): NCBI GI NO: 18404095 NR Description: expressed protein; protein id: At2g36290
  misc_feature (1)..(135): NCBI GI NO: 28416665 NR Description: At2g36290 [Arabidopsis thaliana]
  misc_feature (1)..(136): NCBI GI NO: 15228377 NR Description: putative protein; protein id: At3g48410
  misc_feature (1)..(133): NCBI GI NO: 15242253 NR Description: putative protein; protein id: At5g22460
  misc_feature (1)..(132): NCBI GI NO: 21592662 NR Description: unknown [Arabidopsis thaliana]
  misc_feature (1)..(132): NCBI GI NO: 18410582 NR Description: expressed protein; protein id: At1g74300
  misc_feature (1)..(132): NCBI GI NO: 21537089 NR Description: unknown [Arabidopsis thaliana]
  misc_feature (1)..(135): NCBI GI NO: 18410575 NR Description: expressed protein; protein id: At1g74280
  misc_feature (1)..(132): NCBI GI NO: 11357595 NR Description: hypothetical protein F24B22
MTQRWFPSSAAAMHHPEIFSKHDMEVLQKMMAMPRTIENKSRQQGIYESIHRDLLVAFGTWEFDPMNVTNPFPQNEGSVHIWQGREDRLVLVELQRYIAKKLPWIKYHEVPEGGHMFVMVDGWTDRILKALLLGEEPLDV

SEQ ID NO: 40526 - protein, 128 aa, Zea mays subsp. mays
  peptide (1)..(128): Ceres Seq. ID no. 12368697
  misc_feature (1)..(124): Pfam Name: Pfam Description:  alpha/beta hydrolase fold
  misc_feature (1)..(128): NCBI GI NO: 34908462 NR Description: P0683F02.22
  misc_feature (1)..(123): NCBI GI NO: 18404095 NR Description: expressed protein; protein id: At2g36290
  misc_feature (1)..(123): NCBI GI NO: 28416665 NR Description: At2g36290 [Arabidopsis thaliana]
  misc_feature (1)..(124): NCBI GI NO: 15228377 NR Description: putative protein; protein id: At3g48410
  misc_feature (1)..(121): NCBI GI NO: 15242253 NR Description: putative protein; protein id: At5g22460
  misc_feature (1)..(120): NCBI GI NO: 21592662 NR Description: unknown [Arabidopsis thaliana]
  misc_feature (1)..(120): NCBI GI NO: 18410582 NR Description: expressed protein; protein id: At1g74300
  misc_feature (1)..(120): NCBI GI NO: 21537089 NR Description: unknown [Arabidopsis thaliana]
  misc_feature (1)..(123): NCBI GI NO: 18410575 NR Description: expressed protein; protein id: At1g74280
  misc_feature (1)..(120): NCBI GI NO: 11357595 NR Description: hypothetical protein F24B22
MHHPEIFSKHDMEVLQKMMAMPRTIENKSRQQGIYESIHRDLLVAFGTWEFDPMNVTNPFPQNEGSVHIWQGREDRLVLVELQRYIAKKLPWIKYHEVPEGGHMFVMVDGWTDRILKALLLGEEPLDV

SEQ ID NO: 40527 - DNA, 1346 bp, Zea mays subsp. mays
  misc_feature (1)..(1346): Ceres Seq. ID no. 13493167
gcacgagaccattacctagaacatcctaatcgaaaaatcccagcagcaggtagcagcagcgcatgactttgtatctgcaactcgtttcgactagcctgcacgccgggagccctcgtctcgcccttctccacctccgaaggtagggtacctgatacttccctgccccgcgcatcgcatccgcggttttagtttgctggcctcggttccgatcgattcctatcctccctccgggcgggcgtccaccgacttcatcatccactcgccggccgaaccgatttgtttcgtttgccgttcgatccgcagatcctgcgagttcaacccgcgagtgagcatgtcgtcctactccccgccgccgccgccgccgcgggaccagtccatggacaccgaggcacccaacgcgcccatcaccagggagcggaggctcaaccccgatctgcaggagcagctccccaagccatatctcgcgagagctctcgaggcggtggacccgagccacccgcaggggaccaaggggcgcgacccccgcggcatgagcgtgcttcagcagcacgccgccttcttcgaccgcaatggcgacggcgtcatctacccctgggagacgtttcaaggactgcgagcgataggatgtggactcactgtatcattcgcgttctccatactgatcaacctcttcctcagttatcccactcagccgggatggttaccttctcctttgctgtccatccgtatagacaacatccacaagggtaagcacgggagtgattctgaaacctacgacactgaagggaggtttgatccatcaaagttcgatgctatattcagtaagtacggtcgaacccatcctaatgctataacaagagacgagttaagctcaatgcttcaaggaaaccgcaatacgtacgatttccttggctggttggccgctgccggtgaatggctcttactctacagcttggcgaaagacaaggatggcctcttgcagcgcgaaactgtccgtggtctatttgatgggagcctatttgagcgactggaagacgacaacaacaagaagaaatcgtcatgaatgctgagcagccttgtacagctcagggaagtgctgtcagtacaaaactaccagatataccattggtcgtgttcaaataacaaatgcttcggctttgttcatccgtcattaactatgagtgctgggatttgtttgtatgtgtgtcgtgctaccagtttcttctcctgtcgtctcacacaggtactgaattacgcatgtgttttctagtgttcgtgcggaagctgtattataagctgaaaaatgtgcgtttgaaatttatgggcaaaactgtcttcttggtctt

SEQ ID NO: 40528 - protein, 243 aa, Zea mays subsp. mays
  peptide (1)..(243): Ceres Seq. ID no. 13493168
  misc_feature (62)..(235): Pfam Name: Pfam Description:  Caleosin related protein
  misc_feature (1)..(243): NCBI GI NO: 34902470 NR Description: Putative abscisic acid-induced protein - rice
  misc_feature (14)..(241): NCBI GI NO: 15226103 NR Description: RD20 protein [Arabidopsis thaliana]
  misc_feature (11)..(233): NCBI GI NO: 7459612 NR Description: abscisic acid-induced protein - rice
  misc_feature (14)..(231): NCBI GI NO: 7459611 NR Description: Ca+2-binding EF hand protein homolog PM13
  misc_feature (12)..(231): NCBI GI NO: 6478218 NR Description: caleosin [Sesamum indicum]
  misc_feature (15)..(234): NCBI GI NO: 34538473 NR Description: caleosin 1 [Hordeum vulgare]
  misc_feature (12)..(231): NCBI GI NO: 15236846 NR Description: embryo-specific protein 1 (ATS1)
  misc_feature (12)..(231): NCBI GI NO: 15240486 NR Description: embryo-specific protein 1 (ATS1)
  misc_feature (12)..(231): NCBI GI NO: 17380858 NR Description: putative embryo-specific protein ATS1
  misc_feature (13)..(239): NCBI GI NO: 34538477 NR Description: caleosin 2 [Hordeum vulgare]
MSSYSPPPPPPRDQSMDTEAPNAPITRERRLNPDLQEQLPKPYLARALEAVDPSHPQGTKGRDPRGMSVLQQHAAFFDRNGDGVIYPWETFQGLRAIGCGLTVSFAFSILINLFLSYPTQPGWLPSPLLSIRIDNIHKGKHGSDSETYDTEGRFDPSKFDAIFSKYGRTHPNAITRDELSSMLQGNRNTYDFLGWLAAAGEWLLLYSLAKDKDGLLQRETVRGLFDGSLFERLEDDNNKKKSS

SEQ ID NO: 40529 - protein, 228 aa, Zea mays subsp. mays
  peptide (1)..(228): Ceres Seq. ID no. 13493169
  misc_feature (47)..(220): Pfam Name: Pfam Description:  Caleosin related protein
  misc_feature (1)..(228): NCBI GI NO: 34902470 NR Description: Putative abscisic acid-induced protein - rice
  misc_feature (1)..(226): NCBI GI NO: 15226103 NR Description: RD20 protein [Arabidopsis thaliana]
  misc_feature (1)..(218): NCBI GI NO: 7459612 NR Description: abscisic acid-induced protein - rice
  misc_feature (1)..(216): NCBI GI NO: 7459611 NR Description: Ca+2-binding EF hand protein homolog PM13
  misc_feature (1)..(216): NCBI GI NO: 6478218 NR Description: caleosin [Sesamum indicum]
  misc_feature (1)..(219): NCBI GI NO: 34538473 NR Description: caleosin 1 [Hordeum vulgare]
  misc_feature (1)..(216): NCBI GI NO: 15236846 NR Description: embryo-specific protein 1 (ATS1)
  misc_feature (1)..(216): NCBI GI NO: 15240486 NR Description: embryo-specific protein 1 (ATS1)
  misc_feature (1)..(216): NCBI GI NO: 17380858 NR Description: putative embryo-specific protein ATS1
  misc_feature (1)..(224): NCBI GI NO: 34538477 NR Description: caleosin 2 [Hordeum vulgare]
MDTEAPNAPITRERRLNPDLQEQLPKPYLARALEAVDPSHPQGTKGRDPRGMSVLQQHAAFFDRNGDGVIYPWETFQGLRAIGCGLTVSFAFSILINLFLSYPTQPGWLPSPLLSIRIDNIHKGKHGSDSETYDTEGRFDPSKFDAIFSKYGRTHPNAITRDELSSMLQGNRNTYDFLGWLAAAGEWLLLYSLAKDKDGLLQRETVRGLFDGSLFERLEDDNNKKKSS

SEQ ID NO: 40530 - protein, 177 aa, Zea mays subsp. mays
  peptide (1)..(177): Ceres Seq. ID no. 13493170
  misc_feature (1)..(169): Pfam Name: Pfam Description:  Caleosin related protein
  misc_feature (1)..(177): NCBI GI NO: 34902470 NR Description: Putative abscisic acid-induced protein - rice
  misc_feature (1)..(175): NCBI GI NO: 15226103 NR Description: RD20 protein [Arabidopsis thaliana]
  misc_feature (1)..(167): NCBI GI NO: 7459612 NR Description: abscisic acid-induced protein - rice
  misc_feature (1)..(165): NCBI GI NO: 7459611 NR Description: Ca+2-binding EF hand protein homolog PM13
  misc_feature (1)..(165): NCBI GI NO: 6478218 NR Description: caleosin [Sesamum indicum]
  misc_feature (1)..(168): NCBI GI NO: 34538473 NR Description: caleosin 1 [Hordeum vulgare]
  misc_feature (1)..(165): NCBI GI NO: 15236846 NR Description: embryo-specific protein 1 (ATS1)
  misc_feature (1)..(165): NCBI GI NO: 15240486 NR Description: embryo-specific protein 1 (ATS1)
  misc_feature (1)..(165): NCBI GI NO: 17380858 NR Description: putative embryo-specific protein ATS1
  misc_feature (1)..(173): NCBI GI NO: 34538477 NR Description: caleosin 2 [Hordeum vulgare]
MSVLQQHAAFFDRNGDGVIYPWETFQGLRAIGCGLTVSFAFSILINLFLSYPTQPGWLPSPLLSIRIDNIHKGKHGSDSETYDTEGRFDPSKFDAIFSKYGRTHPNAITRDELSSMLQGNRNTYDFLGWLAAAGEWLLLYSLAKDKDGLLQRETVRGLFDGSLFERLEDDNNKKKSS

SEQ ID NO: 40531 - DNA, 465 bp, Zea mays subsp. mays
  misc_feature (1)..(465): Ceres Seq. ID no. 1846808
aattaattaattcttcaattgatcccatttgctctctggatgtgatttctcccttcaaagattcagattcagatatcggcccgcttgtcgaaaagattgatgatccaagcatggccaacgataaggatttactgcaggttgtccggttactggatgatgcttgcaaggaggccggattcttctatgtgaaaggccatggtattgatgagtcactgatgagggaagtcaggaatgtaacccgtgaattctttcagcttccttatgaggaaaaattaaaaattaagatgacacctcaaagtggatatagagggtatcaaaggataggggaaaatattaccaagggtaagcctgatatgcatgaagcaatcgattgttatactcctattagacctggcaaatatggagatctcgctaaaccaatggaaggatctaacttatggccaaaatacccatcaaattttgaag

SEQ ID NO: 40532 - protein, 154 aa, Zea mays subsp. mays
  peptide (1)..(154): Ceres Seq. ID no. 1846809
  misc_feature (24)..(153): NCBI GI NO: 6984228 NR Description: putative flavonol synthase-like protein
  misc_feature (24)..(153): NCBI GI NO: 18409039 NR Description: flavonol synthase - like protein
  misc_feature (24)..(153): NCBI GI NO: 21554579 NR Description: flavonol synthase-like protein
  misc_feature (24)..(153): NCBI GI NO: 15229181 NR Description: putative protein; protein id: At3g49630.1
  misc_feature (24)..(153): NCBI GI NO: 11255902 NR Description: flavonol synthase-like protein
  misc_feature (11)..(153): NCBI GI NO: 19423910 NR Description: unknown protein [Arabidopsis thaliana]
  misc_feature (11)..(153): NCBI GI NO: 22331716 NR Description: oxidoreductase
  misc_feature (24)..(153): NCBI GI NO: 11255891 NR Description: hypothetical protein T9C5
  misc_feature (11)..(134): NCBI GI NO: 10834554 NR Description: 2-oxoacid-dependent oxidase [Arabidopsis thaliana]
  misc_feature (32)..(147): NCBI GI NO: 23130050 NR Description: hypothetical protein [Nostoc punctiforme]
LINSSIDPICSLDVISPFKDSDSDIGPLVEKIDDPSMANDKDLLQVVRLLDDACKEAGFFYVKGHGIDESLMREVRNVTREFFQLPYEEKLKIKMTPQSGYRGYQRIGENITKGKPDMHEAIDCYTPIRPGKYGDLAKPMEGSNLWPKYPSNFE

SEQ ID NO: 40533 - protein, 118 aa, Zea mays subsp. mays
  peptide (1)..(118): Ceres Seq. ID no. 1846810
  misc_feature (1)..(117): NCBI GI NO: 6984228 NR Description: putative flavonol synthase-like protein
  misc_feature (1)..(117): NCBI GI NO: 18409039 NR Description: flavonol synthase - like protein
  misc_feature (1)..(117): NCBI GI NO: 21554579 NR Description: flavonol synthase-like protein
  misc_feature (1)..(117): NCBI GI NO: 15229181 NR Description: putative protein; protein id: At3g49630.1
  misc_feature (1)..(117): NCBI GI NO: 11255902 NR Description: flavonol synthase-like protein
  misc_feature (1)..(117): NCBI GI NO: 19423910 NR Description: unknown protein [Arabidopsis thaliana]
  misc_feature (1)..(117): NCBI GI NO: 22331716 NR Description: oxidoreductase
  misc_feature (1)..(117): NCBI GI NO: 11255891 NR Description: hypothetical protein T9C5
  misc_feature (1)..(98): NCBI GI NO: 10834554 NR Description: 2-oxoacid-dependent oxidase [Arabidopsis thaliana]
  misc_feature (1)..(111): NCBI GI NO: 23130050 NR Description: hypothetical protein [Nostoc punctiforme]
MANDKDLLQVVRLLDDACKEAGFFYVKGHGIDESLMREVRNVTREFFQLPYEEKLKIKMTPQSGYRGYQRIGENITKGKPDMHEAIDCYTPIRPGKYGDLAKPMEGSNLWPKYPSNFE

SEQ ID NO: 40534 - protein, 83 aa, Zea mays subsp. mays
  peptide (1)..(83): Ceres Seq. ID no. 1846811
  misc_feature (1)..(82): NCBI GI NO: 6984228 NR Description: putative flavonol synthase-like protein
  misc_feature (1)..(82): NCBI GI NO: 18409039 NR Description: flavonol synthase - like protein
  misc_feature (1)..(82): NCBI GI NO: 21554579 NR Description: flavonol synthase-like protein
  misc_feature (1)..(82): NCBI GI NO: 15229181 NR Description: putative protein; protein id: At3g49630.1
  misc_feature (1)..(82): NCBI GI NO: 11255902 NR Description: flavonol synthase-like protein
  misc_feature (1)..(82): NCBI GI NO: 19423910 NR Description: unknown protein [Arabidopsis thaliana]
  misc_feature (1)..(82): NCBI GI NO: 22331716 NR Description: oxidoreductase
  misc_feature (1)..(82): NCBI GI NO: 11255891 NR Description: hypothetical protein T9C5
  misc_feature (1)..(63): NCBI GI NO: 10834554 NR Description: 2-oxoacid-dependent oxidase [Arabidopsis thaliana]
  misc_feature (1)..(76): NCBI GI NO: 23130050 NR Description: hypothetical protein [Nostoc punctiforme]
MREVRNVTREFFQLPYEEKLKIKMTPQSGYRGYQRIGENITKGKPDMHEAIDCYTPIRPGKYGDLAKPMEGSNLWPKYPSNFE

SEQ ID NO: 40535 - DNA, 468 bp, Zea mays subsp. mays
  misc_feature (1)..(468): Ceres Seq. ID no. 1851208
atccccagaaccacacggataaaccctagctgcgcgagccccccggcgatgtcggtggccatccgctccggcgagctccttgcgtgccccgtcgcactccggcgggcgcccttggctgtgtctgtggtgtcggtgcggatgagggctaggggcgccgtggctgtgcgggcggaggcaacggccgagggggtagggaaagaggggaagaaggcggcggggaagaagaagccggcgagcgggatcaccaagccgaagcccatctctacagagctgcgggagttcgtcggcggcgcggcggagctgccccggactgaggccatcaagctggtatgggcgcacatcaagggcaacaacctccaggatccaaacaacaagaagataataatctgcgatgagaaactgaagaagaaggggcactcctactctgagatcatcaacgagagcgtgattgagtcggtggactcgctg

SEQ ID NO: 40536 - protein, 156 aa, Zea mays subsp. mays
  peptide (1)..(156): Ceres Seq. ID no. 1851209
  misc_feature (12)..(135): NCBI GI NO: 14488372 NR Description: hypothetical protein
  misc_feature (19)..(136): NCBI GI NO: 21553903 NR Description: unknown [Arabidopsis thaliana]
  misc_feature (19)..(136): NCBI GI NO: 14423526 NR Description: putative protein [Arabidopsis thaliana]
  misc_feature (19)..(136): NCBI GI NO: 15235320 NR Description: putative protein; protein id: At4g34290
  misc_feature (19)..(136): NCBI GI NO: 19698859 NR Description: unknown protein [Arabidopsis thaliana]
  misc_feature (44)..(136): NCBI GI NO: 18397658 NR Description: expressed protein; protein id: At2g14880
  misc_feature (17)..(136): NCBI GI NO: 21593713 NR Description: unknown [Arabidopsis thaliana]
  misc_feature (71)..(135): NCBI GI NO: 33667910 NR Description: SWIb domain-containing protein [Solanum chacoense]
  misc_feature (36)..(135): NCBI GI NO: 6324869 NR Description: Topoisomerase 1 and RAD52 epistasis groupInteractions
  misc_feature (18)..(135): NCBI GI NO: 21593643 NR Description: unknown [Arabidopsis thaliana]
IPRTTRINPSCASPPAMSVAIRSGELLACPVALRRAPLAVSVVSVRMRARGAVAVRAEATAEGVGKEGKKAAGKKKPASGITKPKPISTELREFVGGAAELPRTEAIKLVWAHIKGNNLQDPNNKKIIICDEKLKKKGHSYSEIINESVIESVDSL

SEQ ID NO: 40537 - protein, 140 aa, Zea mays subsp. mays
  peptide (1)..(140): Ceres Seq. ID no. 1851210
  misc_feature (1)..(119): NCBI GI NO: 14488372 NR Description: hypothetical protein
  misc_feature (3)..(120): NCBI GI NO: 21553903 NR Description: unknown [Arabidopsis thaliana]
  misc_feature (3)..(120): NCBI GI NO: 14423526 NR Description: putative protein [Arabidopsis thaliana]
  misc_feature (3)..(120): NCBI GI NO: 15235320 NR Description: putative protein; protein id: At4g34290
  misc_feature (3)..(120): NCBI GI NO: 19698859 NR Description: unknown protein [Arabidopsis thaliana]
  misc_feature (28)..(120): NCBI GI NO: 18397658 NR Description: expressed protein; protein id: At2g14880
  misc_feature (1)..(120): NCBI GI NO: 21593713 NR Description: unknown [Arabidopsis thaliana]
  misc_feature (55)..(119): NCBI GI NO: 33667910 NR Description: SWIb domain-containing protein [Solanum chacoense]
  misc_feature (20)..(119): NCBI GI NO: 6324869 NR Description: Topoisomerase 1 and RAD52 epistasis groupInteractions
  misc_feature (2)..(119): NCBI GI NO: 21593643 NR Description: unknown [Arabidopsis thaliana]
MSVAIRSGELLACPVALRRAPLAVSVVSVRMRARGAVAVRAEATAEGVGKEGKKAAGKKKPASGITKPKPISTELREFVGGAAELPRTEAIKLVWAHIKGNNLQDPNNKKIIICDEKLKKKGHSYSEIINESVIESVDSL

SEQ ID NO: 40538 - protein, 110 aa, Zea mays subsp. mays
  peptide (1)..(110): Ceres Seq. ID no. 1851211
  misc_feature (1)..(89): NCBI GI NO: 14488372 NR Description: hypothetical protein
  misc_feature (1)..(90): NCBI GI NO: 21553903 NR Description: unknown [Arabidopsis thaliana]
  misc_feature (1)..(90): NCBI GI NO: 14423526 NR Description: putative protein [Arabidopsis thaliana]
  misc_feature (1)..(90): NCBI GI NO: 15235320 NR Description: putative protein; protein id: At4g34290
  misc_feature (1)..(90): NCBI GI NO: 19698859 NR Description: unknown protein [Arabidopsis thaliana]
  misc_feature (1)..(90): NCBI GI NO: 18397658 NR Description: expressed protein; protein id: At2g14880
  misc_feature (1)..(90): NCBI GI NO: 21593713 NR Description: unknown [Arabidopsis thaliana]
  misc_feature (25)..(89): NCBI GI NO: 33667910 NR Description: SWIb domain-containing protein [Solanum chacoense]
  misc_feature (1)..(89): NCBI GI NO: 6324869 NR Description: Topoisomerase 1 and RAD52 epistasis groupInteractions
  misc_feature (1)..(89): NCBI GI NO: 21593643 NR Description: unknown [Arabidopsis thaliana]
MRARGAVAVRAEATAEGVGKEGKKAAGKKKPASGITKPKPISTELREFVGGAAELPRTEAIKLVWAHIKGNNLQDPNNKKIIICDEKLKKKGHSYSEIINESVIESVDSL

SEQ ID NO: 40539 - DNA, 1863 bp, Zea mays subsp. mays
  misc_feature (1)..(1863): Ceres Seq. ID no. 12566913
gcgggaaactctcaaaatcatcttctccgtttccagtccacaaccttctccattcctcaataccgcaaaccctagaaaaatctcgctccgcaaaaccatgagcgcccctatggagatctccttcactgcgcccccaccccctccggacgcagcgtctaccgccgacgcttccccgctgctggaacctgccgccgcgcagatgctgccccctgtcgccgcagtctcctcctcgcagccgatgcagcagacagctgcggctgcggccgtggttgctccttccccggccgacgataaggtcctcgtgtcagttgaggtactgttgcacgccacgagcgtagctcgccacgaggacgtccaggtggcggtcgagaggatgctcgaagctcgaagcttaagctatgttgatgggcctgtgccaattcctgccgataattcttttcttcttgaaaatgtcaaaaggatacaaataagtgatactgatgagtgggttgagaatcacaaagttctcttattttggcaagtcaagcctgttgtgcatgtgttccagctgagtgaagatggtccaggtgaggaaccaagcgaggatgatacactctctagctttaatgagtgggccttaccggccaaagaatttgatggtctgtgggaaagtttactatatgaagttggtctcaagcagaggttgctgagatatgctgtcagtgctttgctttttactgaaagaggtgtggacacatgtctggtttcatggaaccggattgtacttttgcatggtccacctggaacaggaaagacttccttgtgtaaagcactagcacagaaactttctattcggttcaaatcaaggtattctatgtgtcaattgattgaagtcaatgctcattcattgttcagcaagtggttttctgaaagtggaaaactggttgccaaacttttccagaagatccaggagatggtggaggaagaaagcaacctagtatttgtattaatagatgaagttgaaagccttgctgctgccagacaagctgccatatctggctctgaaccttcagactccattagagttgtgaatgcactgctaacacaaatggacaaactgaagtcttggccaaatgttatcattttgacaacatcgaatattactacagcaatagatattgcatttgttgacagggcagacattaaggcatatgtcggaccccctacgcttcaagcacgatacgagatcttgaggtcatgcatacaggaactcttaagagttggtattcttacatatcctcagggtagtagtgtgccatgtattctgaactattcgaccctgaaggagaagaagcactgtcctgaggctgcagaaccccatggtgcgcttcatctatccaatctactgtatgaagccgcaaaactgtgtgagggacttagtggccggtcattgaggaaactccctttcctgacacatgcctctgttaccaatccgtcatgctgcgatgcttctactttcttgcatacattgatacagactgcacggagagaagtcttggagtcacgtggttagttcacccttgaaaccttggcgtcttttggaagagcaaaatgctaacagttcattccaaacaccatgtcctggagtcccctgatgtgatcaattgccgggtcgttaaaaccataagaaagtccatcccatcgctagagttaggttagtgttaaatgtagagagacaagaacaaagaatgaatgaattggcttaattccattgattgatcggtatgtatatacatggcgaacagtcgccttgacgttccttagggatgtcacacggttaatagtaagcctagtcacaaatccgtttgaagatagatccgttgg

SEQ ID NO: 40540 - protein, 516 aa, Zea mays subsp. mays
  peptide (1)..(516): Ceres Seq. ID no. 12566914
  misc_feature (253)..(417): Pfam Name: AAA Pfam Description: ATPase family associated with various cellular activities
  misc_feature (37)..(516): NCBI GI NO: 38605777 NR Description: OSJNBa0044K18.20
  misc_feature (82)..(513): NCBI GI NO: 30686626 NR Description: protein -related binding protein
  misc_feature (195)..(424): NCBI GI NO: 7485976 NR Description: hypothetical protein F22K18
  misc_feature (82)..(160): NCBI GI NO: 7485976 NR Description: hypothetical protein F22K18
  misc_feature (470)..(513): NCBI GI NO: 7485976 NR Description: hypothetical protein F22K18
  misc_feature (86)..(515): NCBI GI NO: 12845703 NR Description: unnamed protein product [Mus musculus]
  misc_feature (86)..(503): NCBI GI NO: 11321607 NR Description: thyroid hormone receptor interactor 13
  misc_feature (86)..(515): NCBI GI NO: 20908701 NR Description: thyroid hormone receptor interactor 13
  misc_feature (101)..(503): NCBI GI NO: 38969923 NR Description: Unknown (protein for MGC:76197)
  misc_feature (86)..(515): NCBI GI NO: 34853393 NR Description: similar to thyroid hormone receptor interactor 13
RETLKIIFSVSSPQPSPFLNTANPRKISLRKTMSAPMEISFTAPPPPPDAASTADASPLLEPAAAQMLPPVAAVSSSQPMQQTAAAAAVVAPSPADDKVLVSVEVLLHATSVARHEDVQVAVERMLEARSLSYVDGPVPIPADNSFLLENVKRIQISDTDEWVENHKVLLFWQVKPVVHVFQLSEDGPGEEPSEDDTLSSFNEWALPAKEFDGLWESLLYEVGLKQRLLRYAVSALLFTERGVDTCLVSWNRIVLLHGPPGTGKTSLCKALAQKLSIRFKSRYSMCQLIEVNAHSLFSKWFSESGKLVAKLFQKIQEMVEEESNLVFVLIDEVESLAAARQAAISGSEPSDSIRVVNALLTQMDKLKSWPNVIILTTSNITTAIDIAFVDRADIKAYVGPPTLQARYEILRSCIQELLRVGILTYPQGSSVPCILNYSTLKEKKHCPEAAEPHGALHLSNLLYEAAKLCEGLSGRSLRKLPFLTHASVTNPSCCDASTFLHTLIQTARREVLESRG

SEQ ID NO: 40541 - protein, 484 aa, Zea mays subsp. mays
  peptide (1)..(484): Ceres Seq. ID no. 12566915
  misc_feature (221)..(385): Pfam Name: AAA Pfam Description: ATPase family associated with various cellular activities
  misc_feature (5)..(484): NCBI GI NO: 38605777 NR Description: OSJNBa0044K18.20
  misc_feature (50)..(481): NCBI GI NO: 30686626 NR Description: protein -related binding protein
  misc_feature (163)..(392): NCBI GI NO: 7485976 NR Description: hypothetical protein F22K18
  misc_feature (50)..(128): NCBI GI NO: 7485976 NR Description: hypothetical protein F22K18
  misc_feature (438)..(481): NCBI GI NO: 7485976 NR Description: hypothetical protein F22K18
  misc_feature (54)..(483): NCBI GI NO: 12845703 NR Description: unnamed protein product [Mus musculus]
  misc_feature (54)..(471): NCBI GI NO: 11321607 NR Description: thyroid hormone receptor interactor 13
  misc_feature (54)..(483): NCBI GI NO: 20908701 NR Description: thyroid hormone receptor interactor 13
  misc_feature (69)..(471): NCBI GI NO: 38969923 NR Description: Unknown (protein for MGC:76197)
  misc_feature (54)..(483): NCBI GI NO: 34853393 NR Description: similar to thyroid hormone receptor interactor 13
MSAPMEISFTAPPPPPDAASTADASPLLEPAAAQMLPPVAAVSSSQPMQQTAAAAAVVAPSPADDKVLVSVEVLLHATSVARHEDVQVAVERMLEARSLSYVDGPVPIPADNSFLLENVKRIQISDTDEWVENHKVLLFWQVKPVVHVFQLSEDGPGEEPSEDDTLSSFNEWALPAKEFDGLWESLLYEVGLKQRLLRYAVSALLFTERGVDTCLVSWNRIVLLHGPPGTGKTSLCKALAQKLSIRFKSRYSMCQLIEVNAHSLFSKWFSESGKLVAKLFQKIQEMVEEESNLVFVLIDEVESLAAARQAAISGSEPSDSIRVVNALLTQMDKLKSWPNVIILTTSNITTAIDIAFVDRADIKAYVGPPTLQARYEILRSCIQELLRVGILTYPQGSSVPCILNYSTLKEKKHCPEAAEPHGALHLSNLLYEAAKLCEGLSGRSLRKLPFLTHASVTNPSCCDASTFLHTLIQTARREVLESRG

SEQ ID NO: 40542 - protein, 480 aa, Zea mays subsp. mays
  peptide (1)..(480): Ceres Seq. ID no. 12566916
  misc_feature (217)..(381): Pfam Name: AAA Pfam Description: ATPase family associated with various cellular activities
  misc_feature (1)..(480): NCBI GI NO: 38605777 NR Description: OSJNBa0044K18.20
  misc_feature (46)..(477): NCBI GI NO: 30686626 NR Description: protein -related binding protein
  misc_feature (159)..(388): NCBI GI NO: 7485976 NR Description: hypothetical protein F22K18
  misc_feature (46)..(124): NCBI GI NO: 7485976 NR Description: hypothetical protein F22K18
  misc_feature (434)..(477): NCBI GI NO: 7485976 NR Description: hypothetical protein F22K18
  misc_feature (50)..(479): NCBI GI NO: 12845703 NR Description: unnamed protein product [Mus musculus]
  misc_feature (50)..(467): NCBI GI NO: 11321607 NR Description: thyroid hormone receptor interactor 13
  misc_feature (50)..(479): NCBI GI NO: 20908701 NR Description: thyroid hormone receptor interactor 13
  misc_feature (65)..(467): NCBI GI NO: 38969923 NR Description: Unknown (protein for MGC:76197)
  misc_feature (50)..(479): NCBI GI NO: 34853393 NR Description: similar to thyroid hormone receptor interactor 13
MEISFTAPPPPPDAASTADASPLLEPAAAQMLPPVAAVSSSQPMQQTAAAAAVVAPSPADDKVLVSVEVLLHATSVARHEDVQVAVERMLEARSLSYVDGPVPIPADNSFLLENVKRIQISDTDEWVENHKVLLFWQVKPVVHVFQLSEDGPGEEPSEDDTLSSFNEWALPAKEFDGLWESLLYEVGLKQRLLRYAVSALLFTERGVDTCLVSWNRIVLLHGPPGTGKTSLCKALAQKLSIRFKSRYSMCQLIEVNAHSLFSKWFSESGKLVAKLFQKIQEMVEEESNLVFVLIDEVESLAAARQAAISGSEPSDSIRVVNALLTQMDKLKSWPNVIILTTSNITTAIDIAFVDRADIKAYVGPPTLQARYEILRSCIQELLRVGILTYPQGSSVPCILNYSTLKEKKHCPEAAEPHGALHLSNLLYEAAKLCEGLSGRSLRKLPFLTHASVTNPSCCDASTFLHTLIQTARREVLESRG

SEQ ID NO: 40543 - DNA, 457 bp, Zea mays subsp. mays
  misc_feature (1)..(457): Ceres Seq. ID no. 12387788
atctatccagtcgcatctccctctccgaaatcaaggtagcgtacaccgctgcagtttctagagccctctctgccactcgtgatcccactagtcacaatgcctgccctcgccaagcccgcctcccgcaccgccaagcccgccgcggctccgaagccgaagcctgccgccgccaagccgaaggcggccaccgctggtgcctcccacccgccttacttcgagatgatcaaggaggctatcacggcgctcaaggagaggaccggctccagctcgcaagcgatcgccaagtatgtgggggacaagcacggcgcgtcaacctcttgcactatttattcattcataagttggatgacatcaaataatgatattaacttgatgtattcgcatcttattcattgtaaaaacgttgctcataattaaagagcatccatccaatctcaaagagatttctggagcaatc

SEQ ID NO: 40544 - protein, 118 aa, Zea mays subsp. mays
  peptide (1)..(118): Ceres Seq. ID no. 12387789
LSSRISLSEIKVAYTAAVSRALSATRDPTSHNACPRQARLPHRQARRGSEAEACRRQAEGGHRWCLPPALLRDDQGGYHGAQGEDRLQLASDRQVCGGQARRVNLLHYLFIHKLDDIK

SEQ ID NO: 40545 - protein, 106 aa, Zea mays subsp. mays
  peptide (1)..(106): Ceres Seq. ID no. 12387790
  misc_feature (1)..(82): NCBI GI NO: 22135471 NR Description: histone H1-like protein HON101 [Zea mays]
  misc_feature (1)..(70): NCBI GI NO: 18463959 NR Description: histone H1-like protein [Zea mays]
  misc_feature (1)..(82): NCBI GI NO: 5230785 NR Description: histone H1 WH1B.1 [Triticum aestivum]
  misc_feature (10)..(72): NCBI GI NO: 25553627 NR Description: putative histone H1
  misc_feature (1)..(69): NCBI GI NO: 2623960 NR Description: histone H1 [Apium graveolens]
  misc_feature (1)..(69): NCBI GI NO: 7439658 NR Description: histone H1, stress-inducible - tomato
  misc_feature (1)..(70): NCBI GI NO: 585238 NR Description: Histone H1-I
  misc_feature (1)..(71): NCBI GI NO: 121950 NR Description: HISTONE H1
  misc_feature (1)..(69): NCBI GI NO: 729668 NR Description: Histone H1
  misc_feature (1)..(71): NCBI GI NO: 6474950 NR Description: variant of histone H1 [Lilium longiflorum]
MPALAKPASRTAKPAAAPKPKPAAAKPKAATAGASHPPYFEMIKEAITALKERTGSSSQAIAKYVGDKHGASTSCTIYSFISWMTSNNDINLMYSHLIHCKNVAHN

SEQ ID NO: 40546 - protein, 65 aa, Zea mays subsp. mays
  peptide (1)..(65): Ceres Seq. ID no. 12387791
  misc_feature (1)..(41): NCBI GI NO: 22135471 NR Description: histone H1-like protein HON101 [Zea mays]
  misc_feature (1)..(29): NCBI GI NO: 18463959 NR Description: histone H1-like protein [Zea mays]
  misc_feature (1)..(41): NCBI GI NO: 5230785 NR Description: histone H1 WH1B.1 [Triticum aestivum]
  misc_feature (1)..(31): NCBI GI NO: 25553627 NR Description: putative histone H1
  misc_feature (1)..(28): NCBI GI NO: 2623960 NR Description: histone H1 [Apium graveolens]
  misc_feature (1)..(28): NCBI GI NO: 7439658 NR Description: histone H1, stress-inducible - tomato
  misc_feature (1)..(29): NCBI GI NO: 585238 NR Description: Histone H1-I
  misc_feature (1)..(30): NCBI GI NO: 121950 NR Description: HISTONE H1
  misc_feature (1)..(28): NCBI GI NO: 729668 NR Description: Histone H1
  misc_feature (1)..(30): NCBI GI NO: 6474950 NR Description: variant of histone H1 [Lilium longiflorum]
MIKEAITALKERTGSSSQAIAKYVGDKHGASTSCTIYSFISWMTSNNDINLMYSHLIHCKNVAHN

SEQ ID NO: 40547 - DNA, 1320 bp, Zea mays subsp. mays
  misc_feature (1)..(1320): Ceres Seq. ID no. 12360889
gcacgagaccattacctagaacatcctaatcgaaaaacttgtcgtctcgtccactcggtcgatcgccttatctcctcctctcccagtcctcccgcccctcgccccatcccccaccacccagtcagtgtctgtcaccgcctcaccgaccacacgccaagggaagaagcagcagcgccatggccgcgccgctcacggccgtccgggcccgcctcctcctcctcccagtgacctgcacggcagccggtaccaccggccggccggcccctccgtccaagagcagcaggccgcgtctactaccaccaggcaccacccggtgccggtgctccaggcctcccatggaggcggtggcgccggtgtccgcggcggcggtgggcggcgctgctgctgctgccggcggacgcggcgctggcggtgggcggcgagttggggatcctcgagggccgcagcttcgcgctgctgcacccgctcatcatgggcgggctcttcgcgtacacgctctgggcggggtacctcggctggcagtggcgccgggtgcgcaccgtccaggacgagatcaacgcgctcaagaagcagctcaagcccgccgccgcggccactcccgcggcggtcggcgccggcgcggactcctcctccaccacaaccccgccgcccgctgcggccagcaagtcgccgtcgccggcggaggcccggatcgaggagctcaccgacgagcggaaggcgctgctcaaggggtcgttccgggaccgccacttcaacgcgggctccctcctcctcggcctcggcgtgctcgagtccgtcggcggcgcgctcaacacctggttccgcaccggcaagctgttcccgggcccgcacctcttcgcgggcgccgccatcaccgtgctgtgggccgccgcggccgcgctcgtcccggcgatgcagaagggggacgagacggcccgcagcctgcacatcgcgctcaacgccgtcaacgtcctgctcttcgtctggcagatccccaccgggctcgagatcgtcggcaaggtcttcgagttcaccacctggccatgagacgacgtccttgtgcgtgcgtgtctgctctgctatgcgcatcctgcatgtcccttcacccttctcttctctttcgtcccatcccatgacccatgtattgcttggtagtgttaggttcaatctccgtctgcaggtcgttgttttcttgacctgtcgaagtcgatccatgttcacaaagctgtgatgctgagaatgccaatcacaagttcctttacactgtacatgacaagagttcgttctgcagtacacagtctttagttaagccgaatcgcc

SEQ ID NO: 40548 - protein, 319 aa, Zea mays subsp. mays
  peptide (1)..(319): Ceres Seq. ID no. 12360890
  misc_feature (70)..(268): Pfam Name: Pfam Description:  HlyD family secretion protein
MAAPLTAVRARLLLLPVTCTAAGTTGRPAPPSKSSRPRLLPPGTTRCRCSRPPMEAVAPVSAAAVGGAAAAAGGRGAGGGRRVGDPRGPQLRAAAPAHHGRALRVHALGGVPRLAVAPGAHRPGRDQRAQEAAQARRRGHSRGGRRRRGLLLHHNPAARCGQQVAVAGGGPDRGAHRRAEGAAQGVVPGPPLQRGLPPPRPRRARVRRRRAQHLVPHRQAVPGPAPLRGRRHHRAVGRRGRARPGDAEGGRDGPQPAHRAQRRQRPALRLADPHRARDRRQGLRVHHLAMRRRPCACVSALLCASCMSLHPSLLFRPIP

SEQ ID NO: 40549 - protein, 266 aa, Zea mays subsp. mays
  peptide (1)..(266): Ceres Seq. ID no. 12360891
  misc_feature (17)..(215): Pfam Name: Pfam Description:  HlyD family secretion protein
MEAVAPVSAAAVGGAAAAAGGRGAGGGRRVGDPRGPQLRAAAPAHHGRALRVHALGGVPRLAVAPGAHRPGRDQRAQEAAQARRRGHSRGGRRRRGLLLHHNPAARCGQQVAVAGGGPDRGAHRRAEGAAQGVVPGPPLQRGLPPPRPRRARVRRRRAQHLVPHRQAVPGPAPLRGRRHHRAVGRRGRARPGDAEGGRDGPQPAHRAQRRQRPALRLADPHRARDRRQGLRVHHLAMRRRPCACVSALLCASCMSLHPSLLFRPIP

SEQ ID NO: 40550 - protein, 191 aa, Zea mays subsp. mays
  peptide (1)..(191): Ceres Seq. ID no. 12360892
  misc_feature (1)..(191): NCBI GI NO: 15228623 NR Description: putative protein; protein id: At3g61870
  misc_feature (73)..(184): NCBI GI NO: 22299036 NR Description: ORF_ID:tll1493~hypothetical protein
  misc_feature (1)..(27): NCBI GI NO: 22299036 NR Description: ORF_ID:tll1493~hypothetical protein
  misc_feature (79)..(184): NCBI GI NO: 17230241 NR Description: hypothetical protein [Nostoc sp. PCC 7120]
  misc_feature (1)..(35): NCBI GI NO: 17230241 NR Description: hypothetical protein [Nostoc sp. PCC 7120]
  misc_feature (79)..(184): NCBI GI NO: 16330950 NR Description: hypothetical protein [Synechocystis sp. PCC 6803]
  misc_feature (79)..(184): NCBI GI NO: 17229007 NR Description: hypothetical protein [Nostoc sp. PCC 7120]
  misc_feature (79)..(184): NCBI GI NO: 23130190 NR Description: hypothetical protein [Nostoc punctiforme]
  misc_feature (79)..(185): NCBI GI NO: 33864786 NR Description: conserved hypothetical protein
MGGLFAYTLWAGYLGWQWRRVRTVQDEINALKKQLKPAAAATPAAVGAGADSSSTTTPPPAAASKSPSPAEARIEELTDERKALLKGSFRDRHFNAGSLLLGLGVLESVGGALNTWFRTGKLFPGPHLFAGAAITVLWAAAAALVPAMQKGDETARSLHIALNAVNVLLFVWQIPTGLEIVGKVFEFTTWP

SEQ ID NO: 40551 - DNA, 1372 bp, Zea mays subsp. mays
  misc_feature (1)..(1372): Ceres Seq. ID no. 12381735
gcacgagaccattacctagaacatcctaatcaaaaaaccgacgagcaccccctgagcctccgccgtcgagttcgagacgagacggtaccactatggagagtgagcaccacctgttcgagatcgcggccgcccggctcgagcgtagttctgccttcttggacgaggactactcttcatggtctccctgcatacagggctaccactggcgatgcgtctgctccgctgatcccgccgctggtacggcgtccttcaccgtctctcttccctacagcagcacccgcgagcccctcaacgcctcgttcaagctcagcctgctggaccgaggaggcctgccggtgccgtccaggacccgagccaccttgttccagaactgcctgatccagcagatgtggcagttggagtgtccgggcttcctcaccagggacgacctggagcggcaggagtactacctcgacaacgacggcggccgctgcttccacgtccgctgtgacatcgccatcaagcccttcgccgcggccacggccggcgacggcgacggcgacgtcgcggtgcccccgtccgacgacctccaccggcacctcggcgacctgctggcgcgcaaggacggcgcggacgtcacgttccagctggtcgacgccggcgagacgttctccgcgcaccggtgcgtgctcgcggcgcggtcgcccgtgttcagagcgcagctgttcggcgagatgatggagagcaacaagggcaccggcgtcgtcataccggttgaggacatggaagcccaggtgttcagcgccctgctggccttcatctacaccgactcgttgccgccggagaccgacagcgacgacgacgacgacgaagaagccatggtgcactatcagcttctgcttgccgccgcggacaggtacggcgtcgacaggatgaagctggtttgccaggagaagctgtgcaagcacatacgcgcggactcggtggcgacgatgctggttttagctgaccgacaccattgccctgcgctcaaggaggcgtgctttcgtttcctctcttctagcgccaatcttgcctccttcactgagacgacggatggcttcgaggtgctcaacgccagctgccctgctgttctcaaggagctactggcccaagcttgccaccgttttgatcttctgagtaaccatggccgacggtttccagtttcatacaatgcaggttgctctgctcgtttctcaaaagcgatgcacttctttgatgaattagtacgtgcaggttttgaacgcattttccggtggtctgcgaaaacgaaaaatcgctcgaaattcgttgaatttcgtaaatctcgagcactttgtaacttcaaatttgaaaaccccgattttcattgctc

SEQ ID NO: 40552 - protein, 426 aa, Zea mays subsp. mays
  peptide (1)..(426): Ceres Seq. ID no. 12381736
  misc_feature (163)..(286): Pfam Name: Pfam Description:  BTB/POZ domain
  misc_feature (60)..(347): NCBI GI NO: 37534480 NR Description: hypothetical protein
  misc_feature (1)..(347): NCBI GI NO: 37534588 NR Description: putative speckle-type protein
  misc_feature (1)..(350): NCBI GI NO: 37534534 NR Description: putative speckle-type protein
  misc_feature (105)..(345): NCBI GI NO: 37534532 NR Description: putative speckle-type protein
  misc_feature (107)..(346): NCBI GI NO: 37534590 NR Description: putative speckle-type protein
  misc_feature (60)..(348): NCBI GI NO: 37534488 NR Description: hypothetical protein
  misc_feature (1)..(345): NCBI GI NO: 37534474 NR Description: hypothetical protein
  misc_feature (107)..(351): NCBI GI NO: 37534476 NR Description: hypothetical protein
  misc_feature (100)..(347): NCBI GI NO: 37534570 NR Description: putative speckle-type protein
  misc_feature (107)..(345): NCBI GI NO: 37534542 NR Description: putative speckle-type protein
MESEHHLFEIAAARLERSSAFLDEDYSSWSPCIQGYHWRCVCSADPAAGTASFTVSLPYSSTREPLNASFKLSLLDRGGLPVPSRTRATLFQNCLIQQMWQLECPGFLTRDDLERQEYYLDNDGGRCFHVRCDIAIKPFAAATAGDGDGDVAVPPSDDLHRHLGDLLARKDGADVTFQLVDAGETFSAHRCVLAARSPVFRAQLFGEMMESNKGTGVVIPVEDMEAQVFSALLAFIYTDSLPPETDSDDDDDEEAMVHYQLLLAAADRYGVDRMKLVCQEKLCKHIRADSVATMLVLADRHHCPALKEACFRFLSSSANLASFTETTDGFEVLNASCPAVLKELLAQACHRFDLLSNHGRRFPVSYNAGCSARFSKAMHFFDELVRAGFERIFRWSAKTKNRSKFVEFRKSRALCNFKFENPDFHC

SEQ ID NO: 40553 - protein, 328 aa, Zea mays subsp. mays
  peptide (1)..(328): Ceres Seq. ID no. 12381737
  misc_feature (65)..(188): Pfam Name: Pfam Description:  BTB/POZ domain
  misc_feature (1)..(249): NCBI GI NO: 37534480 NR Description: hypothetical protein
  misc_feature (1)..(249): NCBI GI NO: 37534588 NR Description: putative speckle-type protein
  misc_feature (1)..(252): NCBI GI NO: 37534534 NR Description: putative speckle-type protein
  misc_feature (7)..(247): NCBI GI NO: 37534532 NR Description: putative speckle-type protein
  misc_feature (9)..(248): NCBI GI NO: 37534590 NR Description: putative speckle-type protein
  misc_feature (1)..(250): NCBI GI NO: 37534488 NR Description: hypothetical protein
  misc_feature (1)..(247): NCBI GI NO: 37534474 NR Description: hypothetical protein
  misc_feature (9)..(253): NCBI GI NO: 37534476 NR Description: hypothetical protein
  misc_feature (2)..(249): NCBI GI NO: 37534570 NR Description: putative speckle-type protein
  misc_feature (9)..(247): NCBI GI NO: 37534542 NR Description: putative speckle-type protein
MWQLECPGFLTRDDLERQEYYLDNDGGRCFHVRCDIAIKPFAAATAGDGDGDVAVPPSDDLHRHLGDLLARKDGADVTFQLVDAGETFSAHRCVLAARSPVFRAQLFGEMMESNKGTGVVIPVEDMEAQVFSALLAFIYTDSLPPETDSDDDDDEEAMVHYQLLLAAADRYGVDRMKLVCQEKLCKHIRADSVATMLVLADRHHCPALKEACFRFLSSSANLASFTETTDGFEVLNASCPAVLKELLAQACHRFDLLSNHGRRFPVSYNAGCSARFSKAMHFFDELVRAGFERIFRWSAKTKNRSKFVEFRKSRALCNFKFENPDFHC

SEQ ID NO: 40554 - protein, 219 aa, Zea mays subsp. mays
  peptide (1)..(219): Ceres Seq. ID no. 12381738
  misc_feature (1)..(79): Pfam Name: Pfam Description:  BTB/POZ domain
  misc_feature (1)..(140): NCBI GI NO: 37534480 NR Description: hypothetical protein
  misc_feature (1)..(140): NCBI GI NO: 37534588 NR Description: putative speckle-type protein
  misc_feature (1)..(143): NCBI GI NO: 37534534 NR Description: putative speckle-type protein
  misc_feature (1)..(138): NCBI GI NO: 37534532 NR Description: putative speckle-type protein
  misc_feature (1)..(139): NCBI GI NO: 37534590 NR Description: putative speckle-type protein
  misc_feature (1)..(141): NCBI GI NO: 37534488 NR Description: hypothetical protein
  misc_feature (1)..(138): NCBI GI NO: 37534474 NR Description: hypothetical protein
  misc_feature (1)..(144): NCBI GI NO: 37534476 NR Description: hypothetical protein
  misc_feature (1)..(140): NCBI GI NO: 37534570 NR Description: putative speckle-type protein
  misc_feature (1)..(138): NCBI GI NO: 37534542 NR Description: putative speckle-type protein
MMESNKGTGVVIPVEDMEAQVFSALLAFIYTDSLPPETDSDDDDDEEAMVHYQLLLAAADRYGVDRMKLVCQEKLCKHIRADSVATMLVLADRHHCPALKEACFRFLSSSANLASFTETTDGFEVLNASCPAVLKELLAQACHRFDLLSNHGRRFPVSYNAGCSARFSKAMHFFDELVRAGFERIFRWSAKTKNRSKFVEFRKSRALCNFKFENPDFHC

SEQ ID NO: 40555 - DNA, 959 bp, Zea mays subsp. mays
  misc_feature (1)..(959): Ceres Seq. ID no. 12364026
gcacgagaccattacctagaacatcctaatcaaaaatcgtcagagacacgcgtccaaacatacagctagctagcctctgcatgcctacgtacagcatggccaaggccgagctgctgctcctcgccctcgtggcttcgctctccgtgctgccattctcctccctcgccgtgtaccaggacttctgcatcgccgacctatccgccgccgccacgccgggcggctacccgtgcaagcccccgaaggacgtgaccgccgacgacttccactacggcggcctcgccacccccggcacggcgctgaaacccttcaaaatctccctgggctcggccgtcgtcaccacgttccccggcctgaacgggctgggcatctccgccgcgcggatggtgatggtcccgggcggcgtcgcgccgctgcactcccacccgggaggcaccgagctcatcttcgtcatcgagggcagcgtcgtctgcggcttcatcagcgccacgctcaacagggtgtacaccaagacgctgtacgccggcgacctgatggtgctcccgcagggccagctccacttccagtacagccacggcaacaccacggcggtgacgctgtcctcgttcagcagcgacaaccccggcctgcagatcctcgacttcgcgctcttcgccaacgacctgcccacagaggtcgtgaacaaggtgaccaacctggacgaactgcagatcgtcaagctcaaggcactgttcggagggaggggctagacggatatatatgtactccgtatataggaacagtcaacggtgttgatcattgaattgtgtgtgtattattctatacttgtgatggatgtttgtcttgtcattctataaaataaattgtaacgcgcgcagcaggcgtgagagcgaaagtagctgccacatttgatgtactaatatttacatctccattgttgataataatacattattggcctc

SEQ ID NO: 40556 - protein, 221 aa, Zea mays subsp. mays
  peptide (1)..(221): Ceres Seq. ID no. 12364027
  misc_feature (65)..(210): Pfam Name: Pfam Description:  Cupin
  misc_feature (9)..(221): NCBI GI NO: 13160411 NR Description: adenosine diphosphate glucose pyrophosphatase
  misc_feature (9)..(221): NCBI GI NO: 21322655 NR Description: adenosine diphosphate glucose pyrophosphatase
  misc_feature (9)..(221): NCBI GI NO: 7447326 NR Description: germin-like protein 1 - barley
  misc_feature (6)..(221): NCBI GI NO: 2655293 NR Description: germin-like protein 5 [Oryza sativa]
  misc_feature (6)..(221): NCBI GI NO: 4239821 NR Description: germin-like protein 1 [Oryza sativa]
  misc_feature (6)..(221): NCBI GI NO: 7447327 NR Description: germin-like protein - rice
  misc_feature (6)..(214): NCBI GI NO: 38568035 NR Description: OSJNBa0065J03.5
  misc_feature (21)..(221): NCBI GI NO: 13277342 NR Description: Germin-like protein [Pisum sativum]
  misc_feature (13)..(221): NCBI GI NO: 7242813 NR Description: germin-like protein [Phaseolus vulgaris]
  misc_feature (12)..(219): NCBI GI NO: 18203684 NR Description: Auxin-binding protein ABP19a precursor
MPTYSMAKAELLLLALVASLSVLPFSSLAVYQDFCIADLSAAATPGGYPCKPPKDVTADDFHYGGLATPGTALKPFKISLGSAVVTTFPGLNGLGISAARMVMVPGGVAPLHSHPGGTELIFVIEGSVVCGFISATLNRVYTKTLYAGDLMVLPQGQLHFQYSHGNTTAVTLSSFSSDNPGLQILDFALFANDLPTEVVNKVTNLDELQIVKLKALFGGRG

SEQ ID NO: 40557 - protein, 216 aa, Zea mays subsp. mays
  peptide (1)..(216): Ceres Seq. ID no. 12364028
  misc_feature (60)..(205): Pfam Name: Pfam Description:  Cupin
  misc_feature (4)..(216): NCBI GI NO: 13160411 NR Description: adenosine diphosphate glucose pyrophosphatase
  misc_feature (4)..(216): NCBI GI NO: 21322655 NR Description: adenosine diphosphate glucose pyrophosphatase
  misc_feature (4)..(216): NCBI GI NO: 7447326 NR Description: germin-like protein 1 - barley
  misc_feature (1)..(216): NCBI GI NO: 2655293 NR Description: germin-like protein 5 [Oryza sativa]
  misc_feature (1)..(216): NCBI GI NO: 4239821 NR Description: germin-like protein 1 [Oryza sativa]
  misc_feature (1)..(216): NCBI GI NO: 7447327 NR Description: germin-like protein - rice
  misc_feature (1)..(209): NCBI GI NO: 38568035 NR Description: OSJNBa0065J03.5
  misc_feature (16)..(216): NCBI GI NO: 13277342 NR Description: Germin-like protein [Pisum sativum]
  misc_feature (8)..(216): NCBI GI NO: 7242813 NR Description: germin-like protein [Phaseolus vulgaris]
  misc_feature (7)..(214): NCBI GI NO: 18203684 NR Description: Auxin-binding protein ABP19a precursor
MAKAELLLLALVASLSVLPFSSLAVYQDFCIADLSAAATPGGYPCKPPKDVTADDFHYGGLATPGTALKPFKISLGSAVVTTFPGLNGLGISAARMVMVPGGVAPLHSHPGGTELIFVIEGSVVCGFISATLNRVYTKTLYAGDLMVLPQGQLHFQYSHGNTTAVTLSSFSSDNPGLQILDFALFANDLPTEVVNKVTNLDELQIVKLKALFGGRG

SEQ ID NO: 40558 - protein, 121 aa, Zea mays subsp. mays
  peptide (1)..(121): Ceres Seq. ID no. 12364029
  misc_feature (1)..(110): Pfam Name: Pfam Description:  Cupin
  misc_feature (1)..(121): NCBI GI NO: 13160411 NR Description: adenosine diphosphate glucose pyrophosphatase
  misc_feature (1)..(121): NCBI GI NO: 21322655 NR Description: adenosine diphosphate glucose pyrophosphatase
  misc_feature (1)..(121): NCBI GI NO: 7447326 NR Description: germin-like protein 1 - barley
  misc_feature (1)..(121): NCBI GI NO: 2655293 NR Description: germin-like protein 5 [Oryza sativa]
  misc_feature (1)..(121): NCBI GI NO: 4239821 NR Description: germin-like protein 1 [Oryza sativa]
  misc_feature (1)..(121): NCBI GI NO: 7447327 NR Description: germin-like protein - rice
  misc_feature (1)..(114): NCBI GI NO: 38568035 NR Description: OSJNBa0065J03.5
  misc_feature (1)..(121): NCBI GI NO: 13277342 NR Description: Germin-like protein [Pisum sativum]
  misc_feature (1)..(121): NCBI GI NO: 7242813 NR Description: germin-like protein [Phaseolus vulgaris]
  misc_feature (1)..(119): NCBI GI NO: 18203684 NR Description: Auxin-binding protein ABP19a precursor
MVMVPGGVAPLHSHPGGTELIFVIEGSVVCGFISATLNRVYTKTLYAGDLMVLPQGQLHFQYSHGNTTAVTLSSFSSDNPGLQILDFALFANDLPTEVVNKVTNLDELQIVKLKALFGGRG

SEQ ID NO: 40559 - DNA, 1218 bp, Zea mays subsp. mays
  misc_feature (1)..(1218): Ceres Seq. ID no. 12368278
gcacgagaccattacctagaacatcctaatcaaaaaatcgcatcgatcgggcaggcattaattgtacagctttattagctcctgcttctgcttctgcttctgcttcttcttagctggagactagagaaagaagaagacacagtgatcatcggcatagatagtaagtagaagaagagctagcaggaagaagcagcagctagctagctgacccaacgaaatgacgatgagagatgagatcgtcttcttcgacgtggagacgacggctccgtcggcggccgggcccggtcggtggtggctgctggagttcggcgccatcctggtgtgccccaggaagctggtggaggtaggcagctacgacaccctcatccgcccgggcgacctctccgccgtctccaggcgattcacggacgacgtggaggcggccataatggcgtcggcgccgccccttcaaggacgtggccgacaagatattcgacatcctggacggccgcgtttgggctgggcacaacatccagcgtttcgactgcccccgcatccgcgaggccttcgccgacatcgggcgccccgccccggagcccgtcggcgtcatcgactccctcaacgtcctggccgcacacttcggccgccgcgccggagacctcaagatggccaccctcgcgacctacttcggcatcgggaagcagaagcacaggggcctggacgacgcgcgcatgaacctcgaggtgctcaagcactgcgccaccgtcctgctgctggagtccagcctgccggacgtcctctgcgcgcagcagtctcgccgagccgcggtcaccaggaggacgtcgcaggcgcagaccatcaagccgccacctaaacatgctgtgcaccaccacctgcggcccggcggcgtcgtcatgtcgcagacaaagctaccatttaccgctgtaacagctacacctgcacctgcggccgccaccccctgcggcaagaggaatagcctgggcaaggtggtggcgagggccgtgacggcggcgaccactgccccattgagtagcagtagcagcacaagcacaaacactaggcgccccgtgacggcgaccacgcccttccacatgatcctcaggcactccagggccatcctcagatgatgatccatgtttcattcattcattctttctttggatgatccatgatcggatttcgttccattcaattcaattgtacagttccatcgatttg

SEQ ID NO: 40560 - protein, 211 aa, Zea mays subsp. mays
  peptide (1)..(211): Ceres Seq. ID no. 12368279
  misc_feature (4)..(75): NCBI GI NO: 9945064 NR Description: similar to Arabidopsis chromosome BAC genomicssequences
  misc_feature (2)..(78): NCBI GI NO: 15236050 NR Description: hypothetical protein; protein id: At4g39810.1
  misc_feature (4)..(59): NCBI GI NO: 15240840 NR Description: exonuclease-like protein; protein id: At5g07710.1
  misc_feature (4)..(59): NCBI GI NO: 15221225 NR Description: putative exonuclease; protein id: At1g74390
  misc_feature (6)..(102): NCBI GI NO: 37534222 NR Description: putative exonuclease
  misc_feature (4)..(109): NCBI GI NO: 9757860 NR Description: exonuclease-like protein [Arabidopsis thaliana]
  misc_feature (4)..(109): NCBI GI NO: 30697522 NR Description: exonuclease protein family [Arabidopsis thaliana]
MTMRDEIVFFDVETTAPSAAGPGRWWLLEFGAILVCPRKLVEVGSYDTLIRPGDLSAVSRRFTDDVEAAIMASAPPLQGRGRQDIRHPGRPRLGWAQHPAFRLPPHPRGLRRHRAPRPGARRRHRLPQRPGRTLRPPRRRPQDGHPRDLLRHREAEAQGPGRRAHEPRGAQALRHRPAAGVQPAGRPLRAAVSPSRGHQEDVAGADHQAAT

SEQ ID NO: 40561 - protein, 209 aa, Zea mays subsp. mays
  peptide (1)..(209): Ceres Seq. ID no. 12368280
  misc_feature (2)..(73): NCBI GI NO: 9945064 NR Description: similar to Arabidopsis chromosome BAC genomicssequences
  misc_feature (1)..(76): NCBI GI NO: 15236050 NR Description: hypothetical protein; protein id: At4g39810.1
  misc_feature (2)..(57): NCBI GI NO: 15240840 NR Description: exonuclease-like protein; protein id: At5g07710.1
  misc_feature (2)..(57): NCBI GI NO: 15221225 NR Description: putative exonuclease; protein id: At1g74390
  misc_feature (4)..(100): NCBI GI NO: 37534222 NR Description: putative exonuclease
  misc_feature (2)..(107): NCBI GI NO: 9757860 NR Description: exonuclease-like protein [Arabidopsis thaliana]
  misc_feature (2)..(107): NCBI GI NO: 30697522 NR Description: exonuclease protein family [Arabidopsis thaliana]
MRDEIVFFDVETTAPSAAGPGRWWLLEFGAILVCPRKLVEVGSYDTLIRPGDLSAVSRRFTDDVEAAIMASAPPLQGRGRQDIRHPGRPRLGWAQHPAFRLPPHPRGLRRHRAPRPGARRRHRLPQRPGRTLRPPRRRPQDGHPRDLLRHREAEAQGPGRRAHEPRGAQALRHRPAAGVQPAGRPLRAAVSPSRGHQEDVAGADHQAAT

SEQ ID NO: 40562 - protein, 160 aa, Zea mays subsp. mays
  peptide (1)..(160): Ceres Seq. ID no. 12368281
  misc_feature (87)..(146): Pfam Name: Pfam Description:  Equine herpesvirus glycoprotein gp2
  misc_feature (1)..(100): NCBI GI NO: 9945064 NR Description: similar to Arabidopsis chromosome BAC genomicssequences
  misc_feature (1)..(70): NCBI GI NO: 15236050 NR Description: hypothetical protein; protein id: At4g39810.1
  misc_feature (1)..(42): NCBI GI NO: 15240840 NR Description: exonuclease-like protein; protein id: At5g07710.1
  misc_feature (1)..(45): NCBI GI NO: 15221225 NR Description: putative exonuclease; protein id: At1g74390
  misc_feature (1)..(69): NCBI GI NO: 30697522 NR Description: exonuclease protein family [Arabidopsis thaliana]
  misc_feature (1)..(70): NCBI GI NO: 37534222 NR Description: putative exonuclease
  misc_feature (1)..(45): NCBI GI NO: 9757860 NR Description: exonuclease-like protein [Arabidopsis thaliana]
  misc_feature (1)..(45): NCBI GI NO: 37534220 NR Description: putative exonuclease
  misc_feature (87)..(146): NCBI GI NO: 17221114 NR Description: glycoprotein gp2 [Equine herpesvirus 1]
  misc_feature (87)..(146): NCBI GI NO: 17221108 NR Description: glycoprotein gp2 [Equine herpesvirus 1]
MATLATYFGIGKQKHRGLDDARMNLEVLKHCATVLLLESSLPDVLCAQQSRRAAVTRRTSQAQTIKPPPKHAVHHHLRPGGVVMSQTKLPFTAVTATPAPAAATPCGKRNSLGKVVARAVTAATTAPLSSSSSTSTNTRRPVTATTPFHMILRHSRAILR

SEQ ID NO: 40563 - DNA, 1747 bp, Zea mays subsp. mays
  misc_feature (1)..(1747): Ceres Seq. ID no. 13493123
taatcgaaaaacctccacccgccccgtcccgttttgacggccctttctcccctctcctccgcgagcgccgccgcagtagaacccggtggtaacccactgccgcaagcatcccaccgcgccgagctacgcgacggacgcggcgcgcggcccacaacccaaccgcagcggcaacaaccgctctataaagcaatccccccacctaccggctccgcggcctcgctcgcttcgctttcccccaaatccaccgcgggctcgagctcggaggagaggagacgagacgacccaagactttctcacccccctttgcttcctgcgcaattcctgcggcagcgcctttctctctttcaatggacagcgactacgttgctagcctgctcatgggcatgggctcatccgcccctgcgctcgacttcgccgcgctggacgccgggttcctcgaaacgctctgcggcggcggcggcggcctcttcggggtgtccggggtcgccgcgggggccgggtgtggcggcgtgtccccggaggggtcgtcggtgtccgacccggcgtgggcgcgcgccagggacgatgacaatgtcaggaagcgcaaggagccgcccacggggtccgccggcggcaaggaggcctgcccgggcaaggctgcggaggccaagggtccggacgggaagaggtgcagagtgggcggcagcgacagcccggtgaagccgaaggtagaggaggtggcggcgagcgacgcctcggttgaactcaaagcgcagaagaagggcaaggggaagaccgccaagccggcagtcgaaccgcccaaggactacgtccatgtccgggcgcggcgagggcaggcgactgacagccacagcctcgcagagagggttagaagagagaagatcagccagaggatgaagtttctgcaggacctagtgccaggatgcaacaaggtggttggcaaggcactcatgctcgatgagatcataaactacgtccagtcgctgcagcagcaagtcgagttcctgtccatgaagctcgccactgtgaacccacagcttgacttcagcaacctgtcgacactcctacacaaagacatgtaccaaccatgtggcccttcggcaaattcggtctttccactggaaagtgacggtgcagctttcccattctgcgaccaagcggatcttttccacagctttggttcgggttcggctgctatggaggatcagtgctctctaagcctgctagacacggctctgccccacgcggccaacccacagtttgcttttcaaaagcagcagagggacttctgggaggatggcctacagaacgcattgcctaccggtagtgagcaaagacaggaggaggatgggcttttagtacccaactttgatggccagttacatgctgaccagacaaaggttgagttctagtccctggtgctcctcccaaggttgatatttttgtatataggtggggtaccaagacctgtggcaagcaaagctctctctttctctctgtgtccgaagctgaccatcattagagtctaggcctgcgaactgatttcgttccgtgataatgctgcatgtatggcatctcgattcttcccacagagatcatgtgatgtgatcgacctcgagaaattaaaagtagattgtgtactagatatggcgcaaatattacatgcgccatcttctaaagttgtactgattggtatgtaagggcgctgggtggtgttggaacggataccgtgtactgtttgttgctt

SEQ ID NO: 40564 - protein, 354 aa, Zea mays subsp. mays
  peptide (1)..(354): Ceres Seq. ID no. 13493124
  misc_feature (164)..(214): Pfam Name: Pfam Description:  Helix-loop-helix DNA-binding domain
  misc_feature (35)..(354): NCBI GI NO: 29647487 NR Description: OJ1191_A10.7
  misc_feature (23)..(296): NCBI GI NO: 34906952 NR Description: DNA-binding protein-like protein
  misc_feature (1)..(323): NCBI GI NO: 30697769 NR Description: DNA-binding protein -related
  misc_feature (122)..(323): NCBI GI NO: 15221563 NR Description: DNA-binding protein -related
  misc_feature (60)..(266): NCBI GI NO: 22331295 NR Description: bHLH protein [Arabidopsis thaliana]
  misc_feature (122)..(323): NCBI GI NO: 20127044 NR Description: putative bHLH transcription factor
  misc_feature (1)..(276): NCBI GI NO: 15239013 NR Description: bHLH protein family [Arabidopsis thaliana]
  misc_feature (51)..(256): NCBI GI NO: 34898690 NR Description: hypothetical protein
  misc_feature (1)..(276): NCBI GI NO: 20127085 NR Description: putative bHLH transcription factor
  misc_feature (120)..(255): NCBI GI NO: 15231450 NR Description: bHLH protein family [Arabidopsis thaliana]
MDSDYVASLLMGMGSSAPALDFAALDAGFLETLCGGGGGLFGVSGVAAGAGCGGVSPEGSSVSDPAWARARDDDNVRKRKEPPTGSAGGKEACPGKAAEAKGPDGKRCRVGGSDSPVKPKVEEVAASDASVELKAQKKGKGKTAKPAVEPPKDYVHVRARRGQATDSHSLAERVRREKISQRMKFLQDLVPGCNKVVGKALMLDEIINYVQSLQQQVEFLSMKLATVNPQLDFSNLSTLLHKDMYQPCGPSANSVFPLESDGAAFPFCDQADLFHSFGSGSAAMEDQCSLSLLDTALPHAANPQFAFQKQQRDFWEDGLQNALPTGSEQRQEEDGLLVPNFDGQLHADQTKVEF

SEQ ID NO: 40565 - protein, 344 aa, Zea mays subsp. mays
  peptide (1)..(344): Ceres Seq. ID no. 13493125
  misc_feature (154)..(204): Pfam Name: Pfam Description:  Helix-loop-helix DNA-binding domain
  misc_feature (25)..(344): NCBI GI NO: 29647487 NR Description: OJ1191_A10.7
  misc_feature (13)..(286): NCBI GI NO: 34906952 NR Description: DNA-binding protein-like protein
  misc_feature (1)..(313): NCBI GI NO: 30697769 NR Description: DNA-binding protein -related
  misc_feature (112)..(313): NCBI GI NO: 15221563 NR Description: DNA-binding protein -related
  misc_feature (50)..(256): NCBI GI NO: 22331295 NR Description: bHLH protein [Arabidopsis thaliana]
  misc_feature (112)..(313): NCBI GI NO: 20127044 NR Description: putative bHLH transcription factor
  misc_feature (1)..(266): NCBI GI NO: 15239013 NR Description: bHLH protein family [Arabidopsis thaliana]
  misc_feature (41)..(246): NCBI GI NO: 34898690 NR Description: hypothetical protein
  misc_feature (1)..(266): NCBI GI NO: 20127085 NR Description: putative bHLH transcription factor
  misc_feature (110)..(245): NCBI GI NO: 15231450 NR Description: bHLH protein family [Arabidopsis thaliana]
MGMGSSAPALDFAALDAGFLETLCGGGGGLFGVSGVAAGAGCGGVSPEGSSVSDPAWARARDDDNVRKRKEPPTGSAGGKEACPGKAAEAKGPDGKRCRVGGSDSPVKPKVEEVAASDASVELKAQKKGKGKTAKPAVEPPKDYVHVRARRGQATDSHSLAERVRREKISQRMKFLQDLVPGCNKVVGKALMLDEIINYVQSLQQQVEFLSMKLATVNPQLDFSNLSTLLHKDMYQPCGPSANSVFPLESDGAAFPFCDQADLFHSFGSGSAAMEDQCSLSLLDTALPHAANPQFAFQKQQRDFWEDGLQNALPTGSEQRQEEDGLLVPNFDGQLHADQTKVEF

SEQ ID NO: 40566 - protein, 342 aa, Zea mays subsp. mays
  peptide (1)..(342): Ceres Seq. ID no. 13493126
  misc_feature (152)..(202): Pfam Name: Pfam Description:  Helix-loop-helix DNA-binding domain
  misc_feature (23)..(342): NCBI GI NO: 29647487 NR Description: OJ1191_A10.7
  misc_feature (11)..(284): NCBI GI NO: 34906952 NR Description: DNA-binding protein-like protein
  misc_feature (1)..(311): NCBI GI NO: 30697769 NR Description: DNA-binding protein -related
  misc_feature (110)..(311): NCBI GI NO: 15221563 NR Description: DNA-binding protein -related
  misc_feature (48)..(254): NCBI GI NO: 22331295 NR Description: bHLH protein [Arabidopsis thaliana]
  misc_feature (110)..(311): NCBI GI NO: 20127044 NR Description: putative bHLH transcription factor
  misc_feature (1)..(264): NCBI GI NO: 15239013 NR Description: bHLH protein family [Arabidopsis thaliana]
  misc_feature (39)..(244): NCBI GI NO: 34898690 NR Description: hypothetical protein
  misc_feature (1)..(264): NCBI GI NO: 20127085 NR Description: putative bHLH transcription factor
  misc_feature (108)..(243): NCBI GI NO: 15231450 NR Description: bHLH protein family [Arabidopsis thaliana]
MGSSAPALDFAALDAGFLETLCGGGGGLFGVSGVAAGAGCGGVSPEGSSVSDPAWARARDDDNVRKRKEPPTGSAGGKEACPGKAAEAKGPDGKRCRVGGSDSPVKPKVEEVAASDASVELKAQKKGKGKTAKPAVEPPKDYVHVRARRGQATDSHSLAERVRREKISQRMKFLQDLVPGCNKVVGKALMLDEIINYVQSLQQQVEFLSMKLATVNPQLDFSNLSTLLHKDMYQPCGPSANSVFPLESDGAAFPFCDQADLFHSFGSGSAAMEDQCSLSLLDTALPHAANPQFAFQKQQRDFWEDGLQNALPTGSEQRQEEDGLLVPNFDGQLHADQTKVEF

SEQ ID NO: 40567 - DNA, 2001 bp, Zea mays subsp. mays
  misc_feature (1)..(2001): Ceres Seq. ID no. 12368484
gcacgagaccattacctagaacatcctaatcaaaaggaggccccggggatcggtggccaggctgagctcctcccagagtcccagtacgcctccggagtccggatccgcggagccaggctgagctgctcccgtggtctactctccagtacgcggctcggcagggaccgggagcgaggacgagcgtcctgcgtcgacgggatcggcgtgccaggggagcgctgaaatctgcgcttccgtctccggacggccgatgccaggccttgctcgggagaggtagcaaacgaaacatggagctgaggcggctgctgctgcttgcgctcatctgcctgcgtgctccccgtttggcttcggctcagcagccggatgaggcgacggtcatagttaagggctccactaggattgcggaaacggatgacaactacgtctgtgctacaattgattggtggccgccggagaagtgcaactacaatcagtgcccatggggccaggcgtcaattcttaatctggatctggatcacccgtttctggctcaggccattcaagcatttgaccatttgaggattaggctgggaggctccttgcaagaccgagttgtttatgatgtgggaacagaaagtccatgctccccatttacaaatgtatccaatgccttgtttggtttctcagttggttgccttggtatggataggtgggacaaactgaatgacctattcgagagaacaggagcaattgtcacatttggtgtgaatgcactctacgggaggtataatgttcgacgttccatctgggcaggcaaatggaattccactaatgcatatgattttgtaaaatacacaatctcaaagggatacccagttggctcttgggaatttggcaatgagctgagtgggcatggaatcggagcaaaagttgatgctaaactttatggaaaagatgtaattgaatttaaatccatccttcggcaattgtataaggcaccactgtcccagccactcctgttagccccgggagggttctttgatcaacagtggtattctcagctacttgagacttcaggtcatggtgttgttaatgccttatctcaccatgtatataatcttggtggagggaatgatgttcatcttataaggaagatcttagacccaaagtacttggatcgtgctgaagatacttacagagacatgcaacttaccatccaaaggcatggaacatgggcttctgcttgggtcagtgaaagtggcggtgtattcaacaatggtggtcaactggtgtcaaatacattcatcaacagtatctggtatctagatcagcttgggatggcatctaagtacaacacaaaagtgttctgcagacagactctcatcggtggcaactatggactgctcgacacgcaaacttttctgccaaatcctgattactacagcgctctactatggcatcggcttatgggcaatggagttctttcagttgatataaacgcaccgcgtcaaatacgcgcttatgctcattgtaggaaacaacagcaaggcatcacgattctgttgatcaacctgagcaacactactggatacaacgtcactctccagaacgacatcaacgtcagcttgggcaaaagacctgaccttgagaagcgcagttctttcacgcacaggctcaggaaagcagtctcatggctggggaggaaaccagcaagcaacaccaggaggcgggaggagtaccatctgaccgccaaggacggcgatctccagagcaaaacgatgctgctcaacggggccccgttggaacttggagacgctggcagcattccagctatggatccggtgctcgtcgccgttgatttgccggtgcagctagcaccaacatccatcgccttcgtagtcctacccaagtttgaggccaaggcttgttcttgacacatgagctcttgaaatcagtttttttttgtgtgtgccttgaaatgttccatagacctatttcgtgaaagaaatcatacaacgcggc

SEQ ID NO: 40568 - protein, 541 aa, Zea mays subsp. mays
  peptide (1)..(541): Ceres Seq. ID no. 12368485
  misc_feature (26)..(343): Pfam Name: Pfam Description:  Glycosyl hydrolase family 79, N-terminal domain
  misc_feature (1)..(540): NCBI GI NO: 38174813 NR Description: putative heparanase
  misc_feature (6)..(541): NCBI GI NO: 10176717 NR Description: contains similarity to heparanase~gene_id:MXM12.7
  misc_feature (7)..(541): NCBI GI NO: 22327999 NR Description: glycosyl hydrolase family 79
  misc_feature (26)..(541): NCBI GI NO: 9757846 NR Description: contains similarity to heparanase~gene_id:MFB13.2
  misc_feature (22)..(541): NCBI GI NO: 15240869 NR Description: glycosyl hydrolase family 79
  misc_feature (6)..(452): NCBI GI NO: 34393590 NR Description: putative beta-glucuronidase precursor
  misc_feature (463)..(541): NCBI GI NO: 34393590 NR Description: putative beta-glucuronidase precursor
  misc_feature (74)..(541): NCBI GI NO: 24413987 NR Description: contains ESTs AU097236
  misc_feature (1)..(73): NCBI GI NO: 24413987 NR Description: contains ESTs AU097236
  misc_feature (1)..(541): NCBI GI NO: 30692670 NR Description: expressed protein [Arabidopsis thaliana]
MELRRLLLLALICLRAPRLASAQQPDEATVIVKGSTRIAETDDNYVCATIDWWPPEKCNYNQCPWGQASILNLDLDHPFLAQAIQAFDHLRIRLGGSLQDRVVYDVGTESPCSPFTNVSNALFGFSVGCLGMDRWDKLNDLFERTGAIVTFGVNALYGRYNVRRSIWAGKWNSTNAYDFVKYTISKGYPVGSWEFGNELSGHGIGAKVDAKLYGKDVIEFKSILRQLYKAPLSQPLLLAPGGFFDQQWYSQLLETSGHGVVNALSHHVYNLGGGNDVHLIRKILDPKYLDRAEDTYRDMQLTIQRHGTWASAWVSESGGVFNNGGQLVSNTFINSIWYLDQLGMASKYNTKVFCRQTLIGGNYGLLDTQTFLPNPDYYSALLWHRLMGNGVLSVDINAPRQIRAYAHCRKQQQGITILLINLSNTTGYNVTLQNDINVSLGKRPDLEKRSSFTHRLRKAVSWLGRKPASNTRRREEYHLTAKDGDLQSKTMLLNGAPLELGDAGSIPAMDPVLVAVDLPVQLAPTSIAFVVLPKFEAKACS

SEQ ID NO: 40569 - protein, 410 aa, Zea mays subsp. mays
  peptide (1)..(410): Ceres Seq. ID no. 12368486
  misc_feature (1)..(212): Pfam Name: Pfam Description:  Glycosyl hydrolase family 79, N-terminal domain
  misc_feature (1)..(409): NCBI GI NO: 38174813 NR Description: putative heparanase
  misc_feature (1)..(410): NCBI GI NO: 10176717 NR Description: contains similarity to heparanase~gene_id:MXM12.7
  misc_feature (1)..(410): NCBI GI NO: 22327999 NR Description: glycosyl hydrolase family 79
  misc_feature (1)..(410): NCBI GI NO: 9757846 NR Description: contains similarity to heparanase~gene_id:MFB13.2
  misc_feature (1)..(410): NCBI GI NO: 15240869 NR Description: glycosyl hydrolase family 79
  misc_feature (1)..(321): NCBI GI NO: 34393590 NR Description: putative beta-glucuronidase precursor
  misc_feature (332)..(410): NCBI GI NO: 34393590 NR Description: putative beta-glucuronidase precursor
  misc_feature (1)..(410): NCBI GI NO: 24413987 NR Description: contains ESTs AU097236
  misc_feature (1)..(410): NCBI GI NO: 30692670 NR Description: expressed protein [Arabidopsis thaliana]
  misc_feature (1)..(410): NCBI GI NO: 10177640 NR Description: contains similarity to heparanase~gene_id:MGG23.2
MDRWDKLNDLFERTGAIVTFGVNALYGRYNVRRSIWAGKWNSTNAYDFVKYTISKGYPVGSWEFGNELSGHGIGAKVDAKLYGKDVIEFKSILRQLYKAPLSQPLLLAPGGFFDQQWYSQLLETSGHGVVNALSHHVYNLGGGNDVHLIRKILDPKYLDRAEDTYRDMQLTIQRHGTWASAWVSESGGVFNNGGQLVSNTFINSIWYLDQLGMASKYNTKVFCRQTLIGGNYGLLDTQTFLPNPDYYSALLWHRLMGNGVLSVDINAPRQIRAYAHCRKQQQGITILLINLSNTTGYNVTLQNDINVSLGKRPDLEKRSSFTHRLRKAVSWLGRKPASNTRRREEYHLTAKDGDLQSKTMLLNGAPLELGDAGSIPAMDPVLVAVDLPVQLAPTSIAFVVLPKFEAKACS

SEQ ID NO: 40570 - DNA, 483 bp, Zea mays subsp. mays
  misc_feature (1)..(483): Ceres Seq. ID no. 1846912
gggattcattcgcgcacgtcccaggaaatattgcagggaatcaaaatggagacgttgcagtggatcaataccatcgctacaaggaagacgtcgatctcatgaaaagtttgaactttgatgcctaccggttctcaatctcatggtccaggatcttcccggatggcgaagggaaagtcaatccagaaggtgtagcgtattacaataatttgataaactatctgcttcagcaaggcatgactccttacatcaacctttaccactatgatcttcctcttgcgcttgagaagaaatatggagggtggttaagcgcgaagatggcggacttgtttacagactatgctgacttctgttttaagacctacggcgatcgcgtaaagcactggtttacattcaatgagccaaggatagtagcgctacttggctatgacacagggtcaaatcctcctcaaaggtgcacagatgcgctgctggtgggaattcagc

SEQ ID NO: 40571 - protein, 160 aa, Zea mays subsp. mays
  peptide (1)..(160): Ceres Seq. ID no. 1846913
  misc_feature (1)..(152): Pfam Name: Pfam Description:  Glycosyl hydrolase family 1
  misc_feature (1)..(152): NCBI GI NO: 18875458 NR Description: beta-glucosidase [Oryza sativa]
  misc_feature (1)..(152): NCBI GI NO: 1362162 NR Description: beta-glucosidase BGQ60 precursor - barley
  misc_feature (1)..(154): NCBI GI NO: 15229584 NR Description: glycosyl hydrolase family 1; protein id:At3g18080
  misc_feature (1)..(152): NCBI GI NO: 17226270 NR Description: beta-mannosidase enzyme [Lycopersicon esculentum]
  misc_feature (1)..(154): NCBI GI NO: 22331147 NR Description: glycosyl hydrolase family 1; protein id:At3g18070
  misc_feature (1)..(154): NCBI GI NO: 9294062 NR Description: beta-glucosidase [Arabidopsis thaliana]
  misc_feature (1)..(152): NCBI GI NO: 34899014 NR Description: putative non-cyanogenic beta-glucosidase precursor
  misc_feature (1)..(151): NCBI GI NO: 3820531 NR Description: beta-glucosidase [Pinus contorta]
  misc_feature (1)..(152): NCBI GI NO: 22327832 NR Description: glycosyl hydrolase family 1; protein id:At5g54570
  misc_feature (27)..(152): NCBI GI NO: 34914546 NR Description: putative beta-glucosidase
DSFAHVPGNIAGNQNGDVAVDQYHRYKEDVDLMKSLNFDAYRFSISWSRIFPDGEGKVNPEGVAYYNNLINYLLQQGMTPYINLYHYDLPLALEKKYGGWLSAKMADLFTDYADFCFKTYGDRVKHWFTFNEPRIVALLGYDTGSNPPQRCTDALLVGIQ

SEQ ID NO: 40572 - protein, 128 aa, Zea mays subsp. mays
  peptide (1)..(128): Ceres Seq. ID no. 1846914
  misc_feature (1)..(120): Pfam Name: Pfam Description:  Glycosyl hydrolase family 1
  misc_feature (1)..(120): NCBI GI NO: 18875458 NR Description: beta-glucosidase [Oryza sativa]
  misc_feature (1)..(120): NCBI GI NO: 1362162 NR Description: beta-glucosidase BGQ60 precursor - barley
  misc_feature (1)..(122): NCBI GI NO: 15229584 NR Description: glycosyl hydrolase family 1; protein id:At3g18080
  misc_feature (1)..(120): NCBI GI NO: 17226270 NR Description: beta-mannosidase enzyme [Lycopersicon esculentum]
  misc_feature (1)..(122): NCBI GI NO: 22331147 NR Description: glycosyl hydrolase family 1; protein id:At3g18070
  misc_feature (1)..(122): NCBI GI NO: 9294062 NR Description: beta-glucosidase [Arabidopsis thaliana]
  misc_feature (1)..(120): NCBI GI NO: 34899014 NR Description: putative non-cyanogenic beta-glucosidase precursor
  misc_feature (1)..(119): NCBI GI NO: 3820531 NR Description: beta-glucosidase [Pinus contorta]
  misc_feature (1)..(120): NCBI GI NO: 22327832 NR Description: glycosyl hydrolase family 1; protein id:At5g54570
  misc_feature (1)..(120): NCBI GI NO: 34914546 NR Description: putative beta-glucosidase
MKSLNFDAYRFSISWSRIFPDGEGKVNPEGVAYYNNLINYLLQQGMTPYINLYHYDLPLALEKKYGGWLSAKMADLFTDYADFCFKTYGDRVKHWFTFNEPRIVALLGYDTGSNPPQRCTDALLVGIQ

SEQ ID NO: 40573 - protein, 83 aa, Zea mays subsp. mays
  peptide (1)..(83): Ceres Seq. ID no. 1846915
  misc_feature (1)..(75): Pfam Name: Pfam Description:  Glycosyl hydrolase family 1
  misc_feature (1)..(75): NCBI GI NO: 18875458 NR Description: beta-glucosidase [Oryza sativa]
  misc_feature (1)..(75): NCBI GI NO: 1362162 NR Description: beta-glucosidase BGQ60 precursor - barley
  misc_feature (1)..(77): NCBI GI NO: 15229584 NR Description: glycosyl hydrolase family 1; protein id:At3g18080
  misc_feature (1)..(75): NCBI GI NO: 17226270 NR Description: beta-mannosidase enzyme [Lycopersicon esculentum]
  misc_feature (1)..(77): NCBI GI NO: 22331147 NR Description: glycosyl hydrolase family 1; protein id:At3g18070
  misc_feature (1)..(77): NCBI GI NO: 9294062 NR Description: beta-glucosidase [Arabidopsis thaliana]
  misc_feature (1)..(75): NCBI GI NO: 34899014 NR Description: putative non-cyanogenic beta-glucosidase precursor
  misc_feature (1)..(74): NCBI GI NO: 3820531 NR Description: beta-glucosidase [Pinus contorta]
  misc_feature (1)..(75): NCBI GI NO: 22327832 NR Description: glycosyl hydrolase family 1; protein id:At5g54570
  misc_feature (1)..(75): NCBI GI NO: 34914546 NR Description: putative beta-glucosidase
MTPYINLYHYDLPLALEKKYGGWLSAKMADLFTDYADFCFKTYGDRVKHWFTFNEPRIVALLGYDTGSNPPQRCTDALLVGIQ

SEQ ID NO: 40574 - DNA, 692 bp, Zea mays subsp. mays
  misc_feature (1)..(692): Ceres Seq. ID no. 12375668
gagaactcacattgcggttgcggacctcagcttgcccactacagagctaaccaaaagagatgaaagggagcctttcccacgagctcgagacggggctcccagccgccgacgtgtgggaggtctacggaggcctccttgttggggacttgattccccagctgcttcctcaagttttctcaaaggttgaactcgtagagggagacggtggagttggaacggttctgctcgtcactctcccgccagggactcctggatcagaggctttcaaagagaagttcgtcaaggtcgatgacgaaaaccgcgtcaaggagtgcctggtaaccgagggaagcttttttgaccgtggcttcaagaaatacctggtgcgaatcgagatcataggagaagatcgggaggcatccaccataagatcaactatcgagtacgaagttgaccaggagcatgcaggcaacccccctgttgccagtagcagtggcttggctactatcgctaaggccatcgcagaatatatcatcaagcagaagaagaaaggtcctcctgagtcctgagtaattaagctcccatgtaatcaactccgggaagaaaggatattatattatatcgtgtatatgtttgatcagtgaacaactgaagttaatttgtgtctaccaatgaacaaatagaatacggtaacgagcgaatggttgccattt

SEQ ID NO: 40575 - protein, 162 aa, Zea mays subsp. mays
  peptide (1)..(162): Ceres Seq. ID no. 12375669
  misc_feature (3)..(152): Pfam Name: Pfam Description:  Pathogenesis-related protein Bet v I family
  misc_feature (1)..(161): NCBI GI NO: 38347062 NR Description: OSJNBa0006A01.3
  misc_feature (1)..(155): NCBI GI NO: 38347061 NR Description: OSJNBa0006A01.2
  misc_feature (3)..(152): NCBI GI NO: 4376219 NR Description: pollen allergen, Betv1 [Betula pendula]
  misc_feature (3)..(152): NCBI GI NO: 1168701 NR Description: Major pollen allergen Bet v 1-B (Bet v I-B)
  misc_feature (3)..(152): NCBI GI NO: 1168702 NR Description: Major pollen allergen Bet v 1-C (Bet v I-C)
  misc_feature (3)..(152): NCBI GI NO: 1168708 NR Description: Major pollen allergen Bet v 1-K (Bet v I-K)
  misc_feature (3)..(152): NCBI GI NO: 1321724 NR Description: major allergen Bet v 1 [Betula pendula]
  misc_feature (3)..(152): NCBI GI NO: 4376221 NR Description: pollen allergen, Betv1 [Betula pendula]
  misc_feature (3)..(152): NCBI GI NO: 4006961 NR Description: pollen allergen Betv1, isoform at59
  misc_feature (3)..(152): NCBI GI NO: 1168710 NR Description: Major pollen allergen Bet v 1-M/N (Bet v I-M/N)
MKGSLSHELETGLPAADVWEVYGGLLVGDLIPQLLPQVFSKVELVEGDGGVGTVLLVTLPPGTPGSEAFKEKFVKVDDENRVKECLVTEGSFFDRGFKKYLVRIEIIGEDREASTIRSTIEYEVDQEHAGNPPVASSSGLATIAKAIAEYIIKQKKKGPPES

SEQ ID NO: 40576 - DNA, 1842 bp, Zea mays subsp. mays
  misc_feature (1)..(1842): Ceres Seq. ID no. 12375598
atccacacatgcagctccaagcatcggtacggcactgagcatcggtgaggcaggcgacgcgcgccgcgcgagagaggcgcctcgcctggggagacagggagggtggccgagcccgagatggccgccgcgagggaggaggacgaggcggcacggccgctgcttctgctgccgcggacggcgcaggaggaccagaagtggtggaggcggtgggcgcgcgaggccgggtgggtggggtacctggccctgcccatggtggtggtgaacctgtcgcagtacgccgtccaggtgtcgtccaacatgatggtggggcacctccccggcgtgctcccgctctcctccgccgccatcgccacctccctcgccaacgtctccgggttcagcctcctgatcggaatggcaagtgcactggagacgctatgcggccaggcctacggtgcgaagcagtaccataagctaggcctagacacctacagagcggtcgtcaccctcctggtggtctgcgtccccctctcgctcctctgggtgttcatggacaagatcctggtcctcataggccaggaccctctcatctcgcaaggcgccgggaggtacatggtctggctgatcccggggctcttcgccaacgcggtgatccagccgctcaccaagttcctgcagacgcagagcctcatctacccgctgctgctgtcgtccgcggcgacggcggcggtccacgtccccctgtgctacgtgatggtgttcaagaccgggctcgggtacacgggcgccgccctgaccataagcatatcgtactggctgaacgtggccatgctcgtcggatacatcgccttctccagctcttgcaaggagacgcgcgcgcgcccgacggtcgaggtcttcaggggagtcgacgcgttcctgcgtctcgccctgccttctgcgctcatgatgtgtcttgaatggtggtcgtttgagctccttactctcatgtcagggcttctacccaacccagagctgcagacctcagtgctttcgatctgtctcacgagtgtaacattactcttcactataccttttggccttggagctgctggaagcacgcgagtggcaaatgagctgggcgctgggaaccctgacggagctcgatcagcagtccgcgtggtgctgtccatggcggggatcgacgcggtcgtcgtgagcggaagccttctggcggcccggcgcctcgtgggcatcgcgtacagcagcgaggaggaggtcatatctgcggtcgccgccatggttcctctggtctgcatcaccgccataactgactgcctacaaggaatcctctcaggcgtcgcccgcgggtgcgggtggcagcacctgggcgcgtacgtgaacctcggctcgttctacctgctggggatcccgatggcgatcctcctcggctttgtgctgcgcatggggtcgagggggctctggatgggcatcgtctgcggctccctgtcgcagaccacgctcatgtccgccatcacgttcttcaccgactggaacaagatggctgagaaggctagagagagggtgttcagcgacaagcagccacaagagccggggccatgatttgtacgccgactagcggcagctgcacatttttccagaccggttttgcaggggatcggaaggcgtttgcttgtcattccgtcgcattcacgaggagggagggggtcatgcctccctcctgcaaagtttctcacaaggcaaatgggttcttgctttgaacttcgccttcctacgtttgatttttgtatcatgtaaagtggagaggaacatggaacgaacaaattggacctcatatatgactaacaaggcgaaaatcatctc

SEQ ID NO: 40577 - protein, 487 aa, Zea mays subsp. mays
  peptide (1)..(487): Ceres Seq. ID no. 12375599
  misc_feature (266)..(429): Pfam Name: Pfam Description:  MatE
  misc_feature (78)..(473): NCBI GI NO: 34911248 NR Description: P0445E10.22
  misc_feature (8)..(484): NCBI GI NO: 15223961 NR Description: hypothetical protein; protein id: At1g71140.1
  misc_feature (9)..(476): NCBI GI NO: 15218070 NR Description: hypothetical protein; protein id: At1g15170.1
  misc_feature (42)..(476): NCBI GI NO: 22329577 NR Description: hypothetical protein; protein id: At1g15150
  misc_feature (9)..(465): NCBI GI NO: 25511632 NR Description: F9L1.11 protein - Arabidopsis thaliana
  misc_feature (42)..(476): NCBI GI NO: 15218068 NR Description: hypothetical protein; protein id: At1g15160.1
  misc_feature (13)..(480): NCBI GI NO: 13430684 NR Description: putative MATE efflux family protein
  misc_feature (13)..(480): NCBI GI NO: 30697399 NR Description: MATE efflux protein - related
  misc_feature (42)..(465): NCBI GI NO: 25518548 NR Description: hypothetical protein F9L1
  misc_feature (6)..(476): NCBI GI NO: 18394206 NR Description: expressed protein; protein id: At1g15180
MAAAREEDEAARPLLLLPRTAQEDQKWWRRWAREAGWVGYLALPMVVVNLSQYAVQVSSNMMVGHLPGVLPLSSAAIATSLANVSGFSLLIGMASALETLCGQAYGAKQYHKLGLDTYRAVVTLLVVCVPLSLLWVFMDKILVLIGQDPLISQGAGRYMVWLIPGLFANAVIQPLTKFLQTQSLIYPLLLSSAATAAVHVPLCYVMVFKTGLGYTGAALTISISYWLNVAMLVGYIAFSSSCKETRARPTVEVFRGVDAFLRLALPSALMMCLEWWSFELLTLMSGLLPNPELQTSVLSICLTSVTLLFTIPFGLGAAGSTRVANELGAGNPDGARSAVRVVLSMAGIDAVVVSGSLLAARRLVGIAYSSEEEVISAVAAMVPLVCITAITDCLQGILSGVARGCGWQHLGAYVNLGSFYLLGIPMAILLGFVLRMGSRGLWMGIVCGSLSQTTLMSAITFFTDWNKMAEKARERVFSDKQPQEPGP

SEQ ID NO: 40578 - protein, 443 aa, Zea mays subsp. mays
  peptide (1)..(443): Ceres Seq. ID no. 12375600
  misc_feature (222)..(385): Pfam Name: Pfam Description:  MatE
  misc_feature (34)..(429): NCBI GI NO: 34911248 NR Description: P0445E10.22
  misc_feature (1)..(440): NCBI GI NO: 15223961 NR Description: hypothetical protein; protein id: At1g71140.1
  misc_feature (1)..(432): NCBI GI NO: 15218070 NR Description: hypothetical protein; protein id: At1g15170.1
  misc_feature (1)..(432): NCBI GI NO: 22329577 NR Description: hypothetical protein; protein id: At1g15150
  misc_feature (1)..(421): NCBI GI NO: 25511632 NR Description: F9L1.11 protein - Arabidopsis thaliana
  misc_feature (1)..(432): NCBI GI NO: 15218068 NR Description: hypothetical protein; protein id: At1g15160.1
  misc_feature (1)..(436): NCBI GI NO: 13430684 NR Description: putative MATE efflux family protein
  misc_feature (1)..(436): NCBI GI NO: 30697399 NR Description: MATE efflux protein - related
  misc_feature (1)..(421): NCBI GI NO: 25518548 NR Description: hypothetical protein F9L1
  misc_feature (1)..(432): NCBI GI NO: 18394206 NR Description: expressed protein; protein id: At1g15180
MVVVNLSQYAVQVSSNMMVGHLPGVLPLSSAAIATSLANVSGFSLLIGMASALETLCGQAYGAKQYHKLGLDTYRAVVTLLVVCVPLSLLWVFMDKILVLIGQDPLISQGAGRYMVWLIPGLFANAVIQPLTKFLQTQSLIYPLLLSSAATAAVHVPLCYVMVFKTGLGYTGAALTISISYWLNVAMLVGYIAFSSSCKETRARPTVEVFRGVDAFLRLALPSALMMCLEWWSFELLTLMSGLLPNPELQTSVLSICLTSVTLLFTIPFGLGAAGSTRVANELGAGNPDGARSAVRVVLSMAGIDAVVVSGSLLAARRLVGIAYSSEEEVISAVAAMVPLVCITAITDCLQGILSGVARGCGWQHLGAYVNLGSFYLLGIPMAILLGFVLRMGSRGLWMGIVCGSLSQTTLMSAITFFTDWNKMAEKARERVFSDKQPQEPGP

SEQ ID NO: 40579 - protein, 427 aa, Zea mays subsp. mays
  peptide (1)..(427): Ceres Seq. ID no. 12375601
  misc_feature (206)..(369): Pfam Name: Pfam Description:  MatE
  misc_feature (18)..(413): NCBI GI NO: 34911248 NR Description: P0445E10.22
  misc_feature (1)..(424): NCBI GI NO: 15223961 NR Description: hypothetical protein; protein id: At1g71140.1
  misc_feature (1)..(416): NCBI GI NO: 15218070 NR Description: hypothetical protein; protein id: At1g15170.1
  misc_feature (1)..(416): NCBI GI NO: 22329577 NR Description: hypothetical protein; protein id: At1g15150
  misc_feature (1)..(405): NCBI GI NO: 25511632 NR Description: F9L1.11 protein - Arabidopsis thaliana
  misc_feature (1)..(416): NCBI GI NO: 15218068 NR Description: hypothetical protein; protein id: At1g15160.1
  misc_feature (1)..(420): NCBI GI NO: 13430684 NR Description: putative MATE efflux family protein
  misc_feature (1)..(420): NCBI GI NO: 30697399 NR Description: MATE efflux protein - related
  misc_feature (1)..(405): NCBI GI NO: 25518548 NR Description: hypothetical protein F9L1
  misc_feature (1)..(416): NCBI GI NO: 18394206 NR Description: expressed protein; protein id: At1g15180
MMVGHLPGVLPLSSAAIATSLANVSGFSLLIGMASALETLCGQAYGAKQYHKLGLDTYRAVVTLLVVCVPLSLLWVFMDKILVLIGQDPLISQGAGRYMVWLIPGLFANAVIQPLTKFLQTQSLIYPLLLSSAATAAVHVPLCYVMVFKTGLGYTGAALTISISYWLNVAMLVGYIAFSSSCKETRARPTVEVFRGVDAFLRLALPSALMMCLEWWSFELLTLMSGLLPNPELQTSVLSICLTSVTLLFTIPFGLGAAGSTRVANELGAGNPDGARSAVRVVLSMAGIDAVVVSGSLLAARRLVGIAYSSEEEVISAVAAMVPLVCITAITDCLQGILSGVARGCGWQHLGAYVNLGSFYLLGIPMAILLGFVLRMGSRGLWMGIVCGSLSQTTLMSAITFFTDWNKMAEKARERVFSDKQPQEPGP

SEQ ID NO: 40580 - DNA, 1102 bp, Zea mays subsp. mays
  misc_feature (1)..(1102): Ceres Seq. ID no. 12435527
gcacgagaccattacctagaacatcctaatcgaaaaaatggattattggatggatgaaggtctgggcgggctgggtgtggacgagacgacgctggtgtccgcgctggggcggtggcggcgggagccggagaagcgggcgcagttccggcgcggcttcccgggcttcttctcgtcgagcgccggcgccgggatcgagcggtgcgaggacgagtacctgctgcacctcaaggcggagttcgcgcgcttcaaggacgcggcggtgctgtgggcgatgcacccgtgggagcgcgacgcgcgctgggcgcaccacgtgctgcacaaggcgcacccgccgcacatcctcgtcgaggtcgcctgcacgcgcgccgccgacgacctgctcggcgcccgccgcgcgtaccaggcgctctaccaccgctcgctcgaggaggacgtcgcgtaccgcgtcagggacgccaacgccagtctgctgttggggctggtgagcgcgtaccggtacgagggcgcgcgcgtgaacgaggacctcgccactgaggaagccaaggcgctggccgccgccgttagggccgcgccggcggcggcgaccaagctagtgcagaacgagcaggtggtgcgggtgctggttaccagaagcaagccccatctcggggccaccttcagggtctacatggagctgcacggcaagccgcttgaagaggaactgcccgccgagccgtgcctgcgagaggccgtcaggtgcttggactcgccgcccaagtacttcagcgaggtgatccacagggcgttcagcgacgacgcggacaggtaggccaaggcggcgctcacccgcgtcctcgtgtcccgcgccgacacggacatggaggatatcaaggacgcctacaccaggcagtacgggaccaagctcgccgacgccgtggccaagaacacccacggccactacaaggaagcgctgctcgccatcatcggcaagtgaaaggaacccagggtgtcgtgtggccacatgaataataacacgttctttcaaatgaaacagttaaataagattgtacccatctctgcggaatagataaaagaagagcattctgttgtcatgttatgactg

SEQ ID NO: 40581 - protein, 256 aa, Zea mays subsp. mays
  peptide (1)..(256): Ceres Seq. ID no. 12435528
  misc_feature (82)..(148): Pfam Name: Pfam Description:  Annexin
  misc_feature (1)..(256): NCBI GI NO: 15224946 NR Description: putative annexin; protein id: At2g38750
  misc_feature (7)..(256): NCBI GI NO: 7484723 NR Description: fiber annexin - upland cotton
  misc_feature (7)..(256): NCBI GI NO: 15214410 NR Description: annexin [Gossypium hirsutum]
  misc_feature (7)..(256): NCBI GI NO: 33357398 NR Description: Chain A, Annexin Gh1 From Cotton
  misc_feature (11)..(256): NCBI GI NO: 7441506 NR Description: annexin P33 - maize
  misc_feature (11)..(256): NCBI GI NO: 22326753 NR Description: annexin-like protein; protein id: At5g12380.1
  misc_feature (11)..(256): NCBI GI NO: 6272285 NR Description: annexin p33 [Zea mays]
  misc_feature (1)..(256): NCBI GI NO: 7441511 NR Description: annexin 2 - upland cotton (fragment)
  misc_feature (11)..(256): NCBI GI NO: 1621539 NR Description: annexin-like protein
  misc_feature (11)..(256): NCBI GI NO: 21264397 NR Description: Annexin-like protein RJ4
MDYWMDEGLGGLGVDETTLVSALGRWRREPEKRAQFRRGFPGFFSSSAGAGIERCEDEYLLHLKAEFARFKDAAVLWAMHPWERDARWAHHVLHKAHPPHILVEVACTRAADDLLGARRAYQALYHRSLEEDVAYRVRDANASLLLGLVSAYRYEGARVNEDLATEEAKALAAAVRAAPAAATKLVQNEQVVRVLVTRSKPHLGATFRVYMELHGKPLEEELPAEPCLREAVRCLDSPPKYFSEVIHRAFSDDADR

SEQ ID NO: 40582 - protein, 252 aa, Zea mays subsp. mays
  peptide (1)..(252): Ceres Seq. ID no. 12435529
  misc_feature (78)..(144): Pfam Name: Pfam Description:  Annexin
  misc_feature (1)..(252): NCBI GI NO: 15224946 NR Description: putative annexin; protein id: At2g38750
  misc_feature (3)..(252): NCBI GI NO: 7484723 NR Description: fiber annexin - upland cotton
  misc_feature (3)..(252): NCBI GI NO: 15214410 NR Description: annexin [Gossypium hirsutum]
  misc_feature (3)..(252): NCBI GI NO: 33357398 NR Description: Chain A, Annexin Gh1 From Cotton
  misc_feature (7)..(252): NCBI GI NO: 7441506 NR Description: annexin P33 - maize
  misc_feature (7)..(252): NCBI GI NO: 22326753 NR Description: annexin-like protein; protein id: At5g12380.1
  misc_feature (7)..(252): NCBI GI NO: 6272285 NR Description: annexin p33 [Zea mays]
  misc_feature (1)..(252): NCBI GI NO: 7441511 NR Description: annexin 2 - upland cotton (fragment)
  misc_feature (7)..(252): NCBI GI NO: 1621539 NR Description: annexin-like protein
  misc_feature (7)..(252): NCBI GI NO: 21264397 NR Description: Annexin-like protein RJ4
MDEGLGGLGVDETTLVSALGRWRREPEKRAQFRRGFPGFFSSSAGAGIERCEDEYLLHLKAEFARFKDAAVLWAMHPWERDARWAHHVLHKAHPPHILVEVACTRAADDLLGARRAYQALYHRSLEEDVAYRVRDANASLLLGLVSAYRYEGARVNEDLATEEAKALAAAVRAAPAAATKLVQNEQVVRVLVTRSKPHLGATFRVYMELHGKPLEEELPAEPCLREAVRCLDSPPKYFSEVIHRAFSDDADR

SEQ ID NO: 40583 - protein, 178 aa, Zea mays subsp. mays
  peptide (1)..(178): Ceres Seq. ID no. 12435530
  misc_feature (4)..(70): Pfam Name: Pfam Description:  Annexin
  misc_feature (1)..(178): NCBI GI NO: 15224946 NR Description: putative annexin; protein id: At2g38750
  misc_feature (1)..(178): NCBI GI NO: 7484723 NR Description: fiber annexin - upland cotton
  misc_feature (1)..(178): NCBI GI NO: 15214410 NR Description: annexin [Gossypium hirsutum]
  misc_feature (1)..(178): NCBI GI NO: 33357398 NR Description: Chain A, Annexin Gh1 From Cotton
  misc_feature (1)..(178): NCBI GI NO: 7441506 NR Description: annexin P33 - maize
  misc_feature (1)..(178): NCBI GI NO: 22326753 NR Description: annexin-like protein; protein id: At5g12380.1
  misc_feature (1)..(178): NCBI GI NO: 6272285 NR Description: annexin p33 [Zea mays]
  misc_feature (1)..(178): NCBI GI NO: 7441511 NR Description: annexin 2 - upland cotton (fragment)
  misc_feature (1)..(178): NCBI GI NO: 1621539 NR Description: annexin-like protein
  misc_feature (1)..(178): NCBI GI NO: 21264397 NR Description: Annexin-like protein RJ4
MHPWERDARWAHHVLHKAHPPHILVEVACTRAADDLLGARRAYQALYHRSLEEDVAYRVRDANASLLLGLVSAYRYEGARVNEDLATEEAKALAAAVRAAPAAATKLVQNEQVVRVLVTRSKPHLGATFRVYMELHGKPLEEELPAEPCLREAVRCLDSPPKYFSEVIHRAFSDDADR

SEQ ID NO: 40584 - DNA, 1253 bp, Zea mays subsp. mays
  misc_feature (1)..(1253): Ceres Seq. ID no. 12360598
gcacgagaccattacctagaacatcctaatcgaaaaagaaagctgaaagcctgagcctgactaccgacgagtgacgagccatggagctccgcgagctgggcggtacgggtctccgcgtcagcaccgtcggctttggtgcctccccgcttggcaacgttttcggggacgtgccccgcgacaccgctcgcgccgccgtccgccgcgcgctcgacctcggcatcaacttcttcgatacctcgccgtactacggtggcacgatatcggagtcagtcctcggagattgcctccgccacgcggccgttccgcgggaccgagtcatcgtcgccaccaagtgcggccgctacaaagacgagggtttcgacttctccgccaaccgtgtgacacgcagcatagacgagagcctcgcccgactggggctggactacgtcgacatcctccacgctcatgacatcgagttcacccatctcgaacagattgtgaatgagacaattcccgcactccagaagatcaaggagaatgggaaggcacggttcattggcatcaccgggttgcctctcagcatctacccttatgtcctcgaccgtgtagcaccaggctcggtggacgtgattctatcttattgtcactacgggatcaatgacacctcccttgttgatctgctcccctacttgaagagcaaaggtgttggggttatcagtgcttcgcccctctccatgggtcttttaacagataatgggccaccggagtggcaccctgcaccagaagaacttaagtcagcatgcaaggctgcagcagatcactgtagaaagaaggggaaaagcattacgaagctagctatgcagtacagcttaatgaacaatgaaatctcgacagttcttgttggaatgaactctttggaacaggtggaggagaatgtggcggctgcactggagttgtcaacatcaggcatcgatgatgaacttctgcgtgaagttgaagcaattcttgagcctgtgaagaatctgacatggcctagcggcatccaacaagcctgacggccagaagcagctttgcctaactggagaagctggcatgatgggcgtatcactgctgttcgatgcagtcaattgtacacaccagcatcattggctgctgattgcaaaatttgcaatgcccgtatggtcattgatggaaggggactgttgggctttgtggtaatttagacatgtcgaataaacgcgcaacgcgagcaatgaaagatcgatgctgaaccg

SEQ ID NO: 40585 - protein, 317 aa, Zea mays subsp. mays
  peptide (1)..(317): Ceres Seq. ID no. 12360599
  misc_feature (1)..(316): NCBI GI NO: 15235040 NR Description: putative protein; protein id: At4g33670
  misc_feature (1)..(317): NCBI GI NO: 30267886 NR Description: L-galactose dehydrogenase [Malus x domestica]
  misc_feature (1)..(316): NCBI GI NO: 27728731 NR Description: galactose dehydrogenase [Actinidia deliciosa]
  misc_feature (1)..(310): NCBI GI NO: 29349022 NR Description: putative oxidoreductase
  misc_feature (1)..(316): NCBI GI NO: 32470782 NR Description: putative oxidoreductase-possibly Aldo/ketoreductase
  misc_feature (1)..(315): NCBI GI NO: 31201147 NR Description: ENSANGP00000008370 [Anopheles gambiae]
  misc_feature (1)..(310): NCBI GI NO: 24646155 NR Description: CG18547-PA [Drosophila melanogaster]
  misc_feature (1)..(317): NCBI GI NO: 39594041 NR Description: Hypothetical protein CBG16615
  misc_feature (1)..(312): NCBI GI NO: 24646159 NR Description: CG3397-PA [Drosophila melanogaster]
  misc_feature (1)..(317): NCBI GI NO: 17553316 NR Description: Aldo keto reductase family
MELRELGGTGLRVSTVGFGASPLGNVFGDVPRDTARAAVRRALDLGINFFDTSPYYGGTISESVLGDCLRHAAVPRDRVIVATKCGRYKDEGFDFSANRVTRSIDESLARLGLDYVDILHAHDIEFTHLEQIVNETIPALQKIKENGKARFIGITGLPLSIYPYVLDRVAPGSVDVILSYCHYGINDTSLVDLLPYLKSKGVGVISASPLSMGLLTDNGPPEWHPAPEELKSACKAAADHCRKKGKSITKLAMQYSLMNNEISTVLVGMNSLEQVEENVAAALELSTSGIDDELLREVEAILEPVKNLTWPSGIQQA

SEQ ID NO: 40586 - DNA, 443 bp, Zea mays subsp. mays
  misc_feature (1)..(443): Ceres Seq. ID no. 5760569
  misc_feature (94)..(94): n is a, c, t, g, unknown, or other
agcgacccaggcgtcacggcgtgatgcagttcctccgaggcagcggcggcggggcggtgggttcccgggggttgcgtgggaggtgttgcggcgnmactdmtctaagaagcggtccgtggacgtgaggcggatcaaccccaaggtgcccaaggaggaggccgtcgccatttccggccgactcctccagatcctctccgaccatgggcccctcaccgtcggcaacacctggaaccacgccaaggatgctggcatcgctggcctgaacagcaagacgcacatgaagatcctgctgaaatggatgacggggagaaatgtcgtgaagctgacctgcgtgcacgtgggcaacgcgaagaagttcctctactccccgtccactgaaagcagcagcagcagcgccggcgcatcaccgtcatccacatcggcctcgcagtgacagtcagtcg

SEQ ID NO: 40587 - protein, 143 aa, Zea mays subsp. mays
  peptide (1)..(143): Ceres Seq. ID no. 5760570
  misc_feature (18)..(143): NCBI GI NO: 27573361 NR Description: unknown protein
  misc_feature (28)..(136): NCBI GI NO: 18410491 NR Description: expressed protein; protein id: At1g73940
  misc_feature (28)..(131): NCBI GI NO: 15239880 NR Description: putative protein; protein id: At5g49410
  misc_feature (28)..(131): NCBI GI NO: 21594042 NR Description: unknown [Arabidopsis thaliana]
  misc_feature (31)..(122): NCBI GI NO: 38637563 NR Description: unknown protein
  misc_feature (31)..(31): Xaa is any aa, unknown or other
  misc_feature (32)..(32): Xaa is any aa, unknown or other
  misc_feature (33)..(33): Xaa is any aa, unknown or other
ATQASRRDAVPPRQRRRGGGFPGVAWEVLRXXXSKKRSVDVRRINPKVPKEEAVAISGRLLQILSDHGPLTVGNTWNHAKDAGIAGLNSKTHMKILLKWMTGRNVVKLTCVHVGNAKKFLYSPSTESSSSSAGASPSSTSASQ

SEQ ID NO: 40588 - DNA, 1657 bp, Zea mays subsp. mays; identical to SEQ ID NO: 29111
  misc_feature (1)..(1657): Ceres Seq. ID no. 12548275

SEQ ID NO: 40589 - protein, 465 aa, Zea mays subsp. mays; identical to SEQ ID NO: 29112
  peptide (1)..(465): Ceres Seq. ID no. 12548276
  misc_feature (66)..(270): Pfam Name: Pfam Description:  Elongation factor Tu GTP binding domain
  misc_feature (1)..(465): NCBI GI NO: 17225494 NR Description: translational elongation factor Tu [Oryza sativa]
  misc_feature (1)..(465): NCBI GI NO: 6525065 NR Description: chloroplast translational elongation factor Tu
  misc_feature (1)..(465): NCBI GI NO: 459241 NR Description: chloroplast elongation factor TuB(EF-TuB)
  misc_feature (3)..(465): NCBI GI NO: 12830555 NR Description: chloroplast translational elongation factor Tu
  misc_feature (1)..(465): NCBI GI NO: 1169494 NR Description: ELONGATION FACTOR TU, CHLOROPLAST PRECURSOR
  misc_feature (1)..(465): NCBI GI NO: 486827 NR Description: translation elongation factor EF-Tu
  misc_feature (1)..(465): NCBI GI NO: 2494261 NR Description: Elongation factor Tu, chloroplast precursor
  misc_feature (1)..(465): NCBI GI NO: 6015084 NR Description: ELONGATION FACTOR TU, CHLOROPLAST PRECURSOR
  misc_feature (55)..(465): NCBI GI NO: 218312 NR Description: chloroplast elongation factor TuB (EF-TuB)
  misc_feature (4)..(465): NCBI GI NO: 729409 NR Description: ELONGATION FACTOR TU, CHLOROPLAST PRECURSOR

SEQ ID NO: 40590 - protein, 376 aa, Zea mays subsp. mays; identical to SEQ ID NO: 29113
  peptide (1)..(376): Ceres Seq. ID no. 12548277
  misc_feature (1)..(181): Pfam Name: Pfam Description:  Elongation factor Tu GTP binding domain
  misc_feature (1)..(376): NCBI GI NO: 17225494 NR Description: translational elongation factor Tu [Oryza sativa]
  misc_feature (1)..(376): NCBI GI NO: 6525065 NR Description: chloroplast translational elongation factor Tu
  misc_feature (1)..(376): NCBI GI NO: 459241 NR Description: chloroplast elongation factor TuB(EF-TuB)
  misc_feature (1)..(376): NCBI GI NO: 12830555 NR Description: chloroplast translational elongation factor Tu
  misc_feature (1)..(376): NCBI GI NO: 1169494 NR Description: ELONGATION FACTOR TU, CHLOROPLAST PRECURSOR
  misc_feature (1)..(376): NCBI GI NO: 486827 NR Description: translation elongation factor EF-Tu
  misc_feature (1)..(376): NCBI GI NO: 2494261 NR Description: Elongation factor Tu, chloroplast precursor
  misc_feature (1)..(376): NCBI GI NO: 6015084 NR Description: ELONGATION FACTOR TU, CHLOROPLAST PRECURSOR
  misc_feature (1)..(376): NCBI GI NO: 218312 NR Description: chloroplast elongation factor TuB (EF-TuB)
  misc_feature (1)..(376): NCBI GI NO: 729409 NR Description: ELONGATION FACTOR TU, CHLOROPLAST PRECURSOR

SEQ ID NO: 40591 - protein, 318 aa, Zea mays subsp. mays; identical to SEQ ID NO: 29114
  peptide (1)..(318): Ceres Seq. ID no. 12548278
  misc_feature (1)..(123): Pfam Name: Pfam Description:  Elongation factor Tu GTP binding domain
  misc_feature (1)..(318): NCBI GI NO: 17225494 NR Description: translational elongation factor Tu [Oryza sativa]
  misc_feature (1)..(318): NCBI GI NO: 6525065 NR Description: chloroplast translational elongation factor Tu
  misc_feature (1)..(318): NCBI GI NO: 459241 NR Description: chloroplast elongation factor TuB(EF-TuB)
  misc_feature (1)..(318): NCBI GI NO: 12830555 NR Description: chloroplast translational elongation factor Tu
  misc_feature (1)..(318): NCBI GI NO: 1169494 NR Description: ELONGATION FACTOR TU, CHLOROPLAST PRECURSOR
  misc_feature (1)..(318): NCBI GI NO: 486827 NR Description: translation elongation factor EF-Tu
  misc_feature (1)..(318): NCBI GI NO: 2494261 NR Description: Elongation factor Tu, chloroplast precursor
  misc_feature (1)..(318): NCBI GI NO: 6015084 NR Description: ELONGATION FACTOR TU, CHLOROPLAST PRECURSOR
  misc_feature (1)..(318): NCBI GI NO: 218312 NR Description: chloroplast elongation factor TuB (EF-TuB)
  misc_feature (1)..(318): NCBI GI NO: 729409 NR Description: ELONGATION FACTOR TU, CHLOROPLAST PRECURSOR

SEQ ID NO: 40592 - DNA, 1540 bp, Zea mays subsp. mays
  misc_feature (1)..(1540): Ceres Seq. ID no. 12418818
gcacgagaccattacctagaacatcctaatcgaaaactttttcgaccaaccttcgtctccagactcgtccaccctataaattgtctcgccagatcattccaatccggcaactcctgctctgcctgagcctgagcgtaggcggctaccagagagaagggtaggcggcgccggcggcgggagcaatacaagagcggtaaatccaagagagatcagagcctcggagggaaacagaagcgcacagagcatggagagcccgatctcgaggactaacctgaattgcatcagcctggcggacccgaacgtccagaaatcagtggcgctcctcaagcaggcatgcctggattcaggcttcttctatgttgtggatcatgggataagccaagagttcatggatgaagtttttgcccagagcaagaagttctttgaccttcctcatagtgagaaaatgaagcttctccgagacgagaagaatagagggtacacacccatgctagatgaaattcttgatcctgaaaatcaagttaatggtgactacaaggaaggatattatattggagttgaggtacctgcagatgatccagaagcaaacaggccattttatggtccaaatcagtggccttctaaagaagtactaccaaaatggagagaagtgatggagcaatatcacagggaggcattgatagtagcaaaatcagtcgcaaggatcatcgctcttgctctagatctagacgtggacttcttcgatagacctgaaatgcttggcgagtccatagccacgctaaggctcctgcactacgaaggtggacaagaaacaggtaaggtgtcagatcctgcaaagggtgtttacggagcgggcgcccattcagactacggcctgataactctcctggcaaccgatgatgtagttgggctccaaatatgcaaggacaagaacgctcagcctcaactgtgggaatacgtagctccgttgaaaggcggatttatcgtcaaccttggcgacatgctcgaaaggtggagtaacggcgttttcaggtcaaccttacatcgagtggtcctagatgggcgagaacgctactcgatagcctacttcgtggaaccaagccacgactgcgtggtggagtgcctgccgacctgcaagtccgaatcaaatcctccaaagttccctccgatcacctgctccgcgtacctgtcccagcgctacaaggacactcacgcggatctgaaatcctacgacgacagcaaggcctgatcagaggactgccctctcctctctctgtctcagcgatcagtacgtacgacgtgtatcctgcaataacactgggtggagggcggcagtaccagtgtaccacagtatcagtataggtatagagagttctgttggtgccaccgtgccaccgtccatgtgttcatgtaagatgacgagaagaatcaagaacgggggccggcgttgaggtccccggccttaatctaggccttgttgttgctgtcgtgttgtgaggttcaatccccgagcttatcctttggtgctgttgagaggtcc

SEQ ID NO: 40593 - protein, 334 aa, Zea mays subsp. mays
  peptide (1)..(334): Ceres Seq. ID no. 12418819
  misc_feature (176)..(285): Pfam Name: II Pfam Description: 2OG-Fe
  misc_feature (8)..(329): NCBI GI NO: 15219523 NR Description: hyoscyamine 6-dioxygenase hydroxylase, putative
  misc_feature (128)..(334): NCBI GI NO: 34906368 NR Description: unnamed protein product
  misc_feature (30)..(94): NCBI GI NO: 34906368 NR Description: unnamed protein product
  misc_feature (1)..(305): NCBI GI NO: 15231442 NR Description: putative protein; protein id: At3g46490.1
  misc_feature (129)..(329): NCBI GI NO: 15231441 NR Description: putative protein; protein id: At3g46480.1
  misc_feature (1)..(94): NCBI GI NO: 15231441 NR Description: putative protein; protein id: At3g46480.1
  misc_feature (141)..(305): NCBI GI NO: 15231443 NR Description: putative protein; protein id: At3g46500.1
  misc_feature (1)..(126): NCBI GI NO: 15231443 NR Description: putative protein; protein id: At3g46500.1
  misc_feature (10)..(324): NCBI GI NO: 7594580 NR Description: hypothetical protein [Arabidopsis thaliana]
  misc_feature (1)..(323): NCBI GI NO: 37536200 NR Description: putative gibberellin 20-oxidase
MESPISRTNLNCISLADPNVQKSVALLKQACLDSGFFYVVDHGISQEFMDEVFAQSKKFFDLPHSEKMKLLRDEKNRGYTPMLDEILDPENQVNGDYKEGYYIGVEVPADDPEANRPFYGPNQWPSKEVLPKWREVMEQYHREALIVAKSVARIIALALDLDVDFFDRPEMLGESIATLRLLHYEGGQETGKVSDPAKGVYGAGAHSDYGLITLLATDDVVGLQICKDKNAQPQLWEYVAPLKGGFIVNLGDMLERWSNGVFRSTLHRVVLDGRERYSIAYFVEPSHDCVVECLPTCKSESNPPKFPPITCSAYLSQRYKDTHADLKSYDDSKA

SEQ ID NO: 40594 - protein, 286 aa, Zea mays subsp. mays
  peptide (1)..(286): Ceres Seq. ID no. 12418820
  misc_feature (128)..(237): Pfam Name: II Pfam Description: 2OG-Fe
  misc_feature (1)..(281): NCBI GI NO: 15219523 NR Description: hyoscyamine 6-dioxygenase hydroxylase, putative
  misc_feature (80)..(286): NCBI GI NO: 34906368 NR Description: unnamed protein product
  misc_feature (1)..(46): NCBI GI NO: 34906368 NR Description: unnamed protein product
  misc_feature (1)..(257): NCBI GI NO: 15231442 NR Description: putative protein; protein id: At3g46490.1
  misc_feature (81)..(281): NCBI GI NO: 15231441 NR Description: putative protein; protein id: At3g46480.1
  misc_feature (1)..(46): NCBI GI NO: 15231441 NR Description: putative protein; protein id: At3g46480.1
  misc_feature (93)..(257): NCBI GI NO: 15231443 NR Description: putative protein; protein id: At3g46500.1
  misc_feature (1)..(78): NCBI GI NO: 15231443 NR Description: putative protein; protein id: At3g46500.1
  misc_feature (1)..(276): NCBI GI NO: 7594580 NR Description: hypothetical protein [Arabidopsis thaliana]
  misc_feature (1)..(275): NCBI GI NO: 37536200 NR Description: putative gibberellin 20-oxidase
MDEVFAQSKKFFDLPHSEKMKLLRDEKNRGYTPMLDEILDPENQVNGDYKEGYYIGVEVPADDPEANRPFYGPNQWPSKEVLPKWREVMEQYHREALIVAKSVARIIALALDLDVDFFDRPEMLGESIATLRLLHYEGGQETGKVSDPAKGVYGAGAHSDYGLITLLATDDVVGLQICKDKNAQPQLWEYVAPLKGGFIVNLGDMLERWSNGVFRSTLHRVVLDGRERYSIAYFVEPSHDCVVECLPTCKSESNPPKFPPITCSAYLSQRYKDTHADLKSYDDSKA

SEQ ID NO: 40595 - protein, 267 aa, Zea mays subsp. mays
  peptide (1)..(267): Ceres Seq. ID no. 12418821
  misc_feature (109)..(218): Pfam Name: II Pfam Description: 2OG-Fe
  misc_feature (1)..(262): NCBI GI NO: 15219523 NR Description: hyoscyamine 6-dioxygenase hydroxylase, putative
  misc_feature (61)..(267): NCBI GI NO: 34906368 NR Description: unnamed protein product
  misc_feature (1)..(27): NCBI GI NO: 34906368 NR Description: unnamed protein product
  misc_feature (1)..(238): NCBI GI NO: 15231442 NR Description: putative protein; protein id: At3g46490.1
  misc_feature (62)..(262): NCBI GI NO: 15231441 NR Description: putative protein; protein id: At3g46480.1
  misc_feature (1)..(27): NCBI GI NO: 15231441 NR Description: putative protein; protein id: At3g46480.1
  misc_feature (74)..(238): NCBI GI NO: 15231443 NR Description: putative protein; protein id: At3g46500.1
  misc_feature (1)..(59): NCBI GI NO: 15231443 NR Description: putative protein; protein id: At3g46500.1
  misc_feature (1)..(257): NCBI GI NO: 7594580 NR Description: hypothetical protein [Arabidopsis thaliana]
  misc_feature (1)..(256): NCBI GI NO: 37536200 NR Description: putative gibberellin 20-oxidase
MKLLRDEKNRGYTPMLDEILDPENQVNGDYKEGYYIGVEVPADDPEANRPFYGPNQWPSKEVLPKWREVMEQYHREALIVAKSVARIIALALDLDVDFFDRPEMLGESIATLRLLHYEGGQETGKVSDPAKGVYGAGAHSDYGLITLLATDDVVGLQICKDKNAQPQLWEYVAPLKGGFIVNLGDMLERWSNGVFRSTLHRVVLDGRERYSIAYFVEPSHDCVVECLPTCKSESNPPKFPPITCSAYLSQRYKDTHADLKSYDDSKA

SEQ ID NO: 40596 - DNA, 1593 bp, Zea mays subsp. mays
  misc_feature (1)..(1593): Ceres Seq. ID no. 12359106
cttccctccccctccctgctcggtgctcgcacacgctggcgcggcttgcccccacgctgcgctcccaccaccaccactatataatccccgatcgcctcacgcacacgcaccgacccaccggccgacgaggggcgaccgccgcaacacaaatccacacgcccgccgccaccgccgccatacggacccactcctccttgccctggtgcgagcaggcttcggcagcaaaccccgcaggctgctcccggacgagggagaacgcgcggggctgggctagccgctagtcaggggaccgggggcggaggcagcgaggaggtacgtatggacaagtatgaggcggtgcgggacatcgggtcggggaacttcggggtggcgcggctgatgcgcaaccgcgagactcgagagctcgtcgccgtcaagtgcatcgagcgtggccaccggattgacgagaatgtgtacagggagatcatcaaccaccgctcgctgcgccatcccaacattattcgcttcaaggaggtgatacttacaccaacacatcttatgattctgatggagtttgcagcaggtggagagctttttgatcggatctgtgatcgtgggcggtttagtgaggatgaggcccggtatttctttcagcagttgatctgtggagtgagctattgccattacatgcaaatatgccatagagatctgaagctggagaagttctcttggatggcagcccagctccacggcttaagatctgcgattttggctattccaagtcatcagtgttgcattcaagacccaaatcagcagtaggaacgccagcatatattgcacctgaggtgctatcccgtcgcgagtatgatggaaagcttgcagacgtatggtcctgtggggtgactctttacgtcatgcttgtgggagcatacccatttgaagacccagatgaccccaagaatatacgcaagaccattcagcaaataatgcaagtgcaatacaagataccagatcatgtccacatatctacggaatgccagcaacttattgcccgtatctttgttgccaatccaatgaggagaatcacaatgaaggaaataaagagccatccatggtttttgaagaacctaccacgggaactcacggagactgcacaaggcatgtactacaggagggataacagggtcccttcttattcagaccaaacgtcggaagaaatcatgaagatagttcaagatgcaaggaccatgccgaaatcatccagatcaggctatgggtggagcagtgagtattcggatgaagaagaagagaaggaagaggaacacagaccagaggagcatgaggaagaggaagatgaatacgataggagggtgaaggaggtccatgcaagcggagaactccgtatggacgctcttcacatatgaaagctagtggaagagaaagttgcatgtagataactgggttgttgcggatctgaaggatccagtgggatgtatgcagttttggcttgagaatttgcttctgtttgtcaattttcatgtaacataatttaatacaccgagacaacagactaccatgttcttatattggtaaatatgaagcatgtaccttctg

SEQ ID NO: 40597 - protein, 169 aa, Zea mays subsp. mays
  peptide (1)..(169): Ceres Seq. ID no. 12359107
  misc_feature (1)..(68): Pfam Name: Pfam Description:  Protein kinase domain
  misc_feature (1)..(164): NCBI GI NO: 19568098 NR Description: osmotic stress-activated protein kinase
  misc_feature (1)..(164): NCBI GI NO: 1362051 NR Description: protein kinase SPK-3 (EC 2.7.1.-) - soybean
  misc_feature (1)..(162): NCBI GI NO: 2129803 NR Description: probable serine/threonine-specific protein kinase
  misc_feature (1)..(164): NCBI GI NO: 1362026 NR Description: probable serine/threonine-specific protein kinase
  misc_feature (1)..(162): NCBI GI NO: 7434329 NR Description: protein kinase PK1 (EC 2
  misc_feature (1)..(164): NCBI GI NO: 15220251 NR Description: Ser/Thr kinase; protein id: At1g10940
  misc_feature (1)..(164): NCBI GI NO: 1161254 NR Description: protein kinase [Glycine max]
  misc_feature (1)..(161): NCBI GI NO: 15242858 NR Description: serine/threonine-protein kinase
  misc_feature (1)..(161): NCBI GI NO: 21593536 NR Description: serine/threonine-protein kinase
  misc_feature (1)..(119): NCBI GI NO: 29164823 NR Description: abcisic acid-inducible protein kinanase
MLVGAYPFEDPDDPKNIRKTIQQIMQVQYKIPDHVHISTECQQLIARIFVANPMRRITMKEIKSHPWFLKNLPRELTETAQGMYYRRDNRVPSYSDQTSEEIMKIVQDARTMPKSSRSGYGWSSEYSDEEEEKEEEHRPEEHEEEEDEYDRRVKEVHASGELRMDALHI

SEQ ID NO: 40598 - protein, 159 aa, Zea mays subsp. mays
  peptide (1)..(159): Ceres Seq. ID no. 12359108
  misc_feature (4)..(127): Pfam Name: Pfam Description:  Protein kinase domain
  misc_feature (1)..(127): NCBI GI NO: 19568098 NR Description: osmotic stress-activated protein kinase
  misc_feature (1)..(127): NCBI GI NO: 1362051 NR Description: protein kinase SPK-3 (EC 2.7.1.-) - soybean
  misc_feature (1)..(127): NCBI GI NO: 2129803 NR Description: probable serine/threonine-specific protein kinase
  misc_feature (1)..(127): NCBI GI NO: 1362026 NR Description: probable serine/threonine-specific protein kinase
  misc_feature (1)..(127): NCBI GI NO: 7434329 NR Description: protein kinase PK1 (EC 2
  misc_feature (1)..(127): NCBI GI NO: 15220251 NR Description: Ser/Thr kinase; protein id: At1g10940
  misc_feature (1)..(127): NCBI GI NO: 1161254 NR Description: protein kinase [Glycine max]
  misc_feature (1)..(127): NCBI GI NO: 15242858 NR Description: serine/threonine-protein kinase
  misc_feature (1)..(127): NCBI GI NO: 21593536 NR Description: serine/threonine-protein kinase
  misc_feature (1)..(127): NCBI GI NO: 29164823 NR Description: abcisic acid-inducible protein kinanase
MDKYEAVRDIGSGNFGVARLMRNRETRELVAVKCIERGHRIDENVYREIINHRSLRHPNIIRFKEVILTPTHLMILMEFAAGGELFDRICDRGRFSEDEARYFFQQLICGVSYCHYMQICHRDLKLEKFSWMAAQLHGLRSAILAIPSHQCCIQDPNQQ

SEQ ID NO: 40599 - protein, 145 aa, Zea mays subsp. mays
  peptide (1)..(145): Ceres Seq. ID no. 12359109
  misc_feature (1)..(140): NCBI GI NO: 19568098 NR Description: osmotic stress-activated protein kinase
  misc_feature (1)..(140): NCBI GI NO: 1362051 NR Description: protein kinase SPK-3 (EC 2.7.1.-) - soybean
  misc_feature (1)..(138): NCBI GI NO: 2129803 NR Description: probable serine/threonine-specific protein kinase
  misc_feature (1)..(140): NCBI GI NO: 1362026 NR Description: probable serine/threonine-specific protein kinase
  misc_feature (1)..(138): NCBI GI NO: 7434329 NR Description: protein kinase PK1 (EC 2
  misc_feature (1)..(140): NCBI GI NO: 15220251 NR Description: Ser/Thr kinase; protein id: At1g10940
  misc_feature (1)..(140): NCBI GI NO: 1161254 NR Description: protein kinase [Glycine max]
  misc_feature (1)..(137): NCBI GI NO: 15242858 NR Description: serine/threonine-protein kinase
  misc_feature (1)..(137): NCBI GI NO: 21593536 NR Description: serine/threonine-protein kinase
  misc_feature (1)..(95): NCBI GI NO: 29164823 NR Description: abcisic acid-inducible protein kinanase
MQVQYKIPDHVHISTECQQLIARIFVANPMRRITMKEIKSHPWFLKNLPRELTETAQGMYYRRDNRVPSYSDQTSEEIMKIVQDARTMPKSSRSGYGWSSEYSDEEEEKEEEHRPEEHEEEEDEYDRRVKEVHASGELRMDALHI

SEQ ID NO: 40600 - DNA, 1526 bp, Zea mays subsp. mays
  misc_feature (1)..(1526): Ceres Seq. ID no. 13492010
atccaaatggggcttatcgccaccatccaatcgaagctctggaacctcctccactcccagcttccgccgacgctcgcttcagctgctgctttccttcccatccttcaacaggtgcaatttgcatttcccatggagctcactgattaataacgtgtgagctgaacttgcttttctgtggacaatttggaacttcagtactagtttccgataggattcagggagaaatgatctcttttaacaatttattttggagctcccttcagccttctttcaagttttacagaaagtgcctgacaaactgcccatattttgcactgaccatgcattcaactacaaagcccttgggttcatctatgccggtaaagagggcgcatttgaagccacatgccgcagacatcaagaggaacccccatgtacatgagctttacaaattggtttaccgacttccggagaaccttagctggctgttggcaccaccagaaattcctaaaagacctgcctcaaagaagaaaaaacaaaaagacgaaatagtggccggtaacagctttggtgtgatcttggagtgggagggagttgttgtggatgatgatgatccagacttggagccccgggtttggtatgttctatcactagaagaggggaagtctttccctccagatgcattgctgaagaaaatcgagggaatgagaactgaccaggctattgcagaagtcttatgttggtcagaagatccagcagaaatccaaaggttggcaacacacaaggaggttatatatcaaaaacttcaaggtggatactaccagctgcgaccacatgtgcttgatttcttgaacacccttgtgggttttgacattccaatagcaattgcagctcctcgctcaaggaagagccttgaagaagggatcaaaactgttggtctgcaaggctacttcgatgctatagttgcattggaggacttctgcttagggaaacctgatggtgagatgtttgaagtcgcagcggagcaacttggtctggaaccagatgcctgtgttgtgtttggtaactcaaacttgacgacggaatctgcacataacgctgggatgaggtgtgtggcagttgcaggccgacaccctgcctatgagctccaatcagcaaaccatgttgtgagatggcttgatcagctctctattgttgacttgcagaggcttgctaatggtgaagttattggtcgcaggggtagagaatctgacatggatatggaaattgtgattgaggaatgatgatgtttctgcaaaaatgacgcactaatatattgttgtgcttataatctgatacacctaagtaatgcattacattttgtaaacaggccaagcagtgcaagttccggactaaggatactccggagtttgcattaccttcctggtttgcttgtgatgaattggaattcgcctaaaactcttttagtcattagagttggaagtgaagaaactcccacccgtaacttgtgtatgtacagtatatatatgtattacctattcttccct

SEQ ID NO: 40601 - protein, 345 aa, Zea mays subsp. mays
  peptide (1)..(345): Ceres Seq. ID no. 13492011
  misc_feature (193)..(295): Pfam Name: Pfam Description:  haloacid dehalogenase-like hydrolase
  misc_feature (11)..(345): NCBI GI NO: 18542168 NR Description: putative genetic modifier [Zea mays]
  misc_feature (1)..(345): NCBI GI NO: 10444400 NR Description: genetic modifier [Zea mays]
  misc_feature (1)..(345): NCBI GI NO: 38345597 NR Description: OSJNBb0012E24.15
  misc_feature (82)..(340): NCBI GI NO: 15234236 NR Description: haloacid dehalogenase-like hydrolase family
  misc_feature (107)..(324): NCBI GI NO: 18399067 NR Description: haloacid dehalogenase-like hydrolase family
  misc_feature (107)..(324): NCBI GI NO: 21592870 NR Description: unknown [Arabidopsis thaliana]
  misc_feature (107)..(324): NCBI GI NO: 14532506 NR Description: AT3g10970/F9F8_21 [Arabidopsis thaliana]
  misc_feature (157)..(324): NCBI GI NO: 6016697 NR Description: unknown protein [Arabidopsis thaliana]
  misc_feature (111)..(312): NCBI GI NO: 21672855 NR Description: hydrolase, haloacid dehalogenase-like family
  misc_feature (148)..(322): NCBI GI NO: 22297853 NR Description: ORF_ID:tlr0310~hypothetical protein
MISFNNLFWSSLQPSFKFYRKCLTNCPYFALTMHSTTKPLGSSMPVKRAHLKPHAADIKRNPHVHELYKLVYRLPENLSWLLAPPEIPKRPASKKKKQKDEIVAGNSFGVILEWEGVVVDDDDPDLEPRVWYVLSLEEGKSFPPDALLKKIEGMRTDQAIAEVLCWSEDPAEIQRLATHKEVIYQKLQGGYYQLRPHVLDFLNTLVGFDIPIAIAAPRSRKSLEEGIKTVGLQGYFDAIVALEDFCLGKPDGEMFEVAAEQLGLEPDACVVFGNSNLTTESAHNAGMRCVAVAGRHPAYELQSANHVVRWLDQLSIVDLQRLANGEVIGRRGRESDMDMEIVIEE

SEQ ID NO: 40602 - protein, 313 aa, Zea mays subsp. mays
  peptide (1)..(313): Ceres Seq. ID no. 13492012
  misc_feature (161)..(263): Pfam Name: Pfam Description:  haloacid dehalogenase-like hydrolase
  misc_feature (1)..(313): NCBI GI NO: 18542168 NR Description: putative genetic modifier [Zea mays]
  misc_feature (1)..(313): NCBI GI NO: 10444400 NR Description: genetic modifier [Zea mays]
  misc_feature (1)..(313): NCBI GI NO: 38345597 NR Description: OSJNBb0012E24.15
  misc_feature (50)..(308): NCBI GI NO: 15234236 NR Description: haloacid dehalogenase-like hydrolase family
  misc_feature (75)..(292): NCBI GI NO: 18399067 NR Description: haloacid dehalogenase-like hydrolase family
  misc_feature (75)..(292): NCBI GI NO: 21592870 NR Description: unknown [Arabidopsis thaliana]
  misc_feature (75)..(292): NCBI GI NO: 14532506 NR Description: AT3g10970/F9F8_21 [Arabidopsis thaliana]
  misc_feature (125)..(292): NCBI GI NO: 6016697 NR Description: unknown protein [Arabidopsis thaliana]
  misc_feature (79)..(280): NCBI GI NO: 21672855 NR Description: hydrolase, haloacid dehalogenase-like family
  misc_feature (116)..(290): NCBI GI NO: 22297853 NR Description: ORF_ID:tlr0310~hypothetical protein
MHSTTKPLGSSMPVKRAHLKPHAADIKRNPHVHELYKLVYRLPENLSWLLAPPEIPKRPASKKKKQKDEIVAGNSFGVILEWEGVVVDDDDPDLEPRVWYVLSLEEGKSFPPDALLKKIEGMRTDQAIAEVLCWSEDPAEIQRLATHKEVIYQKLQGGYYQLRPHVLDFLNTLVGFDIPIAIAAPRSRKSLEEGIKTVGLQGYFDAIVALEDFCLGKPDGEMFEVAAEQLGLEPDACVVFGNSNLTTESAHNAGMRCVAVAGRHPAYELQSANHVVRWLDQLSIVDLQRLANGEVIGRRGRESDMDMEIVIEE

SEQ ID NO: 40603 - protein, 302 aa, Zea mays subsp. mays
  peptide (1)..(302): Ceres Seq. ID no. 13492013
  misc_feature (150)..(252): Pfam Name: Pfam Description:  haloacid dehalogenase-like hydrolase
  misc_feature (1)..(302): NCBI GI NO: 18542168 NR Description: putative genetic modifier [Zea mays]
  misc_feature (1)..(302): NCBI GI NO: 10444400 NR Description: genetic modifier [Zea mays]
  misc_feature (1)..(302): NCBI GI NO: 38345597 NR Description: OSJNBb0012E24.15
  misc_feature (39)..(297): NCBI GI NO: 15234236 NR Description: haloacid dehalogenase-like hydrolase family
  misc_feature (64)..(281): NCBI GI NO: 18399067 NR Description: haloacid dehalogenase-like hydrolase family
  misc_feature (64)..(281): NCBI GI NO: 21592870 NR Description: unknown [Arabidopsis thaliana]
  misc_feature (64)..(281): NCBI GI NO: 14532506 NR Description: AT3g10970/F9F8_21 [Arabidopsis thaliana]
  misc_feature (114)..(281): NCBI GI NO: 6016697 NR Description: unknown protein [Arabidopsis thaliana]
  misc_feature (68)..(269): NCBI GI NO: 21672855 NR Description: hydrolase, haloacid dehalogenase-like family
  misc_feature (105)..(279): NCBI GI NO: 22297853 NR Description: ORF_ID:tlr0310~hypothetical protein
MPVKRAHLKPHAADIKRNPHVHELYKLVYRLPENLSWLLAPPEIPKRPASKKKKQKDEIVAGNSFGVILEWEGVVVDDDDPDLEPRVWYVLSLEEGKSFPPDALLKKIEGMRTDQAIAEVLCWSEDPAEIQRLATHKEVIYQKLQGGYYQLRPHVLDFLNTLVGFDIPIAIAAPRSRKSLEEGIKTVGLQGYFDAIVALEDFCLGKPDGEMFEVAAEQLGLEPDACVVFGNSNLTTESAHNAGMRCVAVAGRHPAYELQSANHVVRWLDQLSIVDLQRLANGEVIGRRGRESDMDMEIVIEE

SEQ ID NO: 40604 - DNA, 1058 bp, Zea mays subsp. mays
  misc_feature (1)..(1058): Ceres Seq. ID no. 12360632
aaaccctcacatacagatacagtacagttcacacactctcctgtctcctatccagccaccgaacgaagctagccaagatgtctcagttgctgcacctgccggacctcgcggcgccgcggaccaggatgggctcggcgctgccggcgggggcccgcgtcaagcagggggaggcggggacggcgagggggaggcgggtgctcaggctcgccgaccccgtgcggcgggagtgccgggtgccggtcccgctgccgccgccgccgctcctcgccgcggggaggcgcggagacgacgacgacgacgacggcgtcgacgaggataggcagaggtactacctcaacctgggctacgcgatccggacgctcagggaggagctccccgacgtgctctgcaaggaccacagcttcgacatctacagagaagacattgtcttcagagaccctctgaacacattcaagggcctgggaaactacaagaggctcttctgggcgctgcgcctcaccggccgggtcttcttcagggcgtcgtgggttgaagtggtcagcatatggcagcccgccgagaacagcatcctgcttcgctggaccgcccacggcgtccctcgggtgccctggggctggtgggacgccgcccacgcccgcttcgacggcgcgtccgtgtacaagctcgacaggaacggcaagatctacgagcacacggtgcacaacgtcgctacgaacccgccggccaagtccaaggtcctgccggtccacgagctggtcaggtcactcggttgcccctccactgccgaacccacctgttctgacttctgaagctttcgtcgtcgcagtgccatcttattattcgagaattaattatctgggagaaggataggcgtgggtttaacatggtacctccgaattttgcgttttttcagtgtgatttgatagcacacaaagttactgagtactcttggagttcagtgtgatttgatagcacacaaagttactgagtactcttggagttgtatatatgtatgtacagtgatagtttataaaataaaggcctgtcatttaaggtgt

SEQ ID NO: 40605 - protein, 268 aa, Zea mays subsp. mays
  peptide (1)..(268): Ceres Seq. ID no. 12360633
  misc_feature (26)..(238): NCBI GI NO: 34904098 NR Description: unnamed protein product
  misc_feature (97)..(268): NCBI GI NO: 18407008 NR Description: Expressed protein; protein id: At2g46220
  misc_feature (97)..(230): NCBI GI NO: 25408977 NR Description: hypothetical protein At2g46220
  misc_feature (30)..(267): NCBI GI NO: 38347356 NR Description: OSJNBa0070C17.17
  misc_feature (84)..(264): NCBI GI NO: 18412399 NR Description: expressed protein; protein id: At1g79510
  misc_feature (103)..(264): NCBI GI NO: 15219209 NR Description: unknown protein; protein id: At1g16320
  misc_feature (111)..(230): NCBI GI NO: 23126421 NR Description: hypothetical protein [Nostoc punctiforme]
  misc_feature (117)..(230): NCBI GI NO: 23040676 NR Description: hypothetical protein
  misc_feature (111)..(230): NCBI GI NO: 17228448 NR Description: hypothetical protein [Nostoc sp. PCC 7120]
TLTYRYSTVHTLSCLLSSHRTKLAKMSQLLHLPDLAAPRTRMGSALPAGARVKQGEAGTARGRRVLRLADPVRRECRVPVPLPPPPLLAAGRRGDDDDDDGVDEDRQRYYLNLGYAIRTLREELPDVLCKDHSFDIYREDIVFRDPLNTFKGLGNYKRLFWALRLTGRVFFRASWVEVVSIWQPAENSILLRWTAHGVPRVPWGWWDAAHARFDGASVYKLDRNGKIYEHTVHNVATNPPAKSKVLPVHELVRSLGCPSTAEPTCSDF

SEQ ID NO: 40606 - protein, 243 aa, Zea mays subsp. mays
  peptide (1)..(243): Ceres Seq. ID no. 12360634
  misc_feature (1)..(213): NCBI GI NO: 34904098 NR Description: unnamed protein product
  misc_feature (72)..(243): NCBI GI NO: 18407008 NR Description: Expressed protein; protein id: At2g46220
  misc_feature (72)..(205): NCBI GI NO: 25408977 NR Description: hypothetical protein At2g46220
  misc_feature (5)..(242): NCBI GI NO: 38347356 NR Description: OSJNBa0070C17.17
  misc_feature (59)..(239): NCBI GI NO: 18412399 NR Description: expressed protein; protein id: At1g79510
  misc_feature (78)..(239): NCBI GI NO: 15219209 NR Description: unknown protein; protein id: At1g16320
  misc_feature (86)..(205): NCBI GI NO: 23126421 NR Description: hypothetical protein [Nostoc punctiforme]
  misc_feature (92)..(205): NCBI GI NO: 23040676 NR Description: hypothetical protein
  misc_feature (86)..(205): NCBI GI NO: 17228448 NR Description: hypothetical protein [Nostoc sp. PCC 7120]
MSQLLHLPDLAAPRTRMGSALPAGARVKQGEAGTARGRRVLRLADPVRRECRVPVPLPPPPLLAAGRRGDDDDDDGVDEDRQRYYLNLGYAIRTLREELPDVLCKDHSFDIYREDIVFRDPLNTFKGLGNYKRLFWALRLTGRVFFRASWVEVVSIWQPAENSILLRWTAHGVPRVPWGWWDAAHARFDGASVYKLDRNGKIYEHTVHNVATNPPAKSKVLPVHELVRSLGCPSTAEPTCSDF

SEQ ID NO: 40607 - protein, 227 aa, Zea mays subsp. mays
  peptide (1)..(227): Ceres Seq. ID no. 12360635
  misc_feature (1)..(197): NCBI GI NO: 34904098 NR Description: unnamed protein product
  misc_feature (56)..(227): NCBI GI NO: 18407008 NR Description: Expressed protein; protein id: At2g46220
  misc_feature (56)..(189): NCBI GI NO: 25408977 NR Description: hypothetical protein At2g46220
  misc_feature (1)..(226): NCBI GI NO: 38347356 NR Description: OSJNBa0070C17.17
  misc_feature (43)..(223): NCBI GI NO: 18412399 NR Description: expressed protein; protein id: At1g79510
  misc_feature (62)..(223): NCBI GI NO: 15219209 NR Description: unknown protein; protein id: At1g16320
  misc_feature (70)..(189): NCBI GI NO: 23126421 NR Description: hypothetical protein [Nostoc punctiforme]
  misc_feature (76)..(189): NCBI GI NO: 23040676 NR Description: hypothetical protein
  misc_feature (70)..(189): NCBI GI NO: 17228448 NR Description: hypothetical protein [Nostoc sp. PCC 7120]
MGSALPAGARVKQGEAGTARGRRVLRLADPVRRECRVPVPLPPPPLLAAGRRGDDDDDDGVDEDRQRYYLNLGYAIRTLREELPDVLCKDHSFDIYREDIVFRDPLNTFKGLGNYKRLFWALRLTGRVFFRASWVEVVSIWQPAENSILLRWTAHGVPRVPWGWWDAAHARFDGASVYKLDRNGKIYEHTVHNVATNPPAKSKVLPVHELVRSLGCPSTAEPTCSDF

SEQ ID NO: 40608 - DNA, 1737 bp, Zea mays subsp. mays
  misc_feature (1)..(1737): Ceres Seq. ID no. 12435333
gcaaaagcgcacagttcccgttccccctccgacccgttcattccgcttggttttctcctcctccgtcctcttcgctccccgtcagaccatccctgtgaggctgtgacgcaaccgggcgccggcggtctctcctgcaccacagggcacgccgcctcccgcgcacgtgttctcctcttccggggattcagatctggggattgctattctgtccgtctgactccgtccgtcccgaggcgcggcgaggggagcgagatgggttacattggccaccacggcgtcgccacgctgcggcgctacaagtacagcggcgtcgaccactcgctcgtcgccaagtacatcctccagcccttctggtcccgattcgtcaacatcttcccgctatggttcccaccgaacatgattacactgacaggtttcatgtttctactgacatcagcattccttggctttttatattcaccccatctagatacagcaccccccagatgggttcaccttgctcatggactgcttctctttctttatcagacttttgatgctgtggatggaaaacaagcaaggcgtaccaactcatcaagtcctctaggcgagctttttgaccacggatgtgatgcgcttgcgtgtgcttttgaatccttggcttttggaagcacggcgatgtgtggaaaggctaccttctggttttggttcatttcagctgtcccattttacttcgcaacctgggaacacttttttacaaatacacttattcttcctatagtcaacggaccaactgaaggccttatgctgatctacttgtgccattttttcacctttttcacaggagccgagtggtgggcacaggattttcagaagtcaatgcccctgctgggttgggttcctcttatctctgaaatcccggtgtatgacattgtgctatgtcttatgattgcttttgctgtaatcccaacaattggatctaacatccacaatgtatataaagtcgttgaagcaagaaaaggaagcatgcttctggcactagccatgctctttccttttggtttgctcttggctggagttcttgtctggtcctacctttctccttcagatataatgagaacccaaccacatttgctaattattggaactggttttgcatttggatttcttgtgggaagaatgattctggctcacttgtgtgatgaacccaagggtttgaaaacagggatgtgcatgtcccttgcgtattttccatttgcaattgcaaacgcgttgactgcccggcttgatgatggaaatccactcgttgatgagcagctagtgctcctgatgtactgcctatttacagtggctctgtacatgcattttgctacatcagttattcatgagatcaccaatgcactcgggatccactgcttcaggatcactaggaaaaaggcatagttcctccgtccacgggcatcagcgttgccctggattgtgtaatcaatcacaactcacaaggtggtgcctgacagacaagcaatttttcatatttaatggatgctgcttcctgaatactcacatggatgacgcccccccgccccttaaaattcacatcggcatgaacgtgcggatgagaaagcagtgtttttttttgaaacaattagcaacatcatgctgtatcttaccaattttttgtggaattcgttgaatttgctgatagtgatgtattgcaaattaagaattgtttggattttgttaaaggaatgccccccc

SEQ ID NO: 40609 - protein, 473 aa, Zea mays subsp. mays
  peptide (1)..(473): Ceres Seq. ID no. 12435334
  misc_feature (170)..(310): Pfam Name: Pfam Description:  CDP-alcohol phosphatidyltransferase
  misc_feature (85)..(473): NCBI GI NO: 7488701 NR Description: probable ethanolaminephosphotransferase (EC2
  misc_feature (85)..(473): NCBI GI NO: 3927806 NR Description: aminoalcoholphosphotransferase
  misc_feature (85)..(473): NCBI GI NO: 7488522 NR Description: ethanolaminephosphotransferase homolog - turnip
  misc_feature (85)..(473): NCBI GI NO: 15222885 NR Description: aminoalcoholphosphotransferase
  misc_feature (85)..(473): NCBI GI NO: 15229490 NR Description: hypothetical protein; protein id: At3g25585
  misc_feature (85)..(471): NCBI GI NO: 30313359 NR Description: aminoalcoholphosphotransferase
  misc_feature (85)..(473): NCBI GI NO: 5917787 NR Description: aminoalcoholphosphotransferase [Brassica rapa]
  misc_feature (85)..(405): NCBI GI NO: 18390098 NR Description: aminoalcoholphosphotransferase [Sorghum bicolor]
  misc_feature (85)..(473): NCBI GI NO: 27762264 NR Description: aminoalcoholphosphotransferase [Brassica napus]
  misc_feature (98)..(471): NCBI GI NO: 2425056 NR Description: LipB [Dictyostelium discoideum]
AKAHSSRSPSDPFIPLGFLLLRPLRSPSDHPCEAVTQPGAGGLSCTTGHAASRARVLLFRGFRSGDCYSVRLTPSVPRRGEGSEMGYIGHHGVATLRRYKYSGVDHSLVAKYILQPFWSRFVNIFPLWFPPNMITLTGFMFLLTSAFLGFLYSPHLDTAPPRWVHLAHGLLLFLYQTFDAVDGKQARRTNSSSPLGELFDHGCDALACAFESLAFGSTAMCGKATFWFWFISAVPFYFATWEHFFTNTLILPIVNGPTEGLMLIYLCHFFTFFTGAEWWAQDFQKSMPLLGWVPLISEIPVYDIVLCLMIAFAVIPTIGSNIHNVYKVVEARKGSMLLALAMLFPFGLLLAGVLVWSYLSPSDIMRTQPHLLIIGTGFAFGFLVGRMILAHLCDEPKGLKTGMCMSLAYFPFAIANALTARLDDGNPLVDEQLVLLMYCLFTVALYMHFATSVIHEITNALGIHCFRITRKKA

SEQ ID NO: 40610 - protein, 389 aa, Zea mays subsp. mays
  peptide (1)..(389): Ceres Seq. ID no. 12435335
  misc_feature (86)..(226): Pfam Name: Pfam Description:  CDP-alcohol phosphatidyltransferase
  misc_feature (1)..(389): NCBI GI NO: 7488701 NR Description: probable ethanolaminephosphotransferase (EC2
  misc_feature (1)..(389): NCBI GI NO: 3927806 NR Description: aminoalcoholphosphotransferase
  misc_feature (1)..(389): NCBI GI NO: 7488522 NR Description: ethanolaminephosphotransferase homolog - turnip
  misc_feature (1)..(389): NCBI GI NO: 15222885 NR Description: aminoalcoholphosphotransferase
  misc_feature (1)..(389): NCBI GI NO: 15229490 NR Description: hypothetical protein; protein id: At3g25585
  misc_feature (1)..(387): NCBI GI NO: 30313359 NR Description: aminoalcoholphosphotransferase
  misc_feature (1)..(389): NCBI GI NO: 5917787 NR Description: aminoalcoholphosphotransferase [Brassica rapa]
  misc_feature (1)..(321): NCBI GI NO: 18390098 NR Description: aminoalcoholphosphotransferase [Sorghum bicolor]
  misc_feature (1)..(389): NCBI GI NO: 27762264 NR Description: aminoalcoholphosphotransferase [Brassica napus]
  misc_feature (14)..(387): NCBI GI NO: 2425056 NR Description: LipB [Dictyostelium discoideum]
MGYIGHHGVATLRRYKYSGVDHSLVAKYILQPFWSRFVNIFPLWFPPNMITLTGFMFLLTSAFLGFLYSPHLDTAPPRWVHLAHGLLLFLYQTFDAVDGKQARRTNSSSPLGELFDHGCDALACAFESLAFGSTAMCGKATFWFWFISAVPFYFATWEHFFTNTLILPIVNGPTEGLMLIYLCHFFTFFTGAEWWAQDFQKSMPLLGWVPLISEIPVYDIVLCLMIAFAVIPTIGSNIHNVYKVVEARKGSMLLALAMLFPFGLLLAGVLVWSYLSPSDIMRTQPHLLIIGTGFAFGFLVGRMILAHLCDEPKGLKTGMCMSLAYFPFAIANALTARLDDGNPLVDEQLVLLMYCLFTVALYMHFATSVIHEITNALGIHCFRITRKKA

SEQ ID NO: 40611 - protein, 341 aa, Zea mays subsp. mays
  peptide (1)..(341): Ceres Seq. ID no. 12435336
  misc_feature (38)..(178): Pfam Name: Pfam Description:  CDP-alcohol phosphatidyltransferase
  misc_feature (1)..(341): NCBI GI NO: 7488701 NR Description: probable ethanolaminephosphotransferase (EC2
  misc_feature (1)..(341): NCBI GI NO: 3927806 NR Description: aminoalcoholphosphotransferase
  misc_feature (1)..(341): NCBI GI NO: 7488522 NR Description: ethanolaminephosphotransferase homolog - turnip
  misc_feature (1)..(341): NCBI GI NO: 15222885 NR Description: aminoalcoholphosphotransferase
  misc_feature (1)..(341): NCBI GI NO: 15229490 NR Description: hypothetical protein; protein id: At3g25585
  misc_feature (1)..(339): NCBI GI NO: 30313359 NR Description: aminoalcoholphosphotransferase
  misc_feature (1)..(341): NCBI GI NO: 5917787 NR Description: aminoalcoholphosphotransferase [Brassica rapa]
  misc_feature (1)..(273): NCBI GI NO: 18390098 NR Description: aminoalcoholphosphotransferase [Sorghum bicolor]
  misc_feature (1)..(341): NCBI GI NO: 27762264 NR Description: aminoalcoholphosphotransferase [Brassica napus]
  misc_feature (1)..(339): NCBI GI NO: 2425056 NR Description: LipB [Dictyostelium discoideum]
MITLTGFMFLLTSAFLGFLYSPHLDTAPPRWVHLAHGLLLFLYQTFDAVDGKQARRTNSSSPLGELFDHGCDALACAFESLAFGSTAMCGKATFWFWFISAVPFYFATWEHFFTNTLILPIVNGPTEGLMLIYLCHFFTFFTGAEWWAQDFQKSMPLLGWVPLISEIPVYDIVLCLMIAFAVIPTIGSNIHNVYKVVEARKGSMLLALAMLFPFGLLLAGVLVWSYLSPSDIMRTQPHLLIIGTGFAFGFLVGRMILAHLCDEPKGLKTGMCMSLAYFPFAIANALTARLDDGNPLVDEQLVLLMYCLFTVALYMHFATSVIHEITNALGIHCFRITRKKA

SEQ ID NO: 40612 - DNA, 883 bp, Zea mays subsp. mays
  misc_feature (1)..(883): Ceres Seq. ID no. 12382302
gctccaaccatattcaactgcgtaaggccaccctgtcatgcttgactggtcctcttgtgatatgttcatgttaatagcatgatgtcttttgttctattggaaaataaaaagtctccctggactctaaaatcaatgcctgtgaacacatgaactgtttgtgtcacccatgttcctctgctccttggcactttctgatgcatgctcaaatgcttaagaaagactcatagaagcgactcctattcctatgccaggtcattgagataccaaggggcagcaaggttaaatatgaacttgacaagaaaactggactgatcaaggtggaccgtgtgctgtattcatcagttgtttaccctcacaactatggattcattcctcgcacgctttgtgaagacagtgatcctttggatgtactggttataatgcaggagcctgttatcccaggctgtttcctacgtgcgaaggccatcggccttatgccgatgattgatcagggagaggcagatgacaagatcattgcagtgtgcgctgatgatcccgagtacaggcattacaatgatatcaaggagctcccacctcaccgcttggctgaaatcaggcgcttcttcgaggactacaagaagaatgagaacaaggaggttgctgtgaatgactttctaccagcgagcgccgcttatgaagccatacagcactctatggacctgtatgctacatacatcgttgagggcctgaggaggtaggattctgatggctaggaaaggtggggaggatgttgacgaaaaactgggagaccatttaccgcatggaacgagtaccgttattattttatttgtgtcgtgtatactgcagccagtaatagtaatctgcaactgtgcgttaaatggtc

SEQ ID NO: 40613 - protein, 105 aa, Zea mays subsp. mays
  peptide (1)..(105): Ceres Seq. ID no. 12382303
  misc_feature (1)..(96): Pfam Name: Pfam Description:  Inorganic pyrophosphatase
  misc_feature (1)..(105): NCBI GI NO: 15231849 NR Description: inorganic pyrophosphatase -like protein
  misc_feature (1)..(105): NCBI GI NO: 21593570 NR Description: inorganic pyrophosphatase-like protein
  misc_feature (1)..(105): NCBI GI NO: 6752884 NR Description: soluble inorganic pyrophosphatase
  misc_feature (1)..(105): NCBI GI NO: 15223288 NR Description: soluble inorganic pyrophosphatase, putative
  misc_feature (1)..(105): NCBI GI NO: 5669924 NR Description: soluble inorganic pyrophosphatase
  misc_feature (1)..(105): NCBI GI NO: 40642617 NR Description: soluble pyrophosphatase [Beta vulgaris]
  misc_feature (1)..(105): NCBI GI NO: 15226453 NR Description: putative inorganic pyrophosphatase
  misc_feature (1)..(105): NCBI GI NO: 2500047 NR Description: Soluble inorganic pyrophosphatase
  misc_feature (1)..(105): NCBI GI NO: 26451240 NR Description: putative inorganic pyrophosphatase
  misc_feature (1)..(105): NCBI GI NO: 7436031 NR Description: probable inorganic diphosphatase (EC 3
MQEPVIPGCFLRAKAIGLMPMIDQGEADDKIIAVCADDPEYRHYNDIKELPPHRLAEIRRFFEDYKKNENKEVAVNDFLPASAAYEAIQHSMDLYATYIVEGLRR

SEQ ID NO: 40614 - protein, 87 aa, Zea mays subsp. mays
  peptide (1)..(87): Ceres Seq. ID no. 12382304
  misc_feature (1)..(78): Pfam Name: Pfam Description:  Inorganic pyrophosphatase
  misc_feature (1)..(87): NCBI GI NO: 15231849 NR Description: inorganic pyrophosphatase -like protein
  misc_feature (1)..(87): NCBI GI NO: 21593570 NR Description: inorganic pyrophosphatase-like protein
  misc_feature (1)..(87): NCBI GI NO: 6752884 NR Description: soluble inorganic pyrophosphatase
  misc_feature (1)..(87): NCBI GI NO: 15223288 NR Description: soluble inorganic pyrophosphatase, putative
  misc_feature (1)..(87): NCBI GI NO: 5669924 NR Description: soluble inorganic pyrophosphatase
  misc_feature (1)..(87): NCBI GI NO: 40642617 NR Description: soluble pyrophosphatase [Beta vulgaris]
  misc_feature (1)..(87): NCBI GI NO: 15226453 NR Description: putative inorganic pyrophosphatase
  misc_feature (1)..(87): NCBI GI NO: 2500047 NR Description: Soluble inorganic pyrophosphatase
  misc_feature (1)..(87): NCBI GI NO: 26451240 NR Description: putative inorganic pyrophosphatase
  misc_feature (1)..(87): NCBI GI NO: 7436031 NR Description: probable inorganic diphosphatase (EC 3
MPMIDQGEADDKIIAVCADDPEYRHYNDIKELPPHRLAEIRRFFEDYKKNENKEVAVNDFLPASAAYEAIQHSMDLYATYIVEGLRR

SEQ ID NO: 40615 - protein, 85 aa, Zea mays subsp. mays
  peptide (1)..(85): Ceres Seq. ID no. 12382305
  misc_feature (1)..(76): Pfam Name: Pfam Description:  Inorganic pyrophosphatase
  misc_feature (1)..(85): NCBI GI NO: 15231849 NR Description: inorganic pyrophosphatase -like protein
  misc_feature (1)..(85): NCBI GI NO: 21593570 NR Description: inorganic pyrophosphatase-like protein
  misc_feature (1)..(85): NCBI GI NO: 6752884 NR Description: soluble inorganic pyrophosphatase
  misc_feature (1)..(85): NCBI GI NO: 15223288 NR Description: soluble inorganic pyrophosphatase, putative
  misc_feature (1)..(85): NCBI GI NO: 5669924 NR Description: soluble inorganic pyrophosphatase
  misc_feature (1)..(85): NCBI GI NO: 40642617 NR Description: soluble pyrophosphatase [Beta vulgaris]
  misc_feature (1)..(85): NCBI GI NO: 15226453 NR Description: putative inorganic pyrophosphatase
  misc_feature (1)..(85): NCBI GI NO: 2500047 NR Description: Soluble inorganic pyrophosphatase
  misc_feature (1)..(85): NCBI GI NO: 26451240 NR Description: putative inorganic pyrophosphatase
  misc_feature (1)..(85): NCBI GI NO: 7436031 NR Description: probable inorganic diphosphatase (EC 3
MIDQGEADDKIIAVCADDPEYRHYNDIKELPPHRLAEIRRFFEDYKKNENKEVAVNDFLPASAAYEAIQHSMDLYATYIVEGLRR

SEQ ID NO: 40616 - DNA, 1521 bp, Zea mays subsp. mays
  misc_feature (1)..(1521): Ceres Seq. ID no. 12375686
gcacgagaccattacctagaacatcctaatcgaaaaacaaacaatggctttccaccaaagatcagtgagcctgccgtccaagagcctcaccaaggaggccgaagtcgaggccgaactgcaaagcctggaggacgccgcctctcccccctcctcctcctcctcctcctcaaccgtcgcggcggtgcgcgacggtctgacgaggctcggagacgtgtacggacacatcgaggagatcgtccacctccccagtaaccaagcctgcaccgtccagcagcagcggaaggagctggacgcggagatggagcgctctctggacctcatcgacctctgcaacgcgacgcaggagagcctcgccgagctgaaggccgccgtccaggacctgctggcgggtctcaggaggagggacgacgcgagcgtccaggccaaggtccagtcgtacgtccgcctggccaagaacgcgcggaagcagctcaggaaggccggcaggagggccgctgccgcctctggcagggaggagcgcgagtgcagtctcgtcatcaggctgctgctcagggccaggctggtcgctgcctccctcctcggctcggcgctgcagtgcctcgcgggcgtggcgaagcaggtggtgactctgacgcccaggaggtcccttgtctccaaggcgttgcagaggagaagcaaggcggtcgtctgcgaggagggccagccggccaggtgctggcgctggagcgcgtcgtcgttggagagcttgagcgtggagcggagcttctgttcaggaggatggtccagaccagagtcgccctcctcaacgtccttagctcgtagatcctcctcgtcttcatgtgtagcgcgcgtcctgcgattggcctccgcgttttagaggatcctccaatctacatatgtgtacagtttttgtagatagatgtgcagtatgtagattgtatgatcaatgccctgcagaggatcttgaactggcgaagctgttggtaagacccggcttccagttcatggacgacccaacgatgaaggacgagacgctgctgacggacggcaactacgggtccgtgaagagggtgtttgtcgtcgccaaagccgacagaagcagcaccgaggagatgcagcgccggatggtggagctgagccccggcgcggacgtcgaggaggtcgccggagccgatcacatggccatgctctccaagccaacggaggtctgcgaagttctggtcaggattgccggcaggtacgactgagaagaagacgggcaatgggtgcttcagtctgctacgtacctttcagttcaagtgtgctggattgctagcaatgactgttatgcaagcgatccacaagtataatcgtgtaagcgagcttcctgatccgttagttcatgatccaagactgctagggggtgttgttttctttgcaagttcacagtcgctgacgcatgtgccatgtggagttgcgctgcagggattcaaactgattttaagaagcgtcatggctaaacgaataatgctacactttctt

SEQ ID NO: 40617 - protein, 277 aa, Zea mays subsp. mays
  peptide (1)..(277): Ceres Seq. ID no. 12375687
  misc_feature (50)..(209): Pfam Name: Pfam Description:  Arabidopsis protein of unknown function
  misc_feature (1)..(217): NCBI GI NO: 15227365 NR Description: hypothetical protein; protein id: At2g17080.1
  misc_feature (1)..(217): NCBI GI NO: 15227363 NR Description: hypothetical protein; protein id: At2g17070.1
  misc_feature (1)..(187): NCBI GI NO: 15237103 NR Description: putative protein; protein id: At4g35710.1
MAFHQRSVSLPSKSLTKEAEVEAELQSLEDAASPPSSSSSSSTVAAVRDGLTRLGDVYGHIEEIVHLPSNQACTVQQQRKELDAEMERSLDLIDLCNATQESLAELKAAVQDLLAGLRRRDDASVQAKVQSYVRLAKNARKQLRKAGRRAAAASGREERECSLVIRLLLRARLVAASLLGSALQCLAGVAKQVVTLTPRRSLVSKALQRRSKAVVCEEGQPARCWRWSASSLESLSVERSFCSGGWSRPESPSSTSLARRSSSSSCVARVLRLASAF

SEQ ID NO: 40618 - protein, 192 aa, Zea mays subsp. mays
  peptide (1)..(192): Ceres Seq. ID no. 12375688
  misc_feature (1)..(124): Pfam Name: Pfam Description:  Arabidopsis protein of unknown function
  misc_feature (1)..(132): NCBI GI NO: 15227365 NR Description: hypothetical protein; protein id: At2g17080.1
  misc_feature (1)..(132): NCBI GI NO: 15227363 NR Description: hypothetical protein; protein id: At2g17070.1
  misc_feature (1)..(102): NCBI GI NO: 15237103 NR Description: putative protein; protein id: At4g35710.1
MERSLDLIDLCNATQESLAELKAAVQDLLAGLRRRDDASVQAKVQSYVRLAKNARKQLRKAGRRAAAASGREERECSLVIRLLLRARLVAASLLGSALQCLAGVAKQVVTLTPRRSLVSKALQRRSKAVVCEEGQPARCWRWSASSLESLSVERSFCSGGWSRPESPSSTSLARRSSSSSCVARVLRLASAF

SEQ ID NO: 40619 - DNA, 1192 bp, Zea mays subsp. mays
  misc_feature (1)..(1192): Ceres Seq. ID no. 12420040
acaccactgatcaagcaacaggacgatcgagcaagaagcaagcagcagtaacaagaaaccatcatcgatccatgtatccaccaatggcggcgctcggaggacggcggaggagggcgtcgtcagcggccctcctgctagccttgttggcggtggccctggtctccctggccggcccagccacggccgcggggaacaagaccgggcaggtgaccgtgttctggggccggaacaaggccgagggcacgctgcgcgaggcctgcgactcgggcctctacaccatggtgatcatgtccttcctcgacgtctacggcccgcagcgcggcggctaccagtaccacctggacctgtcgggccacccgacggccggcatcggggacgacatcaagcactgccagttcgtgggcgtgccggtgacgctctccgtcggcggcttcggctccgggctactcgctcccgtcgacgcaggcggcgctggacctgttcgactacctctggaacgccttcctcggcgggtcgaagccgggcgtgcgccgccccttcggcgacgcgtggctcgacggcgtcgacctgttcctggagcgcggctcgcccgccgaccgctacgacgtgctggcgctcgagctcgccaagcacaacatccgcggcgggcccggcaagccgctgcacctgacggccacgccgcgctgcgggttcccgcccgccggctacctgcgccgcgcgctcgacacgggcatcttcgagcgcgtccacgtccggatctacgacgacgccgactgcgaggccaggtggcacctcgcgtgggacgagtggacggcggcgtacccggccaccaggttctacgtcggcctcacggcgtcggagatgacgcacggctgggtgcaccccaagaacgtctactacgacgtcgcgccgtccggcgcagaaggcggacaactacggcggcttcatgatctgggaccgctactacgacaaactctccaactacaccagcatggtcaaggactacgcttgattggatttctcgactcagttcagagcagacatgcatgctagctgcgtcagccgcttcgatctagctcaccgacctatataagccgaagtactgtgtagtgtgtttgcattttattgtaagaaactaagaaggaataaattggcgaataaacaagagtaaaatacaccgggttgttgagtg

SEQ ID NO: 40620 - protein, 315 aa, Zea mays subsp. mays
  peptide (1)..(315): Ceres Seq. ID no. 12420041
  misc_feature (67)..(151): Pfam Name: Pfam Description:  Glycosyl hydrolases family 18
  misc_feature (28)..(151): NCBI GI NO: 20804336 NR Description: xylanase inhibitor protein I [Triticum aestivum]
  misc_feature (62)..(151): NCBI GI NO: 31615809 NR Description: Chain A
  misc_feature (40)..(143): NCBI GI NO: 34913272 NR Description: putative xylanase inhibitor protein
  misc_feature (28)..(157): NCBI GI NO: 7451378 NR Description: chitinase (EC 3.2.1.14) III C10701 - rice
  misc_feature (42)..(154): NCBI GI NO: 18693099 NR Description: putative xylanase inhibitor protein
  misc_feature (46)..(157): NCBI GI NO: 7451381 NR Description: chitinase (EC 3.2.1.14) III C10150 - rice
  misc_feature (42)..(157): NCBI GI NO: 7451377 NR Description: chitinase (EC 3.2.1.14) III C00481 - rice
  misc_feature (31)..(145): NCBI GI NO: 7451380 NR Description: chitinase (EC 3.2.1.14) III C10923 - rice
  misc_feature (34)..(145): NCBI GI NO: 4884516 NR Description: class III chitinase homologue (OsChib3H-b)
  misc_feature (42)..(147): NCBI GI NO: 38346492 NR Description: OSJNBa0020I02.6
TTDQATGRSSKKQAAVTRNHHRSMYPPMAALGGRRRRASSAALLLALLAVALVSLAGPATAAGNKTGQVTVFWGRNKAEGTLREACDSGLYTMVIMSFLDVYGPQRGGYQYHLDLSGHPTAGIGDDIKHCQFVGVPVTLSVGGFGSGLLAPVDAGGAGPVRLPLERLPRRVEAGRAPPLRRRVARRRRPVPGARLARRPLRRAGARARQAQHPRRARQAAAPDGHAALRVPARRLPAPRARHGHLRARPRPDLRRRRLRGQVAPRVGRVDGGVPGHQVLRRPHGVGDDARLGAPQERLLRRRAVRRRRRTTTAAS

SEQ ID NO: 40621 - protein, 292 aa, Zea mays subsp. mays
  peptide (1)..(292): Ceres Seq. ID no. 12420042
  misc_feature (44)..(128): Pfam Name: Pfam Description:  Glycosyl hydrolases family 18
  misc_feature (5)..(128): NCBI GI NO: 20804336 NR Description: xylanase inhibitor protein I [Triticum aestivum]
  misc_feature (39)..(128): NCBI GI NO: 31615809 NR Description: Chain A
  misc_feature (17)..(120): NCBI GI NO: 34913272 NR Description: putative xylanase inhibitor protein
  misc_feature (5)..(134): NCBI GI NO: 7451378 NR Description: chitinase (EC 3.2.1.14) III C10701 - rice
  misc_feature (19)..(131): NCBI GI NO: 18693099 NR Description: putative xylanase inhibitor protein
  misc_feature (23)..(134): NCBI GI NO: 7451381 NR Description: chitinase (EC 3.2.1.14) III C10150 - rice
  misc_feature (19)..(134): NCBI GI NO: 7451377 NR Description: chitinase (EC 3.2.1.14) III C00481 - rice
  misc_feature (8)..(122): NCBI GI NO: 7451380 NR Description: chitinase (EC 3.2.1.14) III C10923 - rice
  misc_feature (11)..(122): NCBI GI NO: 4884516 NR Description: class III chitinase homologue (OsChib3H-b)
  misc_feature (19)..(124): NCBI GI NO: 38346492 NR Description: OSJNBa0020I02.6
MYPPMAALGGRRRRASSAALLLALLAVALVSLAGPATAAGNKTGQVTVFWGRNKAEGTLREACDSGLYTMVIMSFLDVYGPQRGGYQYHLDLSGHPTAGIGDDIKHCQFVGVPVTLSVGGFGSGLLAPVDAGGAGPVRLPLERLPRRVEAGRAPPLRRRVARRRRPVPGARLARRPLRRAGARARQAQHPRRARQAAAPDGHAALRVPARRLPAPRARHGHLRARPRPDLRRRRLRGQVAPRVGRVDGGVPGHQVLRRPHGVGDDARLGAPQERLLRRRAVRRRRRTTTAAS

SEQ ID NO: 40622 - protein, 288 aa, Zea mays subsp. mays
  peptide (1)..(288): Ceres Seq. ID no. 12420043
  misc_feature (40)..(124): Pfam Name: Pfam Description:  Glycosyl hydrolases family 18
  misc_feature (1)..(124): NCBI GI NO: 20804336 NR Description: xylanase inhibitor protein I [Triticum aestivum]
  misc_feature (35)..(124): NCBI GI NO: 31615809 NR Description: Chain A
  misc_feature (13)..(116): NCBI GI NO: 34913272 NR Description: putative xylanase inhibitor protein
  misc_feature (1)..(130): NCBI GI NO: 7451378 NR Description: chitinase (EC 3.2.1.14) III C10701 - rice
  misc_feature (15)..(127): NCBI GI NO: 18693099 NR Description: putative xylanase inhibitor protein
  misc_feature (19)..(130): NCBI GI NO: 7451381 NR Description: chitinase (EC 3.2.1.14) III C10150 - rice
  misc_feature (15)..(130): NCBI GI NO: 7451377 NR Description: chitinase (EC 3.2.1.14) III C00481 - rice
  misc_feature (4)..(118): NCBI GI NO: 7451380 NR Description: chitinase (EC 3.2.1.14) III C10923 - rice
  misc_feature (7)..(118): NCBI GI NO: 4884516 NR Description: class III chitinase homologue (OsChib3H-b)
  misc_feature (15)..(120): NCBI GI NO: 38346492 NR Description: OSJNBa0020I02.6
MAALGGRRRRASSAALLLALLAVALVSLAGPATAAGNKTGQVTVFWGRNKAEGTLREACDSGLYTMVIMSFLDVYGPQRGGYQYHLDLSGHPTAGIGDDIKHCQFVGVPVTLSVGGFGSGLLAPVDAGGAGPVRLPLERLPRRVEAGRAPPLRRRVARRRRPVPGARLARRPLRRAGARARQAQHPRRARQAAAPDGHAALRVPARRLPAPRARHGHLRARPRPDLRRRRLRGQVAPRVGRVDGGVPGHQVLRRPHGVGDDARLGAPQERLLRRRAVRRRRRTTTAAS

SEQ ID NO: 40623 - DNA, 1508 bp, Zea mays subsp. mays
  misc_feature (1)..(1508): Ceres Seq. ID no. 12359110
atcttctctttgtgaaagctgaaacattgacaaatgctggcattccagtccgatcagtcctcaccagctactacaagagccctcagttcttgcagcgcaagcacgacctctacaacagctacaccagtcccgacgaggtcattctttgccccgacagccagcagagcatgtactgccagctactctgcggcctggtggaacgccagaacgtcgtccgtctcggagcagtcttcgcctcagcattcctccggtccatcagcttcctcgagaagcactggcatgacctagtcaccgacatccgaaccggccggatcaatcccagcatcaccaacgccgcatgccgggtggccacggagagctttctcgcgcagcccaaccccgagctagctgacgaagtcgaggcgatatgcagctcggagtcatggaagggcgttcttggcaggctctggcctaacgtcaagtacatcgaggccgtcctgacggggacgatggcgcagtacgtccccatgctcgagttctacagcgacggcaggatccccctggtctgcaccatgtacgcttcctcggagagctacttcggcgtcaacctgcggccgctgtgcagcccgaaggacgtgtcctacaccatcctccccaacatggcctacttcgagttcgtgccgttggacgacggcctcaggctggcggaggatggtgaggctgtggagaaggagaagcttgtcggcctcgtggacgtcaaggtcggatgctactacgagctcgtggttaccacatttgccggtctttacaggtacagggtaggcgatgtactccaggtgacaggcttctacaaccgcgcaccccagttcaaattcatctgccggaggaacgtgatcctgagcgtggacgcagacaagacgaacgaggaagacctccacggcagcgtctcccgggccaagaagatcctggaggaccgaggccacatcctactggagtacaccagcttcaccgacacgtcgacggtgccgggccactacgtcctgttctgggaggtgaaggccacgcccacctccggctccgggggcgcgcggctggacgcgcaggtcctggagagctgctgcgtcgccgtggaggagtcgctggactgcgtgtacaggcggtgcagggcgcacgacaggtccgtggggccgctggagatacggctggtggaagccggcgccttcgacgcgctcatggacctgttggtcagccagggcggctccatcaaccagtacaagacgccacggtgcatccgagccgggcggcgccgcgctggagctgctcgactccaaggccaccgcctcgttcttcagcccccgggatcctgaagctactggtgtctgaggttgttctgctactctgaaactaatcctctgctggatctaaataatctgagaattttcgtctgggttatccccgtttacattgcacttttgtcaggctttgctactatgcaaagaagccttttttctttatttgagattgtgatc

SEQ ID NO: 40624 - protein, 447 aa, Zea mays subsp. mays
  peptide (1)..(447): Ceres Seq. ID no. 12359111
  misc_feature (1)..(425): Pfam Name: Pfam Description:  GH3 auxin-responsive promoter
  misc_feature (1)..(438): NCBI GI NO: 15227128 NR Description: putative auxin-responsive protein
  misc_feature (1)..(441): NCBI GI NO: 15217844 NR Description: auxin-regulated GH3 protein, putative
  misc_feature (1)..(441): NCBI GI NO: 30690222 NR Description: auxin-regulated GH3 protein -related
  misc_feature (2)..(424): NCBI GI NO: 15239653 NR Description: auxin-responsive-like protein
  misc_feature (2)..(424): NCBI GI NO: 17978966 NR Description: AT5g54510/F24B18_13 [Arabidopsis thaliana]
  misc_feature (2)..(424): NCBI GI NO: 15237038 NR Description: GH3 like protein; protein id: At4g27260
  misc_feature (1)..(426): NCBI GI NO: 34910142 NR Description: putative auxin-responsive GH3
  misc_feature (2)..(423): NCBI GI NO: 15235538 NR Description: auxin-responsive GH3 - like protein
  misc_feature (2)..(427): NCBI GI NO: 15240601 NR Description: auxin-responsive - like protein
  misc_feature (2)..(423): NCBI GI NO: 15227787 NR Description: unknown protein; protein id: At2g23170
LLFVKAETLTNAGIPVRSVLTSYYKSPQFLQRKHDLYNSYTSPDEVILCPDSQQSMYCQLLCGLVERQNVVRLGAVFASAFLRSISFLEKHWHDLVTDIRTGRINPSITNAACRVATESFLAQPNPELADEVEAICSSESWKGVLGRLWPNVKYIEAVLTGTMAQYVPMLEFYSDGRIPLVCTMYASSESYFGVNLRPLCSPKDVSYTILPNMAYFEFVPLDDGLRLAEDGEAVEKEKLVGLVDVKVGCYYELVVTTFAGLYRYRVGDVLQVTGFYNRAPQFKFICRRNVILSVDADKTNEEDLHGSVSRAKKILEDRGHILLEYTSFTDTSTVPGHYVLFWEVKATPTSGSGGARLDAQVLESCCVAVEESLDCVYRRCRAHDRSVGPLEIRLVEAGAFDALMDLLVSQGGSINQYKTPRCIRAGRRRAGAARLQGHRLVLQPPGS

SEQ ID NO: 40625 - protein, 392 aa, Zea mays subsp. mays
  peptide (1)..(392): Ceres Seq. ID no. 12359112
  misc_feature (1)..(370): Pfam Name: Pfam Description:  GH3 auxin-responsive promoter
  misc_feature (1)..(383): NCBI GI NO: 15227128 NR Description: putative auxin-responsive protein
  misc_feature (1)..(386): NCBI GI NO: 15217844 NR Description: auxin-regulated GH3 protein, putative
  misc_feature (1)..(386): NCBI GI NO: 30690222 NR Description: auxin-regulated GH3 protein -related
  misc_feature (1)..(369): NCBI GI NO: 15239653 NR Description: auxin-responsive-like protein
  misc_feature (1)..(369): NCBI GI NO: 17978966 NR Description: AT5g54510/F24B18_13 [Arabidopsis thaliana]
  misc_feature (1)..(369): NCBI GI NO: 15237038 NR Description: GH3 like protein; protein id: At4g27260
  misc_feature (1)..(371): NCBI GI NO: 34910142 NR Description: putative auxin-responsive GH3
  misc_feature (1)..(368): NCBI GI NO: 15235538 NR Description: auxin-responsive GH3 - like protein
  misc_feature (1)..(372): NCBI GI NO: 15240601 NR Description: auxin-responsive - like protein
  misc_feature (1)..(368): NCBI GI NO: 15227787 NR Description: unknown protein; protein id: At2g23170
MYCQLLCGLVERQNVVRLGAVFASAFLRSISFLEKHWHDLVTDIRTGRINPSITNAACRVATESFLAQPNPELADEVEAICSSESWKGVLGRLWPNVKYIEAVLTGTMAQYVPMLEFYSDGRIPLVCTMYASSESYFGVNLRPLCSPKDVSYTILPNMAYFEFVPLDDGLRLAEDGEAVEKEKLVGLVDVKVGCYYELVVTTFAGLYRYRVGDVLQVTGFYNRAPQFKFICRRNVILSVDADKTNEEDLHGSVSRAKKILEDRGHILLEYTSFTDTSTVPGHYVLFWEVKATPTSGSGGARLDAQVLESCCVAVEESLDCVYRRCRAHDRSVGPLEIRLVEAGAFDALMDLLVSQGGSINQYKTPRCIRAGRRRAGAARLQGHRLVLQPPGS

SEQ ID NO: 40626 - protein, 285 aa, Zea mays subsp. mays
  peptide (1)..(285): Ceres Seq. ID no. 12359113
  misc_feature (1)..(263): Pfam Name: Pfam Description:  GH3 auxin-responsive promoter
  misc_feature (1)..(276): NCBI GI NO: 15227128 NR Description: putative auxin-responsive protein
  misc_feature (1)..(279): NCBI GI NO: 15217844 NR Description: auxin-regulated GH3 protein, putative
  misc_feature (1)..(279): NCBI GI NO: 30690222 NR Description: auxin-regulated GH3 protein -related
  misc_feature (1)..(262): NCBI GI NO: 15239653 NR Description: auxin-responsive-like protein
  misc_feature (1)..(262): NCBI GI NO: 17978966 NR Description: AT5g54510/F24B18_13 [Arabidopsis thaliana]
  misc_feature (1)..(262): NCBI GI NO: 15237038 NR Description: GH3 like protein; protein id: At4g27260
  misc_feature (1)..(264): NCBI GI NO: 34910142 NR Description: putative auxin-responsive GH3
  misc_feature (1)..(261): NCBI GI NO: 15235538 NR Description: auxin-responsive GH3 - like protein
  misc_feature (1)..(265): NCBI GI NO: 15240601 NR Description: auxin-responsive - like protein
  misc_feature (1)..(261): NCBI GI NO: 15227787 NR Description: unknown protein; protein id: At2g23170
MAQYVPMLEFYSDGRIPLVCTMYASSESYFGVNLRPLCSPKDVSYTILPNMAYFEFVPLDDGLRLAEDGEAVEKEKLVGLVDVKVGCYYELVVTTFAGLYRYRVGDVLQVTGFYNRAPQFKFICRRNVILSVDADKTNEEDLHGSVSRAKKILEDRGHILLEYTSFTDTSTVPGHYVLFWEVKATPTSGSGGARLDAQVLESCCVAVEESLDCVYRRCRAHDRSVGPLEIRLVEAGAFDALMDLLVSQGGSINQYKTPRCIRAGRRRAGAARLQGHRLVLQPPGS

SEQ ID NO: 40627 - DNA, 938 bp, Zea mays subsp. mays
  misc_feature (1)..(938): Ceres Seq. ID no. 12367866
tcctgtatcaacatattcgctcatttgcgctagtcagctggccttcaatgctgtcttctcatatgtcctaaatgctcaaaagttcaccccattcattttcaactcagtaatcctccttacgttttccgctgcgcttcttggagtcgacgaagattctcagggtaccaatggtttatcgcgtgggaagtacatattgggtttcgcattgaccctaggagcctcggccacatactcactaattctctctctaatcaagtcgcattcgagaaggttattaagaaggaaactttctcagtcgtgttgaatatgcagatatatacagcactagtggcaacagtagcttctcttatcggtttatttgcaagcggcgagtggaagactttagagggagagatgcatgccttcagctcagggagagtgtcctatgtgatgacacttctatggactgctgtatcttggcagatagcttccgtaggagtggtgggtttgatctttgttgtgtcatcactcttttcaaatgtgataagcacactggctctacccatcattccgatttttgctgtgattttcttccacgacaagatggatggagtgaagattattgctatgttgatggccatctggggattcgtttcatatggatatcaattatatgtcagtgacaagaaggctaggaagacttcagtcagtgtggaggagaattcctaagcgcttgttggcctgttacattggtctttgtggctcctataccactttaagttgctggtattgaggaggtactagttattgacttattgtatccaaaaggagctcagttgagaatctcaggtttacacaattcataggtatatacttctgttagtattgtcatatcatcatatgtaccgatgtatggttgtgttgtcctttaaaataaaaagattagcatttccagaggc

SEQ ID NO: 40628 - protein, 133 aa, Zea mays subsp. mays
  peptide (1)..(133): Ceres Seq. ID no. 12367867
  misc_feature (1)..(124): Pfam Name: Pfam Description:  Domain of unknown function, DUF250
  misc_feature (1)..(126): NCBI GI NO: 38605752 NR Description: OSJNBb0016D16.5
  misc_feature (1)..(126): NCBI GI NO: 38344290 NR Description: OSJNBa0013K16.22
  misc_feature (1)..(124): NCBI GI NO: 15219436 NR Description: hypothetical protein; protein id: At1g44750
  misc_feature (1)..(126): NCBI GI NO: 15236799 NR Description: putative protein; protein id: At4g18220.1
  misc_feature (1)..(124): NCBI GI NO: 7487849 NR Description: hypothetical protein T9A21
  misc_feature (1)..(124): NCBI GI NO: 30684325 NR Description: purine permease family [Arabidopsis thaliana]
  misc_feature (1)..(130): NCBI GI NO: 38605752 NR Description: OSJNBb0016D16.5
  misc_feature (1)..(133): NCBI GI NO: 15236794 NR Description: putative protein; protein id: At4g18190.1
  misc_feature (1)..(130): NCBI GI NO: 38344291 NR Description: OSJNBa0013K16.23
  misc_feature (1)..(133): NCBI GI NO: 18491221 NR Description: unknown protein [Arabidopsis thaliana]
MQIYTALVATVASLIGLFASGEWKTLEGEMHAFSSGRVSYVMTLLWTAVSWQIASVGVVGLIFVVSSLFSNVISTLALPIIPIFAVIFFHDKMDGVKIIAMLMAIWGFVSYGYQLYVSDKKARKTSVSVEENS

SEQ ID NO: 40629 - protein, 104 aa, Zea mays subsp. mays
  peptide (1)..(104): Ceres Seq. ID no. 12367868
  misc_feature (1)..(95): Pfam Name: Pfam Description:  Domain of unknown function, DUF250
  misc_feature (1)..(97): NCBI GI NO: 38605752 NR Description: OSJNBb0016D16.5
  misc_feature (1)..(97): NCBI GI NO: 38344290 NR Description: OSJNBa0013K16.22
  misc_feature (1)..(95): NCBI GI NO: 15219436 NR Description: hypothetical protein; protein id: At1g44750
  misc_feature (1)..(97): NCBI GI NO: 15236799 NR Description: putative protein; protein id: At4g18220.1
  misc_feature (1)..(95): NCBI GI NO: 7487849 NR Description: hypothetical protein T9A21
  misc_feature (1)..(95): NCBI GI NO: 30684325 NR Description: purine permease family [Arabidopsis thaliana]
  misc_feature (1)..(101): NCBI GI NO: 38605752 NR Description: OSJNBb0016D16.5
  misc_feature (1)..(104): NCBI GI NO: 15236794 NR Description: putative protein; protein id: At4g18190.1
  misc_feature (1)..(101): NCBI GI NO: 38344291 NR Description: OSJNBa0013K16.23
  misc_feature (1)..(104): NCBI GI NO: 18491221 NR Description: unknown protein [Arabidopsis thaliana]
MHAFSSGRVSYVMTLLWTAVSWQIASVGVVGLIFVVSSLFSNVISTLALPIIPIFAVIFFHDKMDGVKIIAMLMAIWGFVSYGYQLYVSDKKARKTSVSVEENS

SEQ ID NO: 40630 - protein, 100 aa, Zea mays subsp. mays
  peptide (1)..(100): Ceres Seq. ID no. 12367869
  misc_feature (1)..(94): NCBI GI NO: 38605752 NR Description: OSJNBb0016D16.5
  misc_feature (1)..(94): NCBI GI NO: 38344290 NR Description: OSJNBa0013K16.22
  misc_feature (3)..(95): NCBI GI NO: 15219436 NR Description: hypothetical protein; protein id: At1g44750
  misc_feature (1)..(95): NCBI GI NO: 15236799 NR Description: putative protein; protein id: At4g18220.1
  misc_feature (1)..(95): NCBI GI NO: 7487849 NR Description: hypothetical protein T9A21
  misc_feature (1)..(95): NCBI GI NO: 30684325 NR Description: purine permease family [Arabidopsis thaliana]
  misc_feature (1)..(94): NCBI GI NO: 15236794 NR Description: putative protein; protein id: At4g18190.1
  misc_feature (1)..(93): NCBI GI NO: 38344291 NR Description: OSJNBa0013K16.23
  misc_feature (1)..(99): NCBI GI NO: 18491221 NR Description: unknown protein [Arabidopsis thaliana]
  misc_feature (1)..(93): NCBI GI NO: 38605752 NR Description: OSJNBb0016D16.5
PVSTYSLICASQLAFNAVFSYVLNAQKFTPFIFNSVILLTFSAALLGVDEDSQGTNGLSRGKYILGFALTLGASATYSLILSLIKSHSRRLLRRKLSQSC

SEQ ID NO: 40631 - DNA, 1841 bp, Zea mays subsp. mays
  misc_feature (1)..(1841): Ceres Seq. ID no. 12419338
gcacgagaccattacctagaacatcctaatcgaaaaacttgcgcatcggatcgcatcagctgctgcttttgtccaccaagcaacgattccctttccttccgccgcccaaatgccagtggccaccttcctcctcgtcgcgcttctctcgtgcggcgcacgagccatccggacgcacggcggctatgtctccgcggtcggggaccccggcatgcggcgcgacggcctccgcgtggcatgggaggcgtggaacttctgcaacgaggtcggccaggaggcccccggcatgggcagcccccgcggtgccgattgcttcgatcttctcggtccgtccattccatctctttctctcctctttcgccggggtggttgagtgggttgccaccaagattaggtttttgaggaagcgtggatctctgttccgttccgcagagacgagctccgacgaggagggggcggccggtgtactcggtggcgcacctggtgagcgacgccgacaaccgcctgggcgcgggcgacccgttcccggggtccccgccgggcgcggcccgcgtcacggacgccgacctctacgcgccggccaaggagctgtacctcggcgaccgctgccaggtggccgacaccccggcgccgtggcagttctggatggtcatgctcaagaacggcaacctcgacacaaccgccgccgcctgcccggagaacggccgccccgcgcgcccgttcccgcagacgtcccgcttcccgtgccccgccggcgccgggtgcatgaaccagccgctgctgttccacaaccgcaccgcgctggacgacgccggccgccggctccgcggcggcctgttcgggacctacgacctcgacgccgccgcgggtctcggcgctggcgacgtctccttctactccgggacgtgggagaaggaggtggcggcgagcggtcgcggcggcgggtgggcattccaccacaagctgcgcacgtccaccaagtacccgtggctgatgctgtacctacggtccgacgccacgaggggcttctccggcggttaccactacgacagcagaggcatgaccaagacagtgccggagtctccggacttcaaggtgcggctgaccctggacgtgaagcagggcggcgggcgcaacagccagttctacctgatggacatggtcagctgctggaagaacgacgggcgcgcctgcgacggcgacacggcgacggacgtgacgcggtacagcgagatgatcatcaacccggccacgccggcgtggtgctcgccgtcgcggatcgaccagtgcccgccatggcacaccttccggaacggcagccgcgtgcaccgccgcgacggagcccgcttcccctacggcgcctaccacgtgtactgctcccccgggaacgcggcgcgcgcggagcagcccaccacctactgcgacgcctacagcaacccgcaggcgcaggagatcctgcagctgctgccgcaccccgtgtggggagagttcggctacccgacggccaggggacaggggtgggtcggcgaccccagggcgtgggacctcgacgtcggcgccatgtcccaggcgctctacttctaccaggaccccggcacgccgccggccaggaggcggtggacgtcgctcgacgtcggcacggagatatacgtcagcgacagggccgaggaggcggagtggacgctcagtggcttcgacatccttgtgccggacaagtgtatcaagtcacagcaacgggccagcaacagctgctggtagacagacactttaatgtcactgtacgttacgctgagtagcatagcaggccaaagtgttcttcgtactagaagaggtggtgtaggatg

SEQ ID NO: 40632 - protein, 536 aa, Zea mays subsp. mays
  peptide (1)..(536): Ceres Seq. ID no. 12419339
  misc_feature (88)..(496): NCBI GI NO: 29247944 NR Description: GLP_26_54603_52153 [Giardia lamblia ATCC 50803]
  misc_feature (110)..(358): NCBI GI NO: 23106243 NR Description: hypothetical protein [Azotobacter vinelandii]
MSPRSGTPACGATASAWHGRRGTSATRSARRPPAWAAPAVPIASIFSVRPFHLFLSSFAGVVEWVATKIRFLRKRGSLFRSAETSSDEEGAAGVLGGAPGERRRQPPGRGRPVPGVPAGRGPRHGRRPLRAGQGAVPRRPLPGGRHPGAVAVLDGHAQERQPRHNRRRLPGERPPRAPVPADVPLPVPRRRRVHEPAAAVPQPHRAGRRRPPAPRRPVRDLRPRRRRGSRRWRRLLLLRDVGEGGGGERSRRRVGIPPQAAHVHQVPVADAVPTVRRHEGLLRRLPLRQQRHDQDSAGVSGLQGAADPGREAGRRAQQPVLPDGHGQLLEERRARLRRRHGDGRDAVQRDDHQPGHAGVVLAVADRPVPAMAHLPERQPRAPPRRSPLPLRRLPRVLLPRERGARGAAHHLLRRLQQPAGAGDPAAAAAPRVGRVRLPDGQGTGVGRRPQGVGPRRRRHVPGALLLPGPRHAAGQEAVDVARRRHGDIRQRQGRGGGVDAQWLRHPCAGQVYQVTATGQQQLLVDRHFNVTVRYAE

SEQ ID NO: 40633 - protein, 370 aa, Zea mays subsp. mays
  peptide (1)..(370): Ceres Seq. ID no. 12419340
  misc_feature (1)..(354): NCBI GI NO: 16612271 NR Description: At2g47010/F14M4.16 [Arabidopsis thaliana]
  misc_feature (1)..(356): NCBI GI NO: 30685122 NR Description: expressed protein [Arabidopsis thaliana]
  misc_feature (1)..(304): NCBI GI NO: 7459476 NR Description: hypothetical protein At2g47010
  misc_feature (315)..(354): NCBI GI NO: 7459476 NR Description: hypothetical protein At2g47010
  misc_feature (1)..(312): NCBI GI NO: 18407231 NR Description: expressed protein; protein id: At2g47010
  misc_feature (1)..(356): NCBI GI NO: 25335639 NR Description: F20D23.27 protein - Arabidopsis thaliana
  misc_feature (288)..(361): NCBI GI NO: 22328547 NR Description: hypothetical protein; protein id: At4g09965.1
MVMLKNGNLDTTAAACPENGRPARPFPQTSRFPCPAGAGCMNQPLLFHNRTALDDAGRRLRGGLFGTYDLDAAAGLGAGDVSFYSGTWEKEVAASGRGGGWAFHHKLRTSTKYPWLMLYLRSDATRGFSGGYHYDSRGMTKTVPESPDFKVRLTLDVKQGGGRNSQFYLMDMVSCWKNDGRACDGDTATDVTRYSEMIINPATPAWCSPSRIDQCPPWHTFRNGSRVHRRDGARFPYGAYHVYCSPGNAARAEQPTTYCDAYSNPQAQEILQLLPHPVWGEFGYPTARGQGWVGDPRAWDLDVGAMSQALYFYQDPGTPPARRRWTSLDVGTEIYVSDRAEEAEWTLSGFDILVPDKCIKSQQRASNSCW

SEQ ID NO: 40634 - protein, 368 aa, Zea mays subsp. mays
  peptide (1)..(368): Ceres Seq. ID no. 12419341
  misc_feature (1)..(352): NCBI GI NO: 16612271 NR Description: At2g47010/F14M4.16 [Arabidopsis thaliana]
  misc_feature (1)..(354): NCBI GI NO: 30685122 NR Description: expressed protein [Arabidopsis thaliana]
  misc_feature (1)..(302): NCBI GI NO: 7459476 NR Description: hypothetical protein At2g47010
  misc_feature (313)..(352): NCBI GI NO: 7459476 NR Description: hypothetical protein At2g47010
  misc_feature (1)..(310): NCBI GI NO: 18407231 NR Description: expressed protein; protein id: At2g47010
  misc_feature (1)..(354): NCBI GI NO: 25335639 NR Description: F20D23.27 protein - Arabidopsis thaliana
  misc_feature (286)..(359): NCBI GI NO: 22328547 NR Description: hypothetical protein; protein id: At4g09965.1
MLKNGNLDTTAAACPENGRPARPFPQTSRFPCPAGAGCMNQPLLFHNRTALDDAGRRLRGGLFGTYDLDAAAGLGAGDVSFYSGTWEKEVAASGRGGGWAFHHKLRTSTKYPWLMLYLRSDATRGFSGGYHYDSRGMTKTVPESPDFKVRLTLDVKQGGGRNSQFYLMDMVSCWKNDGRACDGDTATDVTRYSEMIINPATPAWCSPSRIDQCPPWHTFRNGSRVHRRDGARFPYGAYHVYCSPGNAARAEQPTTYCDAYSNPQAQEILQLLPHPVWGEFGYPTARGQGWVGDPRAWDLDVGAMSQALYFYQDPGTPPARRRWTSLDVGTEIYVSDRAEEAEWTLSGFDILVPDKCIKSQQRASNSCW

SEQ ID NO: 40635 - DNA, 2076 bp, Zea mays subsp. mays
  misc_feature (1)..(2076): Ceres Seq. ID no. 12381770
gcacgagaccattacctagaacatcctaatcgaaaaatcaaaccgctctcctctccttccctgcccccccctcgcaaccccgaagaagcccccacacgcaaggccgcaaacgcgccgcgcaccgcaaggtcccagggagcgacacgaggcggcctcattgcagcatggctgctatggccgccgccgccgccgccgccgctggcggcgtcgggctccatctcattggcgctgccacggccacgctcatcgcggcggtccttgttgcggccgtgctggggcgccgccgccgggcccgggcccgggcccaggcgcctccggtggaagggaaacccgcgccggaggcaggctgcgcggtcggtgacggcgcgggtcccgacggcgggacggacgtcatcatcgtcggcgccggagtggctggatctgcgctggcgttacacgctcggaaaggatggccgccgggtgcatgtcatcgagagggatctgacagaacctgacagaattgtgggcgagctgttgcaacctggaggttacttgaaattaattgagttaggcctccaagattgtgtggaagaaattgatgcccaacgggtgcttggttacgcattattcaaagatggaagaaacacaaagcttgcttatcccttagagaagttccattctgatgttgctggtaggagctttcacaatgggaggtttatacagaggatgcgtcagaaagctgcgtctttgcccaatgttcaattagaacaaggaactgttacatcacttcttgaagaaaatggtactgttaaaggtgttcaatacaaaaccaagtcaggtgaagaactaaaagcttatgcgcccttgacgattgtatgtgatggctgcttttcaaatctacggcgtgccctttgctctccaaaagttgatgttccatcatgttttgttgggctggtattggagaattgccaacttccacatccaaaccatggccatgttatcttggccaatccttcgccaatactattttacccaattagcagcacagaggtgcgctgtttggttgatgtccctggtcagaaggtgccttccatagctagcggtgaaatggcaaattatctcaaaaccgtcgttgcaccccagattcctccagaaatctatgactctttcatagcggccattgataagggaagcataagaacaatgccaaacaggagcatgccagcggctccacttcctacccctggcgcacttctgatgggggatgctttcaatatgagacaccctttaactggtggaggaatgaccgttgcattatccgacatcgttgtcctacgcaatcttctcaagcctctccgcaatctccacgacgcatcttccctgtgcaagtacctcgaatcgttctatacgctgcggaagccggttgcctccaccataaacacgttgtccggtgctctgtacaaggtcttcagcgcctcgcctgatgaagctaggaacgagatgcgccaggcctgttttgattacttgagcctcggaggcgtcttctcgaatgggcctattgccttactctcgggtcttaatcctcggccactgagtttagttgcacacttcttcgctgtcgctatctacggtgtcggtcgcttgatgctccctcttccttcacctaaacggatgtggattggagccaggctgatttctggtgcatgcggcatcatcctcccgatcatcaaagctgaaggcgtgagacagatgttcttccctgccactgtacccgcatattaccgggctgcgcctacgggagaataagtaaagcgcgcgagaaccgattccggggctgctgctcatcccaccatgatctgatggcaactgatgtgtcatggatggcaatttttttccctgtgttagtggttgttaggtggttggttgtgcttctgtcattggaatgaggaacctgtatagtgtgcccctggatagtggtcaaagttgggtcctacccatgtcgattactgccaagttgtatatgattctgttgaactagtgaaacctgcccccatctataacgcgtatcaatcttggttgctcccctgccccccgagc

SEQ ID NO: 40636 - protein, 594 aa, Zea mays subsp. mays
  peptide (1)..(594): Ceres Seq. ID no. 12381771
  misc_feature (279)..(477): Pfam Name: Pfam Description:  Monooxygenase
  misc_feature (145)..(589): NCBI GI NO: 27311241 NR Description: Putative Squalene monooxygenase
  misc_feature (145)..(594): NCBI GI NO: 27311240 NR Description: Putative Squalene monooxygenase
  misc_feature (145)..(591): NCBI GI NO: 27475612 NR Description: squalene monooxygenase 1 [Medicago truncatula]
  misc_feature (145)..(591): NCBI GI NO: 6685403 NR Description: Squalene monooxygenase (Squalene epoxidase) (SE)
  misc_feature (145)..(591): NCBI GI NO: 27475610 NR Description: squalene monooxygenase 2 [Medicago truncatula]
  misc_feature (145)..(594): NCBI GI NO: 18406296 NR Description: squalene monooxygenase, putative
  misc_feature (145)..(594): NCBI GI NO: 25404216 NR Description: probable squalene monooxygenase F9K23.3
  misc_feature (145)..(592): NCBI GI NO: 18420113 NR Description: squalene monooxygenase
  misc_feature (145)..(592): NCBI GI NO: 21537043 NR Description: squalene epoxidase-like protein
  misc_feature (145)..(591): NCBI GI NO: 15227757 NR Description: squalene monooxygenase
ARDHYLEHPNRKIKPLSSPSLPPPRNPEEAPTRKAANAPRTARSQGATRGGLIAAWLLWPPPPPPPLAASGSISLALPRPRSSRRSLLRPCWGAAAGPGPGPRRLRWKGNPRRRQAARSVTARVPTAGRTSSSSAPEWLDLRWRYTLGKDGRRVHVIERDLTEPDRIVGELLQPGGYLKLIELGLQDCVEEIDAQRVLGYALFKDGRNTKLAYPLEKFHSDVAGRSFHNGRFIQRMRQKAASLPNVQLEQGTVTSLLEENGTVKGVQYKTKSGEELKAYAPLTIVCDGCFSNLRRALCSPKVDVPSCFVGLVLENCQLPHPNHGHVILANPSPILFYPISSTEVRCLVDVPGQKVPSIASGEMANYLKTVVAPQIPPEIYDSFIAAIDKGSIRTMPNRSMPAAPLPTPGALLMGDAFNMRHPLTGGGMTVALSDIVVLRNLLKPLRNLHDASSLCKYLESFYTLRKPVASTINTLSGALYKVFSASPDEARNEMRQACFDYLSLGGVFSNGPIALLSGLNPRPLSLVAHFFAVAIYGVGRLMLPLPSPKRMWIGARLISGACGIILPIIKAEGVRQMFFPATVPAYYRAAPTGE

SEQ ID NO: 40637 - protein, 359 aa, Zea mays subsp. mays
  peptide (1)..(359): Ceres Seq. ID no. 12381772
  misc_feature (44)..(242): Pfam Name: Pfam Description:  Monooxygenase
  misc_feature (1)..(354): NCBI GI NO: 27311241 NR Description: Putative Squalene monooxygenase
  misc_feature (1)..(359): NCBI GI NO: 27311240 NR Description: Putative Squalene monooxygenase
  misc_feature (1)..(356): NCBI GI NO: 27475612 NR Description: squalene monooxygenase 1 [Medicago truncatula]
  misc_feature (1)..(356): NCBI GI NO: 6685403 NR Description: Squalene monooxygenase (Squalene epoxidase) (SE)
  misc_feature (1)..(356): NCBI GI NO: 27475610 NR Description: squalene monooxygenase 2 [Medicago truncatula]
  misc_feature (1)..(359): NCBI GI NO: 18406296 NR Description: squalene monooxygenase, putative
  misc_feature (1)..(359): NCBI GI NO: 25404216 NR Description: probable squalene monooxygenase F9K23.3
  misc_feature (1)..(357): NCBI GI NO: 18420113 NR Description: squalene monooxygenase
  misc_feature (1)..(357): NCBI GI NO: 21537043 NR Description: squalene epoxidase-like protein
  misc_feature (1)..(356): NCBI GI NO: 15227757 NR Description: squalene monooxygenase
MRQKAASLPNVQLEQGTVTSLLEENGTVKGVQYKTKSGEELKAYAPLTIVCDGCFSNLRRALCSPKVDVPSCFVGLVLENCQLPHPNHGHVILANPSPILFYPISSTEVRCLVDVPGQKVPSIASGEMANYLKTVVAPQIPPEIYDSFIAAIDKGSIRTMPNRSMPAAPLPTPGALLMGDAFNMRHPLTGGGMTVALSDIVVLRNLLKPLRNLHDASSLCKYLESFYTLRKPVASTINTLSGALYKVFSASPDEARNEMRQACFDYLSLGGVFSNGPIALLSGLNPRPLSLVAHFFAVAIYGVGRLMLPLPSPKRMWIGARLISGACGIILPIIKAEGVRQMFFPATVPAYYRAAPTGE

SEQ ID NO: 40638 - DNA, 399 bp, Zea mays subsp. mays
  misc_feature (1)..(399): Ceres Seq. ID no. 12419441
atccatcgagctgcccgcgcgcggcagttaagctcacacatcagctagctcaccttggacggccgaccaggtacgttccgcgagatggaggtggacgagggcgaggaggagacggcccggaccggcaggtccgtcgaggagcagatctcgtcgtgggagaagatcgcgggtgacatctccaggatccccgcgatggtggagctggacctggcgcggtccgcgcggcagtggcgggagccgaggctggaggccagggaggtcggcgccaggatagagaccctcatcttcgatgacatcaggagggagaccgtgtgcgacatgctcgcctcgcattgtagatcggcggcggcggcggcggcagcagcaacgtcttgttgatcgaggtagtaggaggagggg

SEQ ID NO: 40639 - protein, 97 aa, Zea mays subsp. mays
  peptide (1)..(97): Ceres Seq. ID no. 12419442
  misc_feature (1)..(97): NCBI GI NO: 12039271 NR Description: hypothetical protein [Oryza sativa]
MEVDEGEEETARTGRSVEEQISSWEKIAGDISRIPAMVELDLARSARQWREPRLEAREVGARIETLIFDDIRRETVCDMLASHCRSAAAAAAAATSC

SEQ ID NO: 40640 - protein, 61 aa, Zea mays subsp. mays
  peptide (1)..(61): Ceres Seq. ID no. 12419443
  misc_feature (1)..(61): NCBI GI NO: 12039271 NR Description: hypothetical protein [Oryza sativa]
MVELDLARSARQWREPRLEAREVGARIETLIFDDIRRETVCDMLASHCRSAAAAAAAATSC

SEQ ID NO: 40641 - protein, 56 aa, Zea mays subsp. mays
  peptide (1)..(56): Ceres Seq. ID no. 12419444
PSSCPRAAVKLTHQLAHLGRPTRYVPRDGGGRGRGGDGPDRQVRRGADLVVGEDRG

SEQ ID NO: 40642 - DNA, 454 bp, Zea mays subsp. mays
  misc_feature (1)..(454): Ceres Seq. ID no. 4614316
caggtgcctctattttcttcgaaagcatgtcgtacaaggtgaacccacaaactgggtatattgattacgacaagctcgaggagagagcaatggatttccacccgaaaattctcatatgtggtgggagctcttaccccagagagtgggactttgctcggatgagattgattgctgataagtgtggtgcagtgcttctttgcgatatggcacatatcagtgggcttgttgcagcaaaggaatgtcgtagccctttcgactactgtgatgttgttacgtcaactactcacaagaatcttaggggccctagaggtggtataatattcttcaggaaagggaaaaatttaaggaaacgagctggatctttttctcaaggagatgagaatgaatacgacttcgaggataggataaattttggtgtttttccttcaatgcaaggggggcccataataatcat

SEQ ID NO: 40643 - protein, 150 aa, Zea mays subsp. mays
  peptide (1)..(150): Ceres Seq. ID no. 4614317
  misc_feature (1)..(147): Pfam Name: Pfam Description:  Serine hydroxymethyltransferase
  misc_feature (1)..(147): NCBI GI NO: 34907298 NR Description: putative hydroxymethyltransferase
  misc_feature (2)..(147): NCBI GI NO: 18400090 NR Description: putative hydroxymethyltransferase
  misc_feature (2)..(147): NCBI GI NO: 25286207 NR Description: probable hydroxymethyltransferase, 49598-47322
  misc_feature (2)..(147): NCBI GI NO: 21537165 NR Description: putative hydroxymethyltransferase
  misc_feature (1)..(147): NCBI GI NO: 15219182 NR Description: glycine hydroxymethyltransferase, putative
  misc_feature (3)..(147): NCBI GI NO: 11762130 NR Description: AT4g13930 [Arabidopsis thaliana]
  misc_feature (3)..(147): NCBI GI NO: 15236375 NR Description: hydroxymethyltransferase; protein id: At4g13930
  misc_feature (3)..(147): NCBI GI NO: 21592544 NR Description: hydroxymethyltransferase [Arabidopsis thaliana]
  misc_feature (3)..(147): NCBI GI NO: 15236371 NR Description: glycine hydroxymethyltransferase - like protein
  misc_feature (3)..(147): NCBI GI NO: 1346156 NR Description: Serine hydroxymethyltransferase 2
GASIFFESMSYKVNPQTGYIDYDKLEERAMDFHPKILICGGSSYPREWDFARMRLIADKCGAVLLCDMAHISGLVAAKECRSPFDYCDVVTSTTHKNLRGPRGGIIFFRKGKNLRKRAGSFSQGDENEYDFEDRINFGVFPSMQGGPIII

SEQ ID NO: 40644 - protein, 142 aa, Zea mays subsp. mays
  peptide (1)..(142): Ceres Seq. ID no. 4614318
  misc_feature (1)..(139): Pfam Name: Pfam Description:  Serine hydroxymethyltransferase
  misc_feature (1)..(139): NCBI GI NO: 34907298 NR Description: putative hydroxymethyltransferase
  misc_feature (1)..(139): NCBI GI NO: 18400090 NR Description: putative hydroxymethyltransferase
  misc_feature (1)..(139): NCBI GI NO: 25286207 NR Description: probable hydroxymethyltransferase, 49598-47322
  misc_feature (1)..(139): NCBI GI NO: 21537165 NR Description: putative hydroxymethyltransferase
  misc_feature (1)..(139): NCBI GI NO: 15219182 NR Description: glycine hydroxymethyltransferase, putative
  misc_feature (1)..(139): NCBI GI NO: 11762130 NR Description: AT4g13930 [Arabidopsis thaliana]
  misc_feature (1)..(139): NCBI GI NO: 21592544 NR Description: hydroxymethyltransferase [Arabidopsis thaliana]
  misc_feature (1)..(139): NCBI GI NO: 15236375 NR Description: hydroxymethyltransferase; protein id: At4g13930
  misc_feature (1)..(139): NCBI GI NO: 15236371 NR Description: glycine hydroxymethyltransferase - like protein
  misc_feature (1)..(139): NCBI GI NO: 1346156 NR Description: Serine hydroxymethyltransferase 2
MSYKVNPQTGYIDYDKLEERAMDFHPKILICGGSSYPREWDFARMRLIADKCGAVLLCDMAHISGLVAAKECRSPFDYCDVVTSTTHKNLRGPRGGIIFFRKGKNLRKRAGSFSQGDENEYDFEDRINFGVFPSMQGGPIII

SEQ ID NO: 40645 - protein, 121 aa, Zea mays subsp. mays
  peptide (1)..(121): Ceres Seq. ID no. 4614319
  misc_feature (1)..(118): Pfam Name: Pfam Description:  Serine hydroxymethyltransferase
  misc_feature (1)..(118): NCBI GI NO: 34907298 NR Description: putative hydroxymethyltransferase
  misc_feature (1)..(118): NCBI GI NO: 18400090 NR Description: putative hydroxymethyltransferase
  misc_feature (1)..(118): NCBI GI NO: 25286207 NR Description: probable hydroxymethyltransferase, 49598-47322
  misc_feature (1)..(118): NCBI GI NO: 21537165 NR Description: putative hydroxymethyltransferase
  misc_feature (1)..(118): NCBI GI NO: 15219182 NR Description: glycine hydroxymethyltransferase, putative
  misc_feature (1)..(118): NCBI GI NO: 11762130 NR Description: AT4g13930 [Arabidopsis thaliana]
  misc_feature (1)..(118): NCBI GI NO: 21592544 NR Description: hydroxymethyltransferase [Arabidopsis thaliana]
  misc_feature (1)..(118): NCBI GI NO: 15236375 NR Description: hydroxymethyltransferase; protein id: At4g13930
  misc_feature (1)..(118): NCBI GI NO: 15236371 NR Description: glycine hydroxymethyltransferase - like protein
  misc_feature (1)..(118): NCBI GI NO: 1346156 NR Description: Serine hydroxymethyltransferase 2
MDFHPKILICGGSSYPREWDFARMRLIADKCGAVLLCDMAHISGLVAAKECRSPFDYCDVVTSTTHKNLRGPRGGIIFFRKGKNLRKRAGSFSQGDENEYDFEDRINFGVFPSMQGGPIII

SEQ ID NO: 40646 - DNA, 1999 bp, Zea mays subsp. mays
  misc_feature (1)..(1999): Ceres Seq. ID no. 12359114
aactgaggcgagggagagagagagagagtgagtgagtgagtaatgggcggttcatcaggccttgtggactggagaggacggccggtgaacaccaagaagcatggaggagtgagagcttcaattttcattcatgcgctggtgctgctcagcaacgtagccaacattgccagtatactgaatcgtaagctatctgcgcgaggagatgcacatggatgtcgcgagggcgacgacgatggcgagcaatttctttgccgcgctgcaaatgttctccatcccagcagccttccttgctgactcctacatcaagcgtttctacactgtcctcatctttggcccaattgaaatactgggctacatcctgctcgcggtccaagcacatgtcccatccctgcacccaccaccgtgcgtccctggacaagagacaagtacgtgtgagtccgtgagcggttcgaacctgagcctgctcctcctgggtctctacctgatccccatcggcgatggggcggctcgggcatgcctcccggctctcggcggggagcagttcgacaggtcggatcccgtagagcagaggcaggagtcgagcttcttcaactggtacaccttctccgtctcgacgggtggcttcgtggggctggtcttcatcgtgtgggtggagaacagtaaaggctgggacgtaggcttcgccgtctgtgccttgtccgtgctcctcgggatgctgatatggattgctggcctcccgttatacaggaaccagctgccaactagtagccccatcacaagaatactgcaggttcttgtagctgcattcaagaaaagaaatgttgcattaccggccaaccccagtgagctaaagcaaataagtcaaggcgacgccggttccctcgagattctgcatagaaccgacggatttcgctgccttgacaaagcagcggtggacaccggaaggaccggtggctggattctctgcagcataacccaggtggaggagactaagatcattctccggatggtgcccatcttcctgagtgctgtcctaggctacattccggtgcctctcatcctcaatttcaccgtgcagcagggcaacacaatggacaccaggcttggcgcacttcacatctcacccgcgacgctattcatcatccctacgcttttccagatggtgatcctcgttgtttacgaccggttcattgtcccgttcctaagacggataaccgggtacgtgggcggtgtcacgcacctccagcgcatcggcatcggattcctttcaaccgtagtggccaccggcgttgcagcaatagtggaggccagtaggaaaaaggtggtacgagacagttgccttgtggatgctacagctggaattccaatatctgttttctggctgaccatacagttcttcctgctaggcattgtggatgtcacctcctttgtagggcttcttgagttcttctacagtgaggcgtccacggggatgaagtctattggaagctccatcttctactgcatccttggggtgtcagcttggttggggagcctgttgattcaagtggcaaaccgagttacaagacaccgcgatggcacaggaggctggcttgatgggaccaacttgaacaaggggaaacttgaacgattctattggttgctagcagttcttgagctggtgtcgctattagtctacgtcttcttcgcctccaggtatgtttacgggaatgaccaaagggttgtggctgacgaagataataatacggctccatctgatggtaccataaatgttatctgattgttagagcgtagtggtaacgagactgagagattgtgcaaatgacagagacagaatgacagttgtctttattgcaaggaagacaatgcttatatatacagacgaactagtgcctccccaaggggtgcgtcccttggggagaaactgtcgcaccccatggaggggattgaacacacatattgtaacactcccccttaatcaatctaagtccatttgatc

SEQ ID NO: 40647 - protein, 525 aa, Zea mays subsp. mays
  peptide (1)..(525): Ceres Seq. ID no. 12359115
  misc_feature (37)..(434): Pfam Name: Pfam Description:  POT family
  misc_feature (1)..(510): NCBI GI NO: 21742982 NR Description: OSJNBa0076N16.17
  misc_feature (1)..(513): NCBI GI NO: 38347451 NR Description: OSJNBa0076N16.20
  misc_feature (1)..(505): NCBI GI NO: 34909514 NR Description: putative nitrate transporter
  misc_feature (233)..(501): NCBI GI NO: 17064754 NR Description: nitrate transporter (NTL1) [Arabidopsis thaliana]
  misc_feature (1)..(204): NCBI GI NO: 17064754 NR Description: nitrate transporter (NTL1) [Arabidopsis thaliana]
  misc_feature (233)..(501): NCBI GI NO: 11358579 NR Description: nitrate transporter NTL1
  misc_feature (233)..(501): NCBI GI NO: 25404844 NR Description: nitrate transporter (NTL1), 53025-56402
  misc_feature (233)..(501): NCBI GI NO: 18409382 NR Description: nitrate transporter (NTL1); protein id:At1g69850
  misc_feature (1)..(204): NCBI GI NO: 11358579 NR Description: nitrate transporter NTL1
  misc_feature (1)..(204): NCBI GI NO: 25404844 NR Description: nitrate transporter (NTL1), 53025-56402
MHMDVARATTMASNFFAALQMFSIPAAFLADSYIKRFYTVLIFGPIEILGYILLAVQAHVPSLHPPPCVPGQETSTCESVSGSNLSLLLLGLYLIPIGDGAARACLPALGGEQFDRSDPVEQRQESSFFNWYTFSVSTGGFVGLVFIVWVENSKGWDVGFAVCALSVLLGMLIWIAGLPLYRNQLPTSSPITRILQVLVAAFKKRNVALPANPSELKQISQGDAGSLEILHRTDGFRCLDKAAVDTGRTGGWILCSITQVEETKIILRMVPIFLSAVLGYIPVPLILNFTVQQGNTMDTRLGALHISPATLFIIPTLFQMVILVVYDRFIVPFLRRITGYVGGVTHLQRIGIGFLSTVVATGVAAIVEASRKKVVRDSCLVDATAGIPISVFWLTIQFFLLGIVDVTSFVGLLEFFYSEASTGMKSIGSSIFYCILGVSAWLGSLLIQVANRVTRHRDGTGGWLDGTNLNKGKLERFYWLLAVLELVSLLVYVFFASRYVYGNDQRVVADEDNNTAPSDGTINVI

SEQ ID NO: 40648 - protein, 523 aa, Zea mays subsp. mays
  peptide (1)..(523): Ceres Seq. ID no. 12359116
  misc_feature (35)..(432): Pfam Name: Pfam Description:  POT family
  misc_feature (1)..(508): NCBI GI NO: 21742982 NR Description: OSJNBa0076N16.17
  misc_feature (1)..(511): NCBI GI NO: 38347451 NR Description: OSJNBa0076N16.20
  misc_feature (1)..(503): NCBI GI NO: 34909514 NR Description: putative nitrate transporter
  misc_feature (231)..(499): NCBI GI NO: 17064754 NR Description: nitrate transporter (NTL1) [Arabidopsis thaliana]
  misc_feature (1)..(202): NCBI GI NO: 17064754 NR Description: nitrate transporter (NTL1) [Arabidopsis thaliana]
  misc_feature (231)..(499): NCBI GI NO: 11358579 NR Description: nitrate transporter NTL1
  misc_feature (231)..(499): NCBI GI NO: 25404844 NR Description: nitrate transporter (NTL1), 53025-56402
  misc_feature (231)..(499): NCBI GI NO: 18409382 NR Description: nitrate transporter (NTL1); protein id:At1g69850
  misc_feature (1)..(202): NCBI GI NO: 11358579 NR Description: nitrate transporter NTL1
  misc_feature (1)..(202): NCBI GI NO: 25404844 NR Description: nitrate transporter (NTL1), 53025-56402
MDVARATTMASNFFAALQMFSIPAAFLADSYIKRFYTVLIFGPIEILGYILLAVQAHVPSLHPPPCVPGQETSTCESVSGSNLSLLLLGLYLIPIGDGAARACLPALGGEQFDRSDPVEQRQESSFFNWYTFSVSTGGFVGLVFIVWVENSKGWDVGFAVCALSVLLGMLIWIAGLPLYRNQLPTSSPITRILQVLVAAFKKRNVALPANPSELKQISQGDAGSLEILHRTDGFRCLDKAAVDTGRTGGWILCSITQVEETKIILRMVPIFLSAVLGYIPVPLILNFTVQQGNTMDTRLGALHISPATLFIIPTLFQMVILVVYDRFIVPFLRRITGYVGGVTHLQRIGIGFLSTVVATGVAAIVEASRKKVVRDSCLVDATAGIPISVFWLTIQFFLLGIVDVTSFVGLLEFFYSEASTGMKSIGSSIFYCILGVSAWLGSLLIQVANRVTRHRDGTGGWLDGTNLNKGKLERFYWLLAVLELVSLLVYVFFASRYVYGNDQRVVADEDNNTAPSDGTINVI

SEQ ID NO: 40649 - protein, 515 aa, Zea mays subsp. mays
  peptide (1)..(515): Ceres Seq. ID no. 12359117
  misc_feature (27)..(424): Pfam Name: Pfam Description:  POT family
  misc_feature (1)..(500): NCBI GI NO: 21742982 NR Description: OSJNBa0076N16.17
  misc_feature (1)..(503): NCBI GI NO: 38347451 NR Description: OSJNBa0076N16.20
  misc_feature (1)..(495): NCBI GI NO: 34909514 NR Description: putative nitrate transporter
  misc_feature (223)..(491): NCBI GI NO: 17064754 NR Description: nitrate transporter (NTL1) [Arabidopsis thaliana]
  misc_feature (1)..(194): NCBI GI NO: 17064754 NR Description: nitrate transporter (NTL1) [Arabidopsis thaliana]
  misc_feature (223)..(491): NCBI GI NO: 11358579 NR Description: nitrate transporter NTL1
  misc_feature (223)..(491): NCBI GI NO: 18409382 NR Description: nitrate transporter (NTL1); protein id:At1g69850
  misc_feature (223)..(491): NCBI GI NO: 25404844 NR Description: nitrate transporter (NTL1), 53025-56402
  misc_feature (1)..(194): NCBI GI NO: 11358579 NR Description: nitrate transporter NTL1
  misc_feature (1)..(194): NCBI GI NO: 18409382 NR Description: nitrate transporter (NTL1); protein id:At1g69850
MASNFFAALQMFSIPAAFLADSYIKRFYTVLIFGPIEILGYILLAVQAHVPSLHPPPCVPGQETSTCESVSGSNLSLLLLGLYLIPIGDGAARACLPALGGEQFDRSDPVEQRQESSFFNWYTFSVSTGGFVGLVFIVWVENSKGWDVGFAVCALSVLLGMLIWIAGLPLYRNQLPTSSPITRILQVLVAAFKKRNVALPANPSELKQISQGDAGSLEILHRTDGFRCLDKAAVDTGRTGGWILCSITQVEETKIILRMVPIFLSAVLGYIPVPLILNFTVQQGNTMDTRLGALHISPATLFIIPTLFQMVILVVYDRFIVPFLRRITGYVGGVTHLQRIGIGFLSTVVATGVAAIVEASRKKVVRDSCLVDATAGIPISVFWLTIQFFLLGIVDVTSFVGLLEFFYSEASTGMKSIGSSIFYCILGVSAWLGSLLIQVANRVTRHRDGTGGWLDGTNLNKGKLERFYWLLAVLELVSLLVYVFFASRYVYGNDQRVVADEDNNTAPSDGTINVI

SEQ ID NO: 40650 - DNA, 759 bp, Zea mays subsp. mays
  misc_feature (1)..(759): Ceres Seq. ID no. 12483059
catacacacacagccccatcccgccgcccgcaaggaaccagcgccaccttaggttagggcggccgcgcggagaagtgcgcggttgccaagatgcagatcttcgtgaagaccctgacggggaagaccatcacgctggaggtggagtcctcggacaccatcgacaacgtgaaggccaagatccaggacaaggagggcatcccgccggaccagcagcgcctcatcttcgccggcaagcagctcgaggatggccgcaccctcgccgactacaacatccagaaggagtcgacgctgcacctggtcgtccgcctcaggggaggcgccaagaagccgaagaagaagacgtacaccaagcccaagaagatcaagcacaagcacaagaaggtgaagctcgccgtgctccagttctacaaggttgacgacgccaccggcaaggtcacccgcctccgcaaggattgccccaacgccgagtgccatgcgggggtcttcatggccaaccacttcgaccgccactactgcggtaagtgtggcctcacctacgtctacaaccagcaggcgtaggatgccccttctttctttcggtaaggaaactgggaagtcttgctaggtgataatcctttttgctttgttttgttttgttgcaatggtagtagtttcttggaacagaacacctgtatctcttttggcgacgcttaatttgggtttaattatatcatgtcgttatgggtcctgtcaagcactgttgaattcgaatggtttttg

SEQ ID NO: 40651 - protein, 155 aa, Zea mays subsp. mays
  peptide (1)..(155): Ceres Seq. ID no. 12483060
  misc_feature (1)..(74): Pfam Name: Pfam Description:  Ubiquitin family
  misc_feature (1)..(155): NCBI GI NO: 1044940 NR Description: fusion gene [Zea mays]
  misc_feature (1)..(155): NCBI GI NO: 82733 NR Description: ubiquitin / ribosomal protein S27a - maize
  misc_feature (1)..(155): NCBI GI NO: 34894792 NR Description: ubiquitin / ribosomal protein S27a
  misc_feature (1)..(155): NCBI GI NO: 100598 NR Description: ubiquitin / ribosomal protein S27a.1 - barley
  misc_feature (1)..(155): NCBI GI NO: 100599 NR Description: ubiquitin / ribosomal protein S27a.2 - barley
  misc_feature (1)..(155): NCBI GI NO: 902525 NR Description: ubiquitin fusion protein
  misc_feature (1)..(155): NCBI GI NO: 34581769 NR Description: ubiquitin extension protein [Cucumis sativus]
  misc_feature (1)..(155): NCBI GI NO: 279636 NR Description: ubiquitin / ribosomal protein S27a - tomato
  misc_feature (1)..(155): NCBI GI NO: 25294256 NR Description: ubiquitin extension protein
  misc_feature (1)..(155): NCBI GI NO: 541954 NR Description: ubiquitin/ribosomal protein S27a fusion protein -white lupine
MQIFVKTLTGKTITLEVESSDTIDNVKAKIQDKEGIPPDQQRLIFAGKQLEDGRTLADYNIQKESTLHLVVRLRGGAKKPKKKTYTKPKKIKHKHKKVKLAVLQFYKVDDATGKVTRLRKDCPNAECHAGVFMANHFDRHYCGKCGLTYVYNQQA

SEQ ID NO: 40652 - protein, 137 aa, Zea mays subsp. mays
  peptide (1)..(137): Ceres Seq. ID no. 12483061
YTHSPIPPPARNQRHLRLGRPRGEVRGCQDADLREDPDGEDHHAGGGVLGHHRQREGQDPGQGGHPAGPAAPHLRRQAARGWPHPRRLQHPEGVDAAPGRPPQGRRQEAEEEDVHQAQEDQAQAQEGEARRAPVLQG

SEQ ID NO: 40653 - DNA, 1883 bp, Zea mays subsp. mays
  misc_feature (1)..(1883): Ceres Seq. ID no. 12418285
agtatctctagctagttggccggaatgaccgccaccacctccgacaggtcggtctcgaaagccctcacgaggttccctatgaacttgcgggtgactccggtgaggttggccaccttctgcctgtacgccctgaacgcatcgccgtcgacgggcgcggcctccccgccggcgccgaagagttccttcctctccagctcggcggaggcgtgcaggcactcgagccagcggttggcctggttctgcaggtcgtcgaacagcccgcgcttggtgacgtcgcgctccgggtccaggaagtagccgtacgcgtgcgcccaccgcaggatccgccgcccttcggccacctgccggtaggcctcggccacgaacccgagctccgtggccgggacgtccgccgccctcgccatccactccagctccccgcgctccagcgtcgccgtgtccctggccacgctctccagcgccgcgcggttcgacacccaccgctcgtagtggtacaggtacctctccagcgacgccctggccaaccgcctcgcctccttctcctcggcgccggcgccggcgacgcccgtctcggccggcggatgtgggcggaggtcgttgcaggcgtagtggttctcccctcccgccggctgcaggcagagccagcagaagcggtggccgcacggcggcgagcaccgcatgtggttgcagccctggttcttctcgatggggcggccgcatctggggcacggcttggtgtgcgccatcacccagttggccgtctccgccgagtcggagctgttcttgagcagccacgcgtgcaccgtggcgcacgacaccggccggtgcgcctcctcgccgcaggcccagcagactccgtaccgtacacgcagaacacgtccgccgccgcgtcaccgccgcccgacgactccagcgcgcgggcgcacccggggccgccgcaccaccgcaccctcccgccgctctcctccacgtacgaccggagccagaaccgcgcgtaccggcccacgtcgtccgccgccagcacctcgtccacgagctcccggacgacgggcgccgagcagcgcgggtccgggcaccgcagcgacaggcagcgcgggccgtcgcccaccgccgcgcggacgtacccgcgccagcacccgttgcagtagtagtgggagcagcccgcggacgccgtctgccccgcgggctgctcgtcgaagcagatggcgcagacgcgcggccgcaagccgcgcgccgcggggacgagctggcccgggggaaggccggcggcgccgcgcacgcgccgctcgtccgcgaaccactcctcctggacccgcccgacgcgccacttgaagtggcgcagcaggacggccgcgaagcccggcgggatggacagcacctcggcgaccctggcggtgtccgcctcttgccgcgcgcggacgtcgtcctcggtcagaacggcgtacctctgctccccgtcgcacgccgcggcgtcggcctgtgtctgctcggctcctccttcgcagtcgtcgtcgtcgtcgtcgtcgtactcgaacatgtaatcctcgtcgccggagctgctgccgtcgtcagccgtttcctgggcatgcccgcgagagccatcgccatcggcgctctctccgtcgtcgtcgtggtcgcggccggatctaggggctgcttcgcatgtcttgccgcggcggctcgtcccgcagctgtcgtcgtcgtggcccgtgcagctgctgacctgtcggtacctcttgttggagacagcgccgccgccagacgccatgccgccgagccgcggtttcttggcgagggatttggactacatccttctctaacagcgttctggtccgttgatatgtactggtggatagtggtaatccatcggacgtttcggccgg

SEQ ID NO: 40654 - protein, 217 aa, Zea mays subsp. mays
  peptide (1)..(217): Ceres Seq. ID no. 12418286
  misc_feature (154)..(217): Pfam Name: Pfam Description:  Cupin
  misc_feature (49)..(217): NCBI GI NO: 6649242 NR Description: splicing coactivator subunit SRm300 [Homo sapiens]
  misc_feature (45)..(217): NCBI GI NO: 34872074 NR Description: similar to Ser/Arg-related nuclear matrix protein
  misc_feature (49)..(217): NCBI GI NO: 34872074 NR Description: similar to Ser/Arg-related nuclear matrix protein
  misc_feature (54)..(217): NCBI GI NO: 30984464 NR Description: very large tegument protein
  misc_feature (56)..(217): NCBI GI NO: 34868816 NR Description: similar to splicing coactivator subunit SRm300
  misc_feature (56)..(217): NCBI GI NO: 5821151 NR Description: RNA binding protein [Homo sapiens]
  misc_feature (56)..(217): NCBI GI NO: 6634015 NR Description: KIAA0324 protein [Homo sapiens]
  misc_feature (56)..(217): NCBI GI NO: 7512967 NR Description: hypothetical protein KIAA0324 - human (fragment)
  misc_feature (41)..(217): NCBI GI NO: 29247944 NR Description: GLP_26_54603_52153 [Giardia lamblia ATCC 50803]
  misc_feature (56)..(217): NCBI GI NO: 6649242 NR Description: splicing coactivator subunit SRm300 [Homo sapiens]
MWLQPWFFSMGRPHLGHGLVCAITQLAVSAESELFLSSHACTVAHDTGRCASSPQAQQTPYRTRRTRPPPRHRRPTTPARGRTRGRRTTAPSRRSPPRTTGARTARTGPRRPPPAPRPRAPGRRAPSSAGPGTAATGSAGRRPPPRGRTRASTRCSSSGSSPRTPSAPRAARRSRWRRRAAASRAPRGRAGPGEGRRRRARAARPRTTPPGPARRAT

SEQ ID NO: 40655 - protein, 208 aa, Zea mays subsp. mays
  peptide (1)..(208): Ceres Seq. ID no. 12418287
  misc_feature (145)..(208): Pfam Name: Pfam Description:  Cupin
  misc_feature (40)..(208): NCBI GI NO: 6649242 NR Description: splicing coactivator subunit SRm300 [Homo sapiens]
  misc_feature (36)..(208): NCBI GI NO: 34872074 NR Description: similar to Ser/Arg-related nuclear matrix protein
  misc_feature (40)..(208): NCBI GI NO: 34872074 NR Description: similar to Ser/Arg-related nuclear matrix protein
  misc_feature (45)..(208): NCBI GI NO: 30984464 NR Description: very large tegument protein
  misc_feature (47)..(208): NCBI GI NO: 34868816 NR Description: similar to splicing coactivator subunit SRm300
  misc_feature (47)..(208): NCBI GI NO: 5821151 NR Description: RNA binding protein [Homo sapiens]
  misc_feature (47)..(208): NCBI GI NO: 6634015 NR Description: KIAA0324 protein [Homo sapiens]
  misc_feature (47)..(208): NCBI GI NO: 7512967 NR Description: hypothetical protein KIAA0324 - human (fragment)
  misc_feature (32)..(208): NCBI GI NO: 29247944 NR Description: GLP_26_54603_52153 [Giardia lamblia ATCC 50803]
  misc_feature (47)..(208): NCBI GI NO: 6649242 NR Description: splicing coactivator subunit SRm300 [Homo sapiens]
MGRPHLGHGLVCAITQLAVSAESELFLSSHACTVAHDTGRCASSPQAQQTPYRTRRTRPPPRHRRPTTPARGRTRGRRTTAPSRRSPPRTTGARTARTGPRRPPPAPRPRAPGRRAPSSAGPGTAATGSAGRRPPPRGRTRASTRCSSSGSSPRTPSAPRAARRSRWRRRAAASRAPRGRAGPGEGRRRRARAARPRTTPPGPARRAT

SEQ ID NO: 40656 - protein, 188 aa, Zea mays subsp. mays
  peptide (1)..(188): Ceres Seq. ID no. 12418288
  misc_feature (81)..(188): NCBI GI NO: 24648035 NR Description: CG7709-PA [Drosophila melanogaster]
  misc_feature (90)..(188): NCBI GI NO: 13592175 NR Description: ppg3 [Leishmania major]
  misc_feature (86)..(188): NCBI GI NO: 13592175 NR Description: ppg3 [Leishmania major]
  misc_feature (86)..(188): NCBI GI NO: 13592175 NR Description: ppg3 [Leishmania major]
  misc_feature (86)..(188): NCBI GI NO: 13592175 NR Description: ppg3 [Leishmania major]
  misc_feature (86)..(188): NCBI GI NO: 13592175 NR Description: ppg3 [Leishmania major]
  misc_feature (86)..(188): NCBI GI NO: 13592175 NR Description: ppg3 [Leishmania major]
  misc_feature (90)..(188): NCBI GI NO: 13592175 NR Description: ppg3 [Leishmania major]
  misc_feature (94)..(188): NCBI GI NO: 5420387 NR Description: proteophosphoglycan [Leishmania major]
  misc_feature (86)..(188): NCBI GI NO: 13592175 NR Description: ppg3 [Leishmania major]
MWAEVVAGVVVLPSRRLQAEPAEAVAARRRAPHVVAALVLLDGAAASGARLGVRHHPVGRLRRVGAVLEQPRVHRGARHRPVRLLAAGPADSVPYTQNTSAAASPPPDDSSARAHPGPPHHRTLPPLSSTYDRSQNRAYRPTSSAASTSSTSSRTTGAEQRGSGHRSDRQRGPSPTAARTYPRQHPLQ

SEQ ID NO: 40657 - DNA, 1764 bp, Zea mays subsp. mays
  misc_feature (1)..(1764): Ceres Seq. ID no. 12375648
atcacgcacggccacacctgccctccattccatccagcacctagaaaaaactaatcgcaattagttgacgcataatattttgagggaggagaaggggggaattgactagttgaccaatcgcgagtggcgatgatgatgcagttgggggccaggagtttggtgaggaggttctcccgtctcgccgcggcgggggccccggccgagacgacgtcggctggcgtgccgcgaatgccggcgttcgaccacgtcccgctgccctacgacgggccgagcgccgccgacatcgcccgcaagcgcgccgagtacctcagcccgtccctcttccacttctactccaagcctctgaacatcgtggagggcaagaggcagtacttgtacgacgagcacggccggcgctacctggacgcgttcgccggcatcgccaccgtgtgctgcggccactgccaccccgacgtcgtggacgcgatcaccaggcaggccaagcgcctgcagcactccaccgtgctctacctcaaccacgtcatcgccgatttcgccgaggcgctggcatccaagctgcccggcgacctcaaggtcgtcttcttcaccaactccggcacggaggcgaacgagctggccatcctgatggcgcggctgtacaccggctcccacgacatcatctccctccgcaactcgtaccacggcaacgcggccgggaccatgggagccaccgcgcagaagaactggaagttcaacgtcatccagagtggcgtgcaccacgcggtgaacccggacccctacagaggcgccttcggctccgacgccgagaagtacgtgcgggacgtgcaggagatcatcgagttcggcaccaccggccaggtcgccggcttcatatccgaggccatccagggcgtgggcggaatcgtggaggtgtcgccgggctacctgccgctggcgtacgacaaggtccggaaggccggcgggctctgcatcgccgacgaggtccaggcgggtttcgcccgcgtcggcagccacttctggggcttcgagacccacggcgtcgtccccgacatagtgaccatggcaaagggcatcggcaacggcatcccgctgggcgccgtggtgacgacgccggaggtcgcgcaggtgctgacccggcgctgctacttcaacacgttcggcggcaacccgctgtgcaccgccggcgggctcgccgtcctcgaggtgctcgagaaggagaggctccaggagaacgccttcgtcgtcggctcctacctcaaggaccgcctccgcggtctccaggagaagcacgagatcatcggcgacgtgaggggaacgggtttcatgctcggcatcgagctggtcaccgatcggcagctcaagacgccggcgaaagatgagatctgccacgccatggaatacatgaaagatatgggcgtcttggtcggcaaaggcgggttctatgggaacgtcttcaggatcactccccctctatgcttcaccaaggaagatgctgatttcttcgtcgaggtgatggacattgcgctgtcgaagctctgagctgtggccgtcaggcggaggggcggtgtgtctgtctgtatatataatcctcgcccgagtttagcagctgcgtcggagttgtactatctcactcaagagaatggcgaaaaaaccttggcagtttgtgactcaaggggaaaaaactaaaccatgcagacgaatttggcttatcgcaacgctagcttttaattcagctttcgtctggagatgacgtgccttgtaacg

SEQ ID NO: 40658 - protein, 469 aa, Zea mays subsp. mays
  peptide (1)..(469): Ceres Seq. ID no. 12375649
  misc_feature (62)..(469): Pfam Name: Pfam Description:  Aminotransferase class-III
  misc_feature (25)..(469): NCBI GI NO: 15231974 NR Description: putative aminotransferase; protein id: At3g08860
  misc_feature (9)..(469): NCBI GI NO: 15224499 NR Description: putative beta-alanine-pyruvate aminotransferase
  misc_feature (9)..(469): NCBI GI NO: 15028237 NR Description: putative beta-alanine-pyruvate aminotransferase
  misc_feature (12)..(469): NCBI GI NO: 5731259 NR Description: alanine:glyoxylate aminotransferase 2 homolog
  misc_feature (12)..(469): NCBI GI NO: 18420498 NR Description: putative protein; protein id: At4g39660
  misc_feature (219)..(468): NCBI GI NO: 16198011 NR Description: LD24726p [Drosophila melanogaster]
  misc_feature (219)..(468): NCBI GI NO: 28574759 NR Description: CG11241-PA [Drosophila melanogaster]
  misc_feature (1)..(222): NCBI GI NO: 16198011 NR Description: LD24726p [Drosophila melanogaster]
  misc_feature (1)..(222): NCBI GI NO: 28574759 NR Description: CG11241-PA [Drosophila melanogaster]
  misc_feature (225)..(462): NCBI GI NO: 39595899 NR Description: Hypothetical protein CBG12888
MMMQLGARSLVRRFSRLAAAGAPAETTSAGVPRMPAFDHVPLPYDGPSAADIARKRAEYLSPSLFHFYSKPLNIVEGKRQYLYDEHGRRYLDAFAGIATVCCGHCHPDVVDAITRQAKRLQHSTVLYLNHVIADFAEALASKLPGDLKVVFFTNSGTEANELAILMARLYTGSHDIISLRNSYHGNAAGTMGATAQKNWKFNVIQSGVHHAVNPDPYRGAFGSDAEKYVRDVQEIIEFGTTGQVAGFISEAIQGVGGIVEVSPGYLPLAYDKVRKAGGLCIADEVQAGFARVGSHFWGFETHGVVPDIVTMAKGIGNGIPLGAVVTTPEVAQVLTRRCYFNTFGGNPLCTAGGLAVLEVLEKERLQENAFVVGSYLKDRLRGLQEKHEIIGDVRGTGFMLGIELVTDRQLKTPAKDEICHAMEYMKDMGVLVGKGGFYGNVFRITPPLCFTKEDADFFVEVMDIALSKL

SEQ ID NO: 40659 - protein, 468 aa, Zea mays subsp. mays
  peptide (1)..(468): Ceres Seq. ID no. 12375650
  misc_feature (61)..(468): Pfam Name: Pfam Description:  Aminotransferase class-III
  misc_feature (24)..(468): NCBI GI NO: 15231974 NR Description: putative aminotransferase; protein id: At3g08860
  misc_feature (8)..(468): NCBI GI NO: 15224499 NR Description: putative beta-alanine-pyruvate aminotransferase
  misc_feature (8)..(468): NCBI GI NO: 15028237 NR Description: putative beta-alanine-pyruvate aminotransferase
  misc_feature (11)..(468): NCBI GI NO: 5731259 NR Description: alanine:glyoxylate aminotransferase 2 homolog
  misc_feature (11)..(468): NCBI GI NO: 18420498 NR Description: putative protein; protein id: At4g39660
  misc_feature (218)..(467): NCBI GI NO: 16198011 NR Description: LD24726p [Drosophila melanogaster]
  misc_feature (218)..(467): NCBI GI NO: 28574759 NR Description: CG11241-PA [Drosophila melanogaster]
  misc_feature (1)..(221): NCBI GI NO: 16198011 NR Description: LD24726p [Drosophila melanogaster]
  misc_feature (1)..(221): NCBI GI NO: 28574759 NR Description: CG11241-PA [Drosophila melanogaster]
  misc_feature (224)..(461): NCBI GI NO: 39595899 NR Description: Hypothetical protein CBG12888
MMQLGARSLVRRFSRLAAAGAPAETTSAGVPRMPAFDHVPLPYDGPSAADIARKRAEYLSPSLFHFYSKPLNIVEGKRQYLYDEHGRRYLDAFAGIATVCCGHCHPDVVDAITRQAKRLQHSTVLYLNHVIADFAEALASKLPGDLKVVFFTNSGTEANELAILMARLYTGSHDIISLRNSYHGNAAGTMGATAQKNWKFNVIQSGVHHAVNPDPYRGAFGSDAEKYVRDVQEIIEFGTTGQVAGFISEAIQGVGGIVEVSPGYLPLAYDKVRKAGGLCIADEVQAGFARVGSHFWGFETHGVVPDIVTMAKGIGNGIPLGAVVTTPEVAQVLTRRCYFNTFGGNPLCTAGGLAVLEVLEKERLQENAFVVGSYLKDRLRGLQEKHEIIGDVRGTGFMLGIELVTDRQLKTPAKDEICHAMEYMKDMGVLVGKGGFYGNVFRITPPLCFTKEDADFFVEVMDIALSKL

SEQ ID NO: 40660 - protein, 467 aa, Zea mays subsp. mays
  peptide (1)..(467): Ceres Seq. ID no. 12375651
  misc_feature (60)..(467): Pfam Name: Pfam Description:  Aminotransferase class-III
  misc_feature (23)..(467): NCBI GI NO: 15231974 NR Description: putative aminotransferase; protein id: At3g08860
  misc_feature (7)..(467): NCBI GI NO: 15224499 NR Description: putative beta-alanine-pyruvate aminotransferase
  misc_feature (7)..(467): NCBI GI NO: 15028237 NR Description: putative beta-alanine-pyruvate aminotransferase
  misc_feature (10)..(467): NCBI GI NO: 5731259 NR Description: alanine:glyoxylate aminotransferase 2 homolog
  misc_feature (10)..(467): NCBI GI NO: 18420498 NR Description: putative protein; protein id: At4g39660
  misc_feature (217)..(466): NCBI GI NO: 16198011 NR Description: LD24726p [Drosophila melanogaster]
  misc_feature (217)..(466): NCBI GI NO: 28574759 NR Description: CG11241-PA [Drosophila melanogaster]
  misc_feature (1)..(220): NCBI GI NO: 16198011 NR Description: LD24726p [Drosophila melanogaster]
  misc_feature (1)..(220): NCBI GI NO: 28574759 NR Description: CG11241-PA [Drosophila melanogaster]
  misc_feature (223)..(460): NCBI GI NO: 39595899 NR Description: Hypothetical protein CBG12888
MQLGARSLVRRFSRLAAAGAPAETTSAGVPRMPAFDHVPLPYDGPSAADIARKRAEYLSPSLFHFYSKPLNIVEGKRQYLYDEHGRRYLDAFAGIATVCCGHCHPDVVDAITRQAKRLQHSTVLYLNHVIADFAEALASKLPGDLKVVFFTNSGTEANELAILMARLYTGSHDIISLRNSYHGNAAGTMGATAQKNWKFNVIQSGVHHAVNPDPYRGAFGSDAEKYVRDVQEIIEFGTTGQVAGFISEAIQGVGGIVEVSPGYLPLAYDKVRKAGGLCIADEVQAGFARVGSHFWGFETHGVVPDIVTMAKGIGNGIPLGAVVTTPEVAQVLTRRCYFNTFGGNPLCTAGGLAVLEVLEKERLQENAFVVGSYLKDRLRGLQEKHEIIGDVRGTGFMLGIELVTDRQLKTPAKDEICHAMEYMKDMGVLVGKGGFYGNVFRITPPLCFTKEDADFFVEVMDIALSKL

SEQ ID NO: 40661 - DNA, 1834 bp, Zea mays subsp. mays
  misc_feature (1)..(1834): Ceres Seq. ID no. 13589535
ctaatcgaaaaccacttgatcccatgttcaacagacctttgttccctagaactttgggcaacccttttgcccttttggatccaggttttgctgacataactgctggtgatatatttggacgtggaccccgagttacacaacctagggacgtgaggcagatacctattgaagttaaggacagcaatactcaaacaggcagttctggtcagggtcccattattgaggatgttactggacgtgaatctttctatggtccagaggtccatgggaccgttatagttgacgaagatgatgaagacttgccattaacactatctgctcaggatcctaagatcccaagcagtgctttgcacccaaaccatttcatgcctagtgcgcctccagtggttgatgttagtgaccataacaatgatatagaagaggagatgattaaggcagcaattgaagcttcaaaaagggaagctgacgggatgaaaaatgttctaagtagtggtcaatctgaaaacatgtcacgtggcagaggtgatcatgagcttgctcgggcggtttctttgtccttggagacagcagagcgagagagagctctgcgccaagagggaatgtatgtagcagatcactctcctgacttatctgataaagaaggcggtcaaggaggaagtgggataagcgaaaggcgaggactaactacaggagaagtgggaacttctgagcaaacagtagatgaagagaacttccaagaggacaatgaagatggtgaagaacaacctttagttaggactcgttctaggcgacttcgaggcagaactattgagccagcagaaactgttcaaagggctgacagcccgccctcaagtccccaacctcatgttcaaattggtcatcagcgtaatgtggggtttccttcagtagagtggggtggtatttcttctgaagagcgtgatgaagctcttatgcttgaggctgcaatgtttggtgggattcctgaaggagcaccatatccattttccttcccagcccatggcaggtcgactcactatcccctagtagcacgtcctccatcaccatcattaacggcacagcggttgttaagggagcagcaggatgatgagtatcttgctgctctccaagctgatcgagaaaaagagttgaaggctgtgcaggaggctgaacttcgcagggtagaggaagctgcagcaagagaggctgctcttgaacgtcaaaagaaagaagaggaggagaagctaaagaaacaacgtgaggaagaggagttggaatccaagcttgcagccaaacaagcatcactacctaaggagccactacaaaatgacgagggggctgtcacagtggtagtccgcatgcctgatggtagtcgtcgaggacggcgctttctcaaatctgacaggcttcagtatctttttgatttcatagacatcagccggactttcaaaccaggaacttatagactggcgaggtcttatcccaggcgtgccttcactgaattggagagccagatgtcactgagcgatctcggtctcactagcaagcaggaagctctgttcctagaaaaactgtctgcgtagagtacaaggttctggagttatggtcgagtagtatatgcacttataaaatcggtcatttagatcgtgcctggcgtgtgttcatgaaaatactgcagcggttgaatgattactgatctctagagatcccgtcgccatcttctgtgctctgaaacggaggtgtttcgatctgactgtgcagatgggcagttctacattcagatttcagaacaactgtagctcttgcggttttaagacttgagtatggtttactttgg

SEQ ID NO: 40662 - protein, 525 aa, Zea mays subsp. mays
  peptide (1)..(525): Ceres Seq. ID no. 13589536
  misc_feature (441)..(521): Pfam Name: Pfam Description:  UBX domain
  misc_feature (183)..(521): NCBI GI NO: 7486575 NR Description: hypothetical protein F7H19
  misc_feature (20)..(191): NCBI GI NO: 7486575 NR Description: hypothetical protein F7H19
  misc_feature (127)..(521): NCBI GI NO: 18413644 NR Description: expressed protein [Arabidopsis thaliana]
  misc_feature (127)..(521): NCBI GI NO: 7487672 NR Description: hypothetical protein T5C23
  misc_feature (71)..(521): NCBI GI NO: 18416058 NR Description: expressed protein [Arabidopsis thaliana]
  misc_feature (127)..(421): NCBI GI NO: 13160609 NR Description: Ara4-interacting protein [Arabidopsis thaliana]
  misc_feature (134)..(263): NCBI GI NO: 30678726 NR Description: expressed protein [Arabidopsis thaliana]
  misc_feature (395)..(523): NCBI GI NO: 30678726 NR Description: expressed protein [Arabidopsis thaliana]
  misc_feature (2)..(422): NCBI GI NO: 7487672 NR Description: hypothetical protein T5C23
  misc_feature (2)..(396): NCBI GI NO: 13160609 NR Description: Ara4-interacting protein [Arabidopsis thaliana]
NRKPLDPMFNRPLFPRTLGNPFALLDPGFADITAGDIFGRGPRVTQPRDVRQIPIEVKDSNTQTGSSGQGPIIEDVTGRESFYGPEVHGTVIVDEDDEDLPLTLSAQDPKIPSSALHPNHFMPSAPPVVDVSDHNNDIEEEMIKAAIEASKREADGMKNVLSSGQSENMSRGRGDHELARAVSLSLETAERERALRQEGMYVADHSPDLSDKEGGQGGSGISERRGLTTGEVGTSEQTVDEENFQEDNEDGEEQPLVRTRSRRLRGRTIEPAETVQRADSPPSSPQPHVQIGHQRNVGFPSVEWGGISSEERDEALMLEAAMFGGIPEGAPYPFSFPAHGRSTHYPLVARPPSPSLTAQRLLREQQDDEYLAALQADREKELKAVQEAELRRVEEAAAREAALERQKKEEEEKLKKQREEEELESKLAAKQASLPKEPLQNDEGAVTVVVRMPDGSRRGRRFLKSDRLQYLFDFIDISRTFKPGTYRLARSYPRRAFTELESQMSLSDLGLTSKQEALFLEKLSA

SEQ ID NO: 40663 - protein, 518 aa, Zea mays subsp. mays
  peptide (1)..(518): Ceres Seq. ID no. 13589537
  misc_feature (434)..(514): Pfam Name: Pfam Description:  UBX domain
  misc_feature (176)..(514): NCBI GI NO: 7486575 NR Description: hypothetical protein F7H19
  misc_feature (13)..(184): NCBI GI NO: 7486575 NR Description: hypothetical protein F7H19
  misc_feature (120)..(514): NCBI GI NO: 18413644 NR Description: expressed protein [Arabidopsis thaliana]
  misc_feature (120)..(514): NCBI GI NO: 7487672 NR Description: hypothetical protein T5C23
  misc_feature (64)..(514): NCBI GI NO: 18416058 NR Description: expressed protein [Arabidopsis thaliana]
  misc_feature (120)..(414): NCBI GI NO: 13160609 NR Description: Ara4-interacting protein [Arabidopsis thaliana]
  misc_feature (127)..(256): NCBI GI NO: 30678726 NR Description: expressed protein [Arabidopsis thaliana]
  misc_feature (388)..(516): NCBI GI NO: 30678726 NR Description: expressed protein [Arabidopsis thaliana]
  misc_feature (1)..(415): NCBI GI NO: 7487672 NR Description: hypothetical protein T5C23
  misc_feature (1)..(389): NCBI GI NO: 13160609 NR Description: Ara4-interacting protein [Arabidopsis thaliana]
MFNRPLFPRTLGNPFALLDPGFADITAGDIFGRGPRVTQPRDVRQIPIEVKDSNTQTGSSGQGPIIEDVTGRESFYGPEVHGTVIVDEDDEDLPLTLSAQDPKIPSSALHPNHFMPSAPPVVDVSDHNNDIEEEMIKAAIEASKREADGMKNVLSSGQSENMSRGRGDHELARAVSLSLETAERERALRQEGMYVADHSPDLSDKEGGQGGSGISERRGLTTGEVGTSEQTVDEENFQEDNEDGEEQPLVRTRSRRLRGRTIEPAETVQRADSPPSSPQPHVQIGHQRNVGFPSVEWGGISSEERDEALMLEAAMFGGIPEGAPYPFSFPAHGRSTHYPLVARPPSPSLTAQRLLREQQDDEYLAALQADREKELKAVQEAELRRVEEAAAREAALERQKKEEEEKLKKQREEEELESKLAAKQASLPKEPLQNDEGAVTVVVRMPDGSRRGRRFLKSDRLQYLFDFIDISRTFKPGTYRLARSYPRRAFTELESQMSLSDLGLTSKQEALFLEKLSA

SEQ ID NO: 40664 - protein, 404 aa, Zea mays subsp. mays
  peptide (1)..(404): Ceres Seq. ID no. 13589538
  misc_feature (320)..(400): Pfam Name: Pfam Description:  UBX domain
  misc_feature (62)..(400): NCBI GI NO: 7486575 NR Description: hypothetical protein F7H19
  misc_feature (1)..(70): NCBI GI NO: 7486575 NR Description: hypothetical protein F7H19
  misc_feature (6)..(400): NCBI GI NO: 18413644 NR Description: expressed protein [Arabidopsis thaliana]
  misc_feature (6)..(400): NCBI GI NO: 7487672 NR Description: hypothetical protein T5C23
  misc_feature (1)..(400): NCBI GI NO: 18416058 NR Description: expressed protein [Arabidopsis thaliana]
  misc_feature (6)..(300): NCBI GI NO: 13160609 NR Description: Ara4-interacting protein [Arabidopsis thaliana]
  misc_feature (13)..(142): NCBI GI NO: 30678726 NR Description: expressed protein [Arabidopsis thaliana]
  misc_feature (274)..(402): NCBI GI NO: 30678726 NR Description: expressed protein [Arabidopsis thaliana]
  misc_feature (1)..(301): NCBI GI NO: 7487672 NR Description: hypothetical protein T5C23
  misc_feature (1)..(275): NCBI GI NO: 13160609 NR Description: Ara4-interacting protein [Arabidopsis thaliana]
MPSAPPVVDVSDHNNDIEEEMIKAAIEASKREADGMKNVLSSGQSENMSRGRGDHELARAVSLSLETAERERALRQEGMYVADHSPDLSDKEGGQGGSGISERRGLTTGEVGTSEQTVDEENFQEDNEDGEEQPLVRTRSRRLRGRTIEPAETVQRADSPPSSPQPHVQIGHQRNVGFPSVEWGGISSEERDEALMLEAAMFGGIPEGAPYPFSFPAHGRSTHYPLVARPPSPSLTAQRLLREQQDDEYLAALQADREKELKAVQEAELRRVEEAAAREAALERQKKEEEEKLKKQREEEELESKLAAKQASLPKEPLQNDEGAVTVVVRMPDGSRRGRRFLKSDRLQYLFDFIDISRTFKPGTYRLARSYPRRAFTELESQMSLSDLGLTSKQEALFLEKLSA

SEQ ID NO: 40665 - DNA, 1306 bp, Zea mays subsp. mays
  misc_feature (1)..(1306): Ceres Seq. ID no. 12419040
  misc_feature (839)..(839): n is a, c, t, g, unknown, or other
  misc_feature (837)..(837): n is a, c, t, g, unknown, or other
  misc_feature (1149)..(1149): n is a, c, t, g, unknown, or other
  misc_feature (1076)..(1076): n is a, c, t, g, unknown, or other
  misc_feature (1192)..(1192): n is a, c, t, g, unknown, or other
  misc_feature (1250)..(1250): n is a, c, t, g, unknown, or other
  misc_feature (1175)..(1175): n is a, c, t, g, unknown, or other
caaaaaatttttgctcagcccgctctcggacgaacccattcacccgtccggccgtccgtgcgcggcgcacccacccggcaccggcaccagcaccaccgcccgcccggcgcccgtcacgctcgagaggaggaggaagaagaagggactggtgcgacagcgcgcgatggccgccgtcgtgtgcgtcaccggcgccggcggcttcatcggctcgtggatcgtcaagatcctcctcgcccgcgggtacgccgtccggggcacctcccgccgcgaagctgctgaccccaagaacgcgcacctgtgggcgctcgacggcgcggcggagcgcctcaccatgctgcaggtggacctgctcgaccgcgccagcctccgcgccgccttccgcggctgcgacggcgtcatccacaccgcctcgccgatgcacgacaaccccgaggagatcatcgagccgattatcgccgggacgcggaacgtcgtggaggcggcggcggacgccggcgtgcggcgcctggtgctgtcctccaccatcggcaccatgtacatggacccgcgccgcgaccccgacgccccgctcggcgactccagctggagcgacctcgagtactgcaagagcaccgagaactggtactgctacgcaaagacggtggcggagcagggcgcgtgggaggcggcgcgggcgcgggggctggacctggcggtggtcatcccggtggtggtgctcggcgagctgctgcagcccagcatgaacaccagcaccctgcacatcctcaagtacctcacgggacagacaaaggagtacgtcaacgagtcgcacgcctacgtgcacgtcatggacgccgncnaggcgcacgtaagggtgctggaggcgcccggcgccggcggccggcggtacgtctgcgccgagcgcaccctgcaccgcggcgagctctgccgcatcctcgccggactcttcccggagtaccctattccgacaaggtgcaaggatcaggtgaacccaccgaagaagggctacaagtttacgaaccaacctctgaaggaccttggcgtcaagttcactccagtgcatgggtacctgtacnaagcagtgaagtccctgcaagacaagggcttcctcccgaagacctctggcgccaaggtgcctgaacgacgcanctacctgcctcaaacgacatcacagncaccacccgaaatcgtntcgaaactttgaggtggatctgcacacgtgctcaaactggccatgttttttttttgtnagaacaagccgttcatttgattggttattaaaagattttgggcagtctgttcttac

SEQ ID NO: 40666 - protein, 400 aa, Zea mays subsp. mays
  peptide (1)..(400): Ceres Seq. ID no. 12419041
  misc_feature (59)..(327): Pfam Name: Pfam Description:  NAD dependent epimerase/dehydratase family
  misc_feature (59)..(371): NCBI GI NO: 28544965 NR Description: cinnamoyl-CoA reductase [Zea mays]
  misc_feature (59)..(371): NCBI GI NO: 3668115 NR Description: cinnamoyl-CoA reductase [Zea mays]
  misc_feature (59)..(371): NCBI GI NO: 28544959 NR Description: cinnamoyl-CoA reductase [Zea mays]
  misc_feature (59)..(371): NCBI GI NO: 9998901 NR Description: cinnamoyl-CoA reductase
  misc_feature (59)..(371): NCBI GI NO: 40233135 NR Description: cinnamoyl CoA reductase [Populus tomentosa]
  misc_feature (58)..(371): NCBI GI NO: 25140434 NR Description: cinnamoyl CoA reductase [Solanum tuberosum]
  misc_feature (59)..(371): NCBI GI NO: 2960364 NR Description: cinnamoyl CoA reductase
  misc_feature (60)..(371): NCBI GI NO: 7239228 NR Description: cinnamoyl CoA reductase; CCR [Populus tremuloides]
  misc_feature (59)..(387): NCBI GI NO: 25140432 NR Description: cinnamoyl CoA reductase [Hordeum vulgare]
  misc_feature (59)..(374): NCBI GI NO: 7431407 NR Description: cinnamoyl-CoA reductase (EC 1
  misc_feature (279)..(279): Xaa is any aa, unknown or other
  misc_feature (280)..(280): Xaa is any aa, unknown or other
  misc_feature (359)..(359): Xaa is any aa, unknown or other
  misc_feature (383)..(383): Xaa is any aa, unknown or other
  misc_feature (392)..(392): Xaa is any aa, unknown or other
  misc_feature (397)..(397): Xaa is any aa, unknown or other
KKFLLSPLSDEPIHPSGRPCAAHPPGTGTSTTARPAPVTLERRRKKKGLVRQRAMAAVVCVTGAGGFIGSWIVKILLARGYAVRGTSRREAADPKNAHLWALDGAAERLTMLQVDLLDRASLRAAFRGCDGVIHTASPMHDNPEEIIEPIIAGTRNVVEAAADAGVRRLVLSSTIGTMYMDPRRDPDAPLGDSSWSDLEYCKSTENWYCYAKTVAEQGAWEAARARGLDLAVVIPVVVLGELLQPSMNTSTLHILKYLTGQTKEYVNESHAYVHVMDAXXAHVRVLEAPGAGGRRYVCAERTLHRGELCRILAGLFPEYPIPTRCKDQVNPPKKGYKFTNQPLKDLGVKFTPVHGYLYXAVKSLQDKGFLPKTSGAKVPERRXYLPQTTSQXPPEIXSKL

SEQ ID NO: 40667 - protein, 346 aa, Zea mays subsp. mays
  peptide (1)..(346): Ceres Seq. ID no. 12419042
  misc_feature (5)..(273): Pfam Name: Pfam Description:  NAD dependent epimerase/dehydratase family
  misc_feature (5)..(317): NCBI GI NO: 28544965 NR Description: cinnamoyl-CoA reductase [Zea mays]
  misc_feature (5)..(317): NCBI GI NO: 3668115 NR Description: cinnamoyl-CoA reductase [Zea mays]
  misc_feature (5)..(317): NCBI GI NO: 28544959 NR Description: cinnamoyl-CoA reductase [Zea mays]
  misc_feature (5)..(317): NCBI GI NO: 9998901 NR Description: cinnamoyl-CoA reductase
  misc_feature (5)..(317): NCBI GI NO: 40233135 NR Description: cinnamoyl CoA reductase [Populus tomentosa]
  misc_feature (4)..(317): NCBI GI NO: 25140434 NR Description: cinnamoyl CoA reductase [Solanum tuberosum]
  misc_feature (5)..(317): NCBI GI NO: 2960364 NR Description: cinnamoyl CoA reductase
  misc_feature (6)..(317): NCBI GI NO: 7239228 NR Description: cinnamoyl CoA reductase; CCR [Populus tremuloides]
  misc_feature (5)..(333): NCBI GI NO: 25140432 NR Description: cinnamoyl CoA reductase [Hordeum vulgare]
  misc_feature (5)..(320): NCBI GI NO: 7431407 NR Description: cinnamoyl-CoA reductase (EC 1
  misc_feature (225)..(225): Xaa is any aa, unknown or other
  misc_feature (226)..(226): Xaa is any aa, unknown or other
  misc_feature (305)..(305): Xaa is any aa, unknown or other
  misc_feature (329)..(329): Xaa is any aa, unknown or other
  misc_feature (338)..(338): Xaa is any aa, unknown or other
  misc_feature (343)..(343): Xaa is any aa, unknown or other
MAAVVCVTGAGGFIGSWIVKILLARGYAVRGTSRREAADPKNAHLWALDGAAERLTMLQVDLLDRASLRAAFRGCDGVIHTASPMHDNPEEIIEPIIAGTRNVVEAAADAGVRRLVLSSTIGTMYMDPRRDPDAPLGDSSWSDLEYCKSTENWYCYAKTVAEQGAWEAARARGLDLAVVIPVVVLGELLQPSMNTSTLHILKYLTGQTKEYVNESHAYVHVMDAXXAHVRVLEAPGAGGRRYVCAERTLHRGELCRILAGLFPEYPIPTRCKDQVNPPKKGYKFTNQPLKDLGVKFTPVHGYLYXAVKSLQDKGFLPKTSGAKVPERRXYLPQTTSQXPPEIXSKL

SEQ ID NO: 40668 - protein, 290 aa, Zea mays subsp. mays
  peptide (1)..(290): Ceres Seq. ID no. 12419043
  misc_feature (1)..(217): Pfam Name: Pfam Description:  NAD dependent epimerase/dehydratase family
  misc_feature (1)..(261): NCBI GI NO: 28544965 NR Description: cinnamoyl-CoA reductase [Zea mays]
  misc_feature (1)..(261): NCBI GI NO: 3668115 NR Description: cinnamoyl-CoA reductase [Zea mays]
  misc_feature (1)..(261): NCBI GI NO: 28544959 NR Description: cinnamoyl-CoA reductase [Zea mays]
  misc_feature (1)..(261): NCBI GI NO: 9998901 NR Description: cinnamoyl-CoA reductase
  misc_feature (1)..(261): NCBI GI NO: 40233135 NR Description: cinnamoyl CoA reductase [Populus tomentosa]
  misc_feature (1)..(261): NCBI GI NO: 25140434 NR Description: cinnamoyl CoA reductase [Solanum tuberosum]
  misc_feature (1)..(261): NCBI GI NO: 2960364 NR Description: cinnamoyl CoA reductase
  misc_feature (1)..(261): NCBI GI NO: 7239228 NR Description: cinnamoyl CoA reductase; CCR [Populus tremuloides]
  misc_feature (1)..(277): NCBI GI NO: 25140432 NR Description: cinnamoyl CoA reductase [Hordeum vulgare]
  misc_feature (1)..(264): NCBI GI NO: 7431407 NR Description: cinnamoyl-CoA reductase (EC 1
  misc_feature (169)..(169): Xaa is any aa, unknown or other
  misc_feature (170)..(170): Xaa is any aa, unknown or other
  misc_feature (249)..(249): Xaa is any aa, unknown or other
  misc_feature (273)..(273): Xaa is any aa, unknown or other
  misc_feature (282)..(282): Xaa is any aa, unknown or other
  misc_feature (287)..(287): Xaa is any aa, unknown or other
MLQVDLLDRASLRAAFRGCDGVIHTASPMHDNPEEIIEPIIAGTRNVVEAAADAGVRRLVLSSTIGTMYMDPRRDPDAPLGDSSWSDLEYCKSTENWYCYAKTVAEQGAWEAARARGLDLAVVIPVVVLGELLQPSMNTSTLHILKYLTGQTKEYVNESHAYVHVMDAXXAHVRVLEAPGAGGRRYVCAERTLHRGELCRILAGLFPEYPIPTRCKDQVNPPKKGYKFTNQPLKDLGVKFTPVHGYLYXAVKSLQDKGFLPKTSGAKVPERRXYLPQTTSQXPPEIXSKL

SEQ ID NO: 40669 - DNA, 1900 bp, Zea mays subsp. mays; identical to SEQ ID NO: 24977
  misc_feature (1)..(1900): Ceres Seq. ID no. 13493214

SEQ ID NO: 40670 - protein, 393 aa, Zea mays subsp. mays; identical to SEQ ID NO: 24978
  peptide (1)..(393): Ceres Seq. ID no. 13493215
  misc_feature (14)..(368): NCBI GI NO: 37532842 NR Description: putative mevalonate kinase
  misc_feature (14)..(371): NCBI GI NO: 16417946 NR Description: mevalonate kinase [Hevea brasiliensis]
  misc_feature (14)..(368): NCBI GI NO: 15240936 NR Description: mevalonate kinase [Arabidopsis thaliana]
  misc_feature (14)..(368): NCBI GI NO: 5578718 NR Description: mevalonate kinase [Arabidopsis thaliana]
  misc_feature (20)..(367): NCBI GI NO: 13592007 NR Description: mevalonate kinase [Rattus norvegicus]
  misc_feature (20)..(367): NCBI GI NO: 450346 NR Description: ORF for viral-cellular fusion transcript
  misc_feature (20)..(367): NCBI GI NO: 4557769 NR Description: mevalonate kinase [Homo sapiens]
  misc_feature (20)..(367): NCBI GI NO: 33303805 NR Description: mevalonate kinase [synthetic construct]
  misc_feature (20)..(367): NCBI GI NO: 12963731 NR Description: mevalonate kinase [Mus musculus]
  misc_feature (132)..(367): NCBI GI NO: 28828936 NR Description: similar to Rattus norvegicus (Rat)

SEQ ID NO: 40671 - protein, 235 aa, Zea mays subsp. mays; identical to SEQ ID NO: 24979
  peptide (1)..(235): Ceres Seq. ID no. 13493216
  misc_feature (1)..(210): NCBI GI NO: 37532842 NR Description: putative mevalonate kinase
  misc_feature (1)..(213): NCBI GI NO: 16417946 NR Description: mevalonate kinase [Hevea brasiliensis]
  misc_feature (1)..(210): NCBI GI NO: 15240936 NR Description: mevalonate kinase [Arabidopsis thaliana]
  misc_feature (1)..(210): NCBI GI NO: 5578718 NR Description: mevalonate kinase [Arabidopsis thaliana]
  misc_feature (1)..(209): NCBI GI NO: 13592007 NR Description: mevalonate kinase [Rattus norvegicus]
  misc_feature (1)..(209): NCBI GI NO: 450346 NR Description: ORF for viral-cellular fusion transcript
  misc_feature (1)..(209): NCBI GI NO: 4557769 NR Description: mevalonate kinase [Homo sapiens]
  misc_feature (1)..(209): NCBI GI NO: 33303805 NR Description: mevalonate kinase [synthetic construct]
  misc_feature (1)..(209): NCBI GI NO: 12963731 NR Description: mevalonate kinase [Mus musculus]
  misc_feature (1)..(209): NCBI GI NO: 28828936 NR Description: similar to Rattus norvegicus (Rat)

SEQ ID NO: 40672 - protein, 221 aa, Zea mays subsp. mays; identical to SEQ ID NO: 24980
  peptide (1)..(221): Ceres Seq. ID no. 13493217
  misc_feature (1)..(196): NCBI GI NO: 37532842 NR Description: putative mevalonate kinase
  misc_feature (1)..(199): NCBI GI NO: 16417946 NR Description: mevalonate kinase [Hevea brasiliensis]
  misc_feature (1)..(196): NCBI GI NO: 15240936 NR Description: mevalonate kinase [Arabidopsis thaliana]
  misc_feature (1)..(196): NCBI GI NO: 5578718 NR Description: mevalonate kinase [Arabidopsis thaliana]
  misc_feature (1)..(195): NCBI GI NO: 13592007 NR Description: mevalonate kinase [Rattus norvegicus]
  misc_feature (1)..(195): NCBI GI NO: 450346 NR Description: ORF for viral-cellular fusion transcript
  misc_feature (1)..(195): NCBI GI NO: 4557769 NR Description: mevalonate kinase [Homo sapiens]
  misc_feature (1)..(195): NCBI GI NO: 33303805 NR Description: mevalonate kinase [synthetic construct]
  misc_feature (1)..(195): NCBI GI NO: 12963731 NR Description: mevalonate kinase [Mus musculus]
  misc_feature (1)..(195): NCBI GI NO: 28828936 NR Description: similar to Rattus norvegicus (Rat)

SEQ ID NO: 40673 - DNA, 1522 bp, Zea mays subsp. mays
  misc_feature (1)..(1522): Ceres Seq. ID no. 12359886
ataaccgaatagaaatagctttggtgcaaacaagcaagcagcagagcagatcaagtaaaggtagcaatttgagtagtgtgcaagctaagatggggcaacaagaaaaggaagtgatcccgctgatgaccccgtacaagatgggacagctggagctctcccaccgcgtggtgctggcgccgatgacgcggtgccgcgccatcggggacgtgccgcagccgcacgccgccgtgtactactcgcagcgcgccagcaggggcggcgtgctcatcaccgagggcacgggggtgtccgccaccgcgcagggcttcccggggtcccccggcatctggacgcaggagcaggtggcggcgtggaagccccatcgtcgacgccgtccaccgcaagggcgcgctcttcttctgccagatcgcgcacgtcggaagggcatccaccaacgatttccagccggacggccaggcgccggtctcgagcacggacgcgcagctcccacccgacgccgagtccggcacggtgttctccaggccacgccggctgcgggccgacgagatcccggggatcgtcgacgacttcaggcgcgccgcgcgcaacgcgatcgaggccgggttcgacggcgtggagatccacggagcgcacgggttcctcctggagcagttcatgaaggacggcgccaacgaccgcgccgacgagtacggcggcagcgtcgagaaccggtgccgcttcgtggtcgaggtcgtggacgctctggtccgtgaagtcggcgcgagccgggttggcatcaggctctccccgttcgcggactacttggactgtgcggattccaaccccttggcgctaggtcactacatggtggaacagctcaacaggcacgaggggtttctgtactgccacatggtggagcctcgaatggccatcgtcgacgaccgcaggcagattccgcatcgactcctgccgttcaaggcggcgttcaatggcaccttcatcgcccgcgggcgggtacgacagggaggaagggaacaaggtggtcgccgaaggctacgcggaccttgtcgcatacggaaggctgttcttggccaacccagacctgcctaaaaggttcgaggtagacgagatcctgaacaagtatgatcgttccaccttttatacacaagaccctgttgttggctatacagattaccctttccttagggaggacagcgaagacttagctgctcaagcttaatggcgtggatgatcgatgtaatcacggttactgcacgatcgagatcgatactacatccatttgaatatatatatgtctaagatgcattgtttttgttttaagttagttttttttatatttgaccaaatttatgtaaaagatatatgtgctaaactagttgagtataccggtgtgttgcaacgacaaacgctagtctgtatcaaatgattttattaaactttactatagccagacttacaacaccatatcttgtacatgtgtgtatttgttcaagtaaaaatatataatggtggacttggaggc

SEQ ID NO: 40674 - protein, 249 aa, Zea mays subsp. mays
  peptide (1)..(249): Ceres Seq. ID no. 12359887
  misc_feature (39)..(119): Pfam Name: Pfam Description:  NADH:flavin oxidoreductase / NADH oxidase family
  misc_feature (30)..(119): NCBI GI NO: 40645345 NR Description: hypothetical protein [Pisum sativum]
  misc_feature (36)..(119): NCBI GI NO: 7449902 NR Description: probable 12-oxophytodienoate reductase (EC1
  misc_feature (30)..(119): NCBI GI NO: 40645351 NR Description: hypothetical protein [Pisum sativum]
  misc_feature (32)..(119): NCBI GI NO: 7449901 NR Description: probable 12-oxophytodienoate reductase (EC1
  misc_feature (33)..(119): NCBI GI NO: 40645459 NR Description: LEDI-5c protein [Lithospermum erythrorhizon]
  misc_feature (29)..(119): NCBI GI NO: 40645349 NR Description: hypothetical protein [Pisum sativum]
  misc_feature (30)..(119): NCBI GI NO: 40645353 NR Description: hypothetical protein [Pisum sativum]
  misc_feature (30)..(119): NCBI GI NO: 13516922 NR Description: 12-oxophytodienoic acid 10, 11-reductase
  misc_feature (38)..(119): NCBI GI NO: 40645347 NR Description: hypothetical protein [Pisum sativum]
  misc_feature (33)..(119): NCBI GI NO: 4894182 NR Description: 12-oxophytodienoate reductase
NRIEIALVQTSKQQSRSSKGSNLSSVQAKMGQQEKEVIPLMTPYKMGQLELSHRVVLAPMTRCRAIGDVPQPHAAVYYSQRASRGGVLITEGTGVSATAQGFPGSPGIWTQEQVAAWKPHRRRRPPQGRALLLPDRARRKGIHQRFPAGRPGAGLEHGRAAPTRRRVRHGVLQATPAAGRRDPGDRRRLQARRAQRDRGRVRRRGDPRSARVPPGAVHEGRRQRPRRRVRRQRREPVPLRGRGRGRSGP

SEQ ID NO: 40675 - protein, 220 aa, Zea mays subsp. mays
  peptide (1)..(220): Ceres Seq. ID no. 12359888
  misc_feature (10)..(90): Pfam Name: Pfam Description:  NADH:flavin oxidoreductase / NADH oxidase family
  misc_feature (1)..(90): NCBI GI NO: 40645345 NR Description: hypothetical protein [Pisum sativum]
  misc_feature (7)..(90): NCBI GI NO: 7449902 NR Description: probable 12-oxophytodienoate reductase (EC1
  misc_feature (1)..(90): NCBI GI NO: 40645351 NR Description: hypothetical protein [Pisum sativum]
  misc_feature (3)..(90): NCBI GI NO: 7449901 NR Description: probable 12-oxophytodienoate reductase (EC1
  misc_feature (4)..(90): NCBI GI NO: 40645459 NR Description: LEDI-5c protein [Lithospermum erythrorhizon]
  misc_feature (1)..(90): NCBI GI NO: 40645349 NR Description: hypothetical protein [Pisum sativum]
  misc_feature (1)..(90): NCBI GI NO: 40645353 NR Description: hypothetical protein [Pisum sativum]
  misc_feature (1)..(90): NCBI GI NO: 13516922 NR Description: 12-oxophytodienoic acid 10, 11-reductase
  misc_feature (9)..(90): NCBI GI NO: 40645347 NR Description: hypothetical protein [Pisum sativum]
  misc_feature (4)..(90): NCBI GI NO: 4894182 NR Description: 12-oxophytodienoate reductase
MGQQEKEVIPLMTPYKMGQLELSHRVVLAPMTRCRAIGDVPQPHAAVYYSQRASRGGVLITEGTGVSATAQGFPGSPGIWTQEQVAAWKPHRRRRPPQGRALLLPDRARRKGIHQRFPAGRPGAGLEHGRAAPTRRRVRHGVLQATPAAGRRDPGDRRRLQARRAQRDRGRVRRRGDPRSARVPPGAVHEGRRQRPRRRVRRQRREPVPLRGRGRGRSGP

SEQ ID NO: 40676 - protein, 209 aa, Zea mays subsp. mays
  peptide (1)..(209): Ceres Seq. ID no. 12359889
  misc_feature (1)..(79): Pfam Name: Pfam Description:  NADH:flavin oxidoreductase / NADH oxidase family
  misc_feature (1)..(79): NCBI GI NO: 40645345 NR Description: hypothetical protein [Pisum sativum]
  misc_feature (1)..(79): NCBI GI NO: 7449902 NR Description: probable 12-oxophytodienoate reductase (EC1
  misc_feature (1)..(79): NCBI GI NO: 40645351 NR Description: hypothetical protein [Pisum sativum]
  misc_feature (1)..(79): NCBI GI NO: 7449901 NR Description: probable 12-oxophytodienoate reductase (EC1
  misc_feature (1)..(79): NCBI GI NO: 40645459 NR Description: LEDI-5c protein [Lithospermum erythrorhizon]
  misc_feature (1)..(79): NCBI GI NO: 40645349 NR Description: hypothetical protein [Pisum sativum]
  misc_feature (1)..(79): NCBI GI NO: 40645353 NR Description: hypothetical protein [Pisum sativum]
  misc_feature (1)..(79): NCBI GI NO: 13516922 NR Description: 12-oxophytodienoic acid 10, 11-reductase
  misc_feature (1)..(79): NCBI GI NO: 40645347 NR Description: hypothetical protein [Pisum sativum]
  misc_feature (1)..(79): NCBI GI NO: 4894182 NR Description: 12-oxophytodienoate reductase
MTPYKMGQLELSHRVVLAPMTRCRAIGDVPQPHAAVYYSQRASRGGVLITEGTGVSATAQGFPGSPGIWTQEQVAAWKPHRRRRPPQGRALLLPDRARRKGIHQRFPAGRPGAGLEHGRAAPTRRRVRHGVLQATPAAGRRDPGDRRRLQARRAQRDRGRVRRRGDPRSARVPPGAVHEGRRQRPRRRVRRQRREPVPLRGRGRGRSGP

SEQ ID NO: 40677 - DNA, 901 bp, Zea mays subsp. mays
  misc_feature (1)..(901): Ceres Seq. ID no. 12436121
aaaacaaaccctagccgccaggcgcaggcggtcagggagcgagtaccgagcgccccagttcacacggtttatatcctaatctacgcagtcaatcctccttagcggtttcgttaatttgtttgtttccagcggccgttgcttcggtgattttgcttagctacgctttggaccggcgttccttcgctgctagctagtaccttttggaagtcaaggagtgctgtctttcgcctgatctacctagacgccttttcttgaatcagcgacttctattttggttaattagcaccggtagcccccctgctctcttgagtgagatgtcagaatacaagaacgtcgttggggggaggctaaagctgaagggtaaggcactggatgtgaaggaaggtggagtcaagaagaaaaaaaagaagcatcagcttgaagagtcgtctcagattgagcacgatgagctccacaaaggtagctgtccgtgtggagctcggttcatctttcgaacaacatgtttcgttttacatataaattggaccacttttgtgtgtggggaaactctggcttaccagctgatcacaacaatgagcttattgaagctggcaaggtgggagatgaagaaaggaatctacatccagactacgaccacctcacaccggcggagcgacgctatatagatcagaagcagaagatcgacatgcaaaagctggccaaagttgctaacaagtcacacagggaccgtatccaggacttcaaccagtatctggcgaacctcagcgagcactatgacatccctaaagttggccctggctaacaaacatagccaaactgctgtgtacgcacaaacaattgtatgctcggtgggcttcaagaacattaaaaatatataaatgtatgttgggtgattgggtct

SEQ ID NO: 40678 - protein, 116 aa, Zea mays subsp. mays
  peptide (1)..(116): Ceres Seq. ID no. 12436122
  misc_feature (1)..(49): NCBI GI NO: 18394403 NR Description: expressed protein; protein id: At1g16810
MSEYKNVVGGRLKLKGKALDVKEGGVKKKKKKHQLEESSQIEHDELHKGSCPCGARFIFRTTCFVLHINWTTFVCGETLAYQLITTMSLLKLARWEMKKGIYIQTTTTSHRRSDAI

SEQ ID NO: 40679 - protein, 100 aa, Zea mays subsp. mays
  peptide (1)..(100): Ceres Seq. ID no. 12436123
  misc_feature (9)..(100): NCBI GI NO: 18394403 NR Description: expressed protein; protein id: At1g16810
  misc_feature (45)..(100): NCBI GI NO: 20269115 NR Description: CGI-144-like protein [Lycopersicon esculentum]
  misc_feature (26)..(97): NCBI GI NO: 7512937 NR Description: hypothetical protein DKFZp586O0120
  misc_feature (26)..(97): NCBI GI NO: 7661696 NR Description: DKFZP586O0120 protein [Homo sapiens]
  misc_feature (26)..(97): NCBI GI NO: 13385950 NR Description: RIKEN cDNA 2510049I19 [Mus musculus]
  misc_feature (26)..(97): NCBI GI NO: 21165518 NR Description: hypothetical protein [Mus musculus]
  misc_feature (32)..(97): NCBI GI NO: 13325257 NR Description: Similar to CG15432 gene product [Homo sapiens]
  misc_feature (46)..(100): NCBI GI NO: 23509013 NR Description: hypothetical protein, conserved
  misc_feature (21)..(100): NCBI GI NO: 40746298 NR Description: hypothetical protein AN0678.2
MFRFTYKLDHFCVWGNSGLPADHNNELIEAGKVGDEERNLHPDYDHLTPAERRYIDQKQKIDMQKLAKVANKSHRDRIQDFNQYLANLSEHYDIPKVGPG

SEQ ID NO: 40680 - DNA, 1581 bp, Zea mays subsp. mays
  misc_feature (1)..(1581): Ceres Seq. ID no. 12418879
ctccattcctgcatcccatctcttcttcgcctcctccgcctcgccggcgtcaccgtccggtcccgcctctcccccccgctcgaagctcgatctcttctcccgttctccgcccacgcaatccctgccaccgccgaatgcggaacactccctttggtgaccgactgacctaccctgcttctgccgggttagttgagtgtccgcgccgcgtccggatctcgaatgcgccgccgccgccgtcgcgcgatctagcggctgcgcgctgccccgcaggagggtagagctccaggggcccggtgtggtcaggcggcagatatggcaacggaggcgtccacctctgcggcgggcgggatctgggtggaggggatgtccgcggacaacataaaggggctggtgctcgcgctctcctccagcttcttcatcggggccagcttcatcgtcaagaagaaggggcttaagaaggccggtgcgtccggcgtccgcgcaggtgttggtggttactcttacttgtatgaaccattatggtgggcaggaatgattacaatgattgttggagaagtggctaactttgcagcatatgcttttgctcctgctatcttggtcacaccacttggtgcccttagcatcataattagtgctgctcttgcagacattatgttgaaggaaaagctgcatatatttggtatacttgggtgtgttctttgtgttgtgggttcaacaactattgtacttcatgcccctcaggagcgcacaattgaatctgtagcagaagtgtgggatcttgctactgaaccagcctttctatcttatgctgccattgttcttgctgcaacatttgtcctcatatactactttattccacgatatggtcagacacacatcatggtctatattggtgtttgttcccttgtaggatctctgtcggtcatttgtgaaagctcttggaatagccttgaaactgaccttttctggcatgaatcagctaatttatccacaaacatggttgttcaccattgttgttgttgcatgtatagtaacacagatgaactacctgaacaaggctcttgatactttcaacacagcagttgtatcaccgatatactatacaatgttcacgtcactaaccattttggctagcgtgataatgttcaaggactgggatcgtcaaaatccaactcaaattgtaacagagatgtgtggttttgttaccattctttcggggacgtttcttctccacaagacaaaagacatggttgatggcctcccgccaactctacctgtccggattcctaaacatgaggacgatgcagctgaaggaatccctctcaggtctgctgaaggcatcccgctcagatcaccgagggcaacggaatcgtttcgatcaacgctataatggttggtgatccttcttcaaaggccatgctcagccattctttcatttgatacacacctttgtagattgtattttaggattccaaaaggtaaaggcaccgctccccatgtaatttttttgagacaccggtgtagagtatcgggggaacttatgttatacatctcgaaatgcccagaatgggcttagatccg

SEQ ID NO: 40681 - protein, 250 aa, Zea mays subsp. mays
  peptide (1)..(250): Ceres Seq. ID no. 12418880
  misc_feature (18)..(205): Pfam Name: DUF803 Pfam Description: Protein of unknown function
  misc_feature (10)..(205): NCBI GI NO: 18409942 NR Description: expressed protein; protein id: At1g71900
  misc_feature (8)..(205): NCBI GI NO: 18399280 NR Description: expressed protein; protein id: At1g34470
  misc_feature (10)..(205): NCBI GI NO: 25406128 NR Description: unknown protein F17M19.5
  misc_feature (15)..(205): NCBI GI NO: 18414079 NR Description: expressed protein; protein id: At4g13800
  misc_feature (18)..(205): NCBI GI NO: 21593618 NR Description: unknown [Arabidopsis thaliana]
  misc_feature (15)..(205): NCBI GI NO: 15229534 NR Description: unknown protein; protein id: At3g23870.1
  misc_feature (18)..(205): NCBI GI NO: 26449939 NR Description: unknown protein [Arabidopsis thaliana]
  misc_feature (1)..(205): NCBI GI NO: 20161440 NR Description: B1065E10.15
  misc_feature (25)..(206): NCBI GI NO: 38382727 NR Description: Unknown (protein for MGC:66088) [Danio rerio]
  misc_feature (10)..(164): NCBI GI NO: 15233982 NR Description: putative protein; protein id: At4g09640.1
MATEASTSAAGGIWVEGMSADNIKGLVLALSSSFFIGASFIVKKKGLKKAGASGVRAGVGGYSYLYEPLWWAGMITMIVGEVANFAAYAFAPAILVTPLGALSIIISAALADIMLKEKLHIFGILGCVLCVVGSTTIVLHAPQERTIESVAEVWDLATEPAFLSYAAIVLAATFVLIYYFIPRYGQTHIMVYIGVCSLVGSLSVICESSWNSLETDLFWHESANLSTNMVVHHCCCCMYSNTDELPEQGS

SEQ ID NO: 40682 - protein, 233 aa, Zea mays subsp. mays
  peptide (1)..(233): Ceres Seq. ID no. 12418881
  misc_feature (1)..(188): Pfam Name: DUF803 Pfam Description: Protein of unknown function
  misc_feature (1)..(188): NCBI GI NO: 18409942 NR Description: expressed protein; protein id: At1g71900
  misc_feature (1)..(188): NCBI GI NO: 18399280 NR Description: expressed protein; protein id: At1g34470
  misc_feature (1)..(188): NCBI GI NO: 25406128 NR Description: unknown protein F17M19.5
  misc_feature (1)..(188): NCBI GI NO: 18414079 NR Description: expressed protein; protein id: At4g13800
  misc_feature (1)..(188): NCBI GI NO: 21593618 NR Description: unknown [Arabidopsis thaliana]
  misc_feature (1)..(188): NCBI GI NO: 15229534 NR Description: unknown protein; protein id: At3g23870.1
  misc_feature (1)..(188): NCBI GI NO: 26449939 NR Description: unknown protein [Arabidopsis thaliana]
  misc_feature (1)..(188): NCBI GI NO: 20161440 NR Description: B1065E10.15
  misc_feature (8)..(189): NCBI GI NO: 38382727 NR Description: Unknown (protein for MGC:66088) [Danio rerio]
  misc_feature (1)..(147): NCBI GI NO: 15233982 NR Description: putative protein; protein id: At4g09640.1
MSADNIKGLVLALSSSFFIGASFIVKKKGLKKAGASGVRAGVGGYSYLYEPLWWAGMITMIVGEVANFAAYAFAPAILVTPLGALSIIISAALADIMLKEKLHIFGILGCVLCVVGSTTIVLHAPQERTIESVAEVWDLATEPAFLSYAAIVLAATFVLIYYFIPRYGQTHIMVYIGVCSLVGSLSVICESSWNSLETDLFWHESANLSTNMVVHHCCCCMYSNTDELPEQGS

SEQ ID NO: 40683 - protein, 177 aa, Zea mays subsp. mays
  peptide (1)..(177): Ceres Seq. ID no. 12418882
  misc_feature (1)..(132): Pfam Name: DUF803 Pfam Description: Protein of unknown function
  misc_feature (1)..(132): NCBI GI NO: 18409942 NR Description: expressed protein; protein id: At1g71900
  misc_feature (1)..(132): NCBI GI NO: 18399280 NR Description: expressed protein; protein id: At1g34470
  misc_feature (1)..(132): NCBI GI NO: 25406128 NR Description: unknown protein F17M19.5
  misc_feature (1)..(132): NCBI GI NO: 18414079 NR Description: expressed protein; protein id: At4g13800
  misc_feature (1)..(132): NCBI GI NO: 21593618 NR Description: unknown [Arabidopsis thaliana]
  misc_feature (1)..(132): NCBI GI NO: 15229534 NR Description: unknown protein; protein id: At3g23870.1
  misc_feature (1)..(132): NCBI GI NO: 26449939 NR Description: unknown protein [Arabidopsis thaliana]
  misc_feature (1)..(132): NCBI GI NO: 20161440 NR Description: B1065E10.15
  misc_feature (1)..(133): NCBI GI NO: 38382727 NR Description: Unknown (protein for MGC:66088) [Danio rerio]
  misc_feature (1)..(91): NCBI GI NO: 15233982 NR Description: putative protein; protein id: At4g09640.1
MITMIVGEVANFAAYAFAPAILVTPLGALSIIISAALADIMLKEKLHIFGILGCVLCVVGSTTIVLHAPQERTIESVAEVWDLATEPAFLSYAAIVLAATFVLIYYFIPRYGQTHIMVYIGVCSLVGSLSVICESSWNSLETDLFWHESANLSTNMVVHHCCCCMYSNTDELPEQGS

SEQ ID NO: 40684 - DNA, 1625 bp, Zea mays subsp. mays; identical to SEQ ID NO: 23487
  misc_feature (1)..(1625): Ceres Seq. ID no. 13494770
  misc_feature (1610)..(1610): n is a, c, t, g, unknown, or other

SEQ ID NO: 40685 - protein, 368 aa, Zea mays subsp. mays; identical to SEQ ID NO: 23488
  peptide (1)..(368): Ceres Seq. ID no. 13494771
  misc_feature (1)..(156): NCBI GI NO: 38347355 NR Description: OSJNBa0070C17.16
  misc_feature (1)..(156): NCBI GI NO: 15235269 NR Description: expressed protein [Arabidopsis thaliana]
  misc_feature (6)..(156): NCBI GI NO: 7485728 NR Description: hypothetical protein F18F4
  misc_feature (6)..(156): NCBI GI NO: 18415427 NR Description: expressed protein [Arabidopsis thaliana]
  misc_feature (1)..(159): NCBI GI NO: 7485728 NR Description: hypothetical protein F18F4
  misc_feature (1)..(159): NCBI GI NO: 18415427 NR Description: expressed protein [Arabidopsis thaliana]

SEQ ID NO: 40686 - protein, 291 aa, Zea mays subsp. mays; identical to SEQ ID NO: 23489
  peptide (1)..(291): Ceres Seq. ID no. 13494772
  misc_feature (1)..(79): NCBI GI NO: 38347355 NR Description: OSJNBa0070C17.16
  misc_feature (1)..(79): NCBI GI NO: 15235269 NR Description: expressed protein [Arabidopsis thaliana]
  misc_feature (1)..(79): NCBI GI NO: 7485728 NR Description: hypothetical protein F18F4
  misc_feature (1)..(79): NCBI GI NO: 18415427 NR Description: expressed protein [Arabidopsis thaliana]
  misc_feature (1)..(82): NCBI GI NO: 7485728 NR Description: hypothetical protein F18F4
  misc_feature (1)..(82): NCBI GI NO: 18415427 NR Description: expressed protein [Arabidopsis thaliana]

SEQ ID NO: 40687 - protein, 239 aa, Zea mays subsp. mays; identical to SEQ ID NO: 23490
  peptide (1)..(239): Ceres Seq. ID no. 13494773
  misc_feature (1)..(27): NCBI GI NO: 38347355 NR Description: OSJNBa0070C17.16
  misc_feature (1)..(27): NCBI GI NO: 15235269 NR Description: expressed protein [Arabidopsis thaliana]
  misc_feature (1)..(27): NCBI GI NO: 7485728 NR Description: hypothetical protein F18F4
  misc_feature (1)..(27): NCBI GI NO: 18415427 NR Description: expressed protein [Arabidopsis thaliana]
  misc_feature (1)..(30): NCBI GI NO: 7485728 NR Description: hypothetical protein F18F4
  misc_feature (1)..(30): NCBI GI NO: 18415427 NR Description: expressed protein [Arabidopsis thaliana]

SEQ ID NO: 40688 - DNA, 1915 bp, Zea mays subsp. mays
  misc_feature (1)..(1915): Ceres Seq. ID no. 12369726
gcacgagaccattacctagaacatcctaatcgaaaagagagaagggagaggcgagggagctcaccaggagagaggggcctgtgtgagcattgagcaaagcaaacgaagcagtacatacatctctcgctcgcagaggcccggccggccggctccatgcaacaagggacgacgagcggtggcggtgggcgatgatgatgatgatggcgggggagcacgtgctggccgctctggccaccctgcttctggcctcgctcctgaccctggtgctgaaccacttcctgcccttgcttctgaaccccaaggcccccaggggaagcttcgggtggccgctcctcggcgagacgctcaggttcctcacgccgcacgcctccaacacgctgggcggcttcctcgaggatcactgctccaggtatgggcgggtgttcaagtcccacctgttctgcaccccgacggtggtgtcctgcgaccaggacctcaaccacttcatcctgcagaacgaggagcggctgttccagtgcagctacccgaggccgatccatggcatcctgggcaagtcctccatgctcgtcgtcctgggcgaggaccacaagcgcctcaggaacctcgccctcgccctcgtcacctccaccaagctcaagcccagctaccttggcgacatcgagaagatcgcgctgcacgtcgtcggcgcatggcgacggcacggcggcgtcagggtcgtcgcattctgcgaggaggcaagaaagttcgcattcagtgtgatagtgaagcaggtgctggggctgtcgccagaggagccggtcactgcaaggatactcgaggacttcctggccttcatgaagggcctcatctccttccccctctacatcccagggaccccatatgccaaggctgtccgggcgagagagaggatatccagcactgtgaagggcatcatcaaggagcggaggagcgctgggtcatggaacaagcagggcgacttccttgacgtgctgctgtcaagcaacgagctatctgacgaggagaaagtgagctttgtgctggactccctgctgggagggtatgagaccacctcgctcctcatctccatggtcgtttatttccttggccagtctgctcaagatctggacctggttaagagggagcacgacagcataagatccaacaaaggcaaggaggagtgcttgacttcagaagactacaagaagatggaatatacccaacaagtcatcaacgaggcgctgagatgcggcaacatcgtcaagttcgtccaccggaaggcgctgaaagacgtcaaatacaaagagtatctgattccatctggctggaaggtcctaccggtcttcactgccgttcatctgaacccctcacttcatggagacgcgcagcagtttcagccctgtaggtgggagggcacaagccaagggacaagcaagaggtttacaccgttcggtggtggcccccggctctgcccaggatcagagctcgctaaagtggagactgctttcttcctccatcaccttgtcctcaattatagatggagaattgatggcgatgacattccaatggcatacccgtatgtggagtttcagagaggtctgccaatagaaatcgagccaacgtcccctgaatcttgactgtcctggagctacagccatcagttatcacaccagagagaaaaggggaaggtgcatggagtatacatgaatggtcagtgacagatctcacaagtgaaggaacactgagggcgcgtgctagtagctagcatatgaggcagctgagactgtaatttaatgtacatggtgtagatatattttgtccatggcaattgcttgaagtggctgattcacttcaccctgtaaaacattctccagtggtttcaactgctatcctataaaaaagaagggcccctgtgttt

SEQ ID NO: 40689 - protein, 481 aa, Zea mays subsp. mays
  peptide (1)..(481): Ceres Seq. ID no. 12369727
  misc_feature (233)..(473): NCBI GI NO: 32487441 NR Description: OSJNBa0016O02.25
  misc_feature (4)..(201): NCBI GI NO: 32487441 NR Description: OSJNBa0016O02.25
  misc_feature (45)..(477): NCBI GI NO: 22326806 NR Description: cytochrome p450 family; protein id: At5g14400.1
  misc_feature (4)..(253): NCBI GI NO: 2935342 NR Description: steroid 22-alpha-hydroxylase; DWF4; CYP90B1
  misc_feature (4)..(253): NCBI GI NO: 15229822 NR Description: steroid 22-alpha-hydroxylase
  misc_feature (263)..(474): NCBI GI NO: 2935342 NR Description: steroid 22-alpha-hydroxylase; DWF4; CYP90B1
  misc_feature (263)..(474): NCBI GI NO: 15229822 NR Description: steroid 22-alpha-hydroxylase
  misc_feature (45)..(278): NCBI GI NO: 11357546 NR Description: hypothetical protein F18O22
  misc_feature (318)..(477): NCBI GI NO: 11357546 NR Description: hypothetical protein F18O22
  misc_feature (40)..(474): NCBI GI NO: 34902330 NR Description: Putative steroid 22-alpha-hydroxylase
MMMMMAGEHVLAALATLLLASLLTLVLNHFLPLLLNPKAPRGSFGWPLLGETLRFLTPHASNTLGGFLEDHCSRYGRVFKSHLFCTPTVVSCDQDLNHFILQNEERLFQCSYPRPIHGILGKSSMLVVLGEDHKRLRNLALALVTSTKLKPSYLGDIEKIALHVVGAWRRHGGVRVVAFCEEARKFAFSVIVKQVLGLSPEEPVTARILEDFLAFMKGLISFPLYIPGTPYAKAVRARERISSTVKGIIKERRSAGSWNKQGDFLDVLLSSNELSDEEKVSFVLDSLLGGYETTSLLISMVVYFLGQSAQDLDLVKREHDSIRSNKGKEECLTSEDYKKMEYTQQVINEALRCGNIVKFVHRKALKDVKYKEYLIPSGWKVLPVFTAVHLNPSLHGDAQQFQPCRWEGTSQGTSKRFTPFGGGPRLCPGSELAKVETAFFLHHLVLNYRWRIDGDDIPMAYPYVEFQRGLPIEIEPTSPES

SEQ ID NO: 40690 - protein, 480 aa, Zea mays subsp. mays
  peptide (1)..(480): Ceres Seq. ID no. 12369728
  misc_feature (232)..(472): NCBI GI NO: 32487441 NR Description: OSJNBa0016O02.25
  misc_feature (3)..(200): NCBI GI NO: 32487441 NR Description: OSJNBa0016O02.25
  misc_feature (44)..(476): NCBI GI NO: 22326806 NR Description: cytochrome p450 family; protein id: At5g14400.1
  misc_feature (3)..(252): NCBI GI NO: 2935342 NR Description: steroid 22-alpha-hydroxylase; DWF4; CYP90B1
  misc_feature (3)..(252): NCBI GI NO: 15229822 NR Description: steroid 22-alpha-hydroxylase
  misc_feature (262)..(473): NCBI GI NO: 2935342 NR Description: steroid 22-alpha-hydroxylase; DWF4; CYP90B1
  misc_feature (262)..(473): NCBI GI NO: 15229822 NR Description: steroid 22-alpha-hydroxylase
  misc_feature (44)..(277): NCBI GI NO: 11357546 NR Description: hypothetical protein F18O22
  misc_feature (317)..(476): NCBI GI NO: 11357546 NR Description: hypothetical protein F18O22
  misc_feature (39)..(473): NCBI GI NO: 34902330 NR Description: Putative steroid 22-alpha-hydroxylase
MMMMAGEHVLAALATLLLASLLTLVLNHFLPLLLNPKAPRGSFGWPLLGETLRFLTPHASNTLGGFLEDHCSRYGRVFKSHLFCTPTVVSCDQDLNHFILQNEERLFQCSYPRPIHGILGKSSMLVVLGEDHKRLRNLALALVTSTKLKPSYLGDIEKIALHVVGAWRRHGGVRVVAFCEEARKFAFSVIVKQVLGLSPEEPVTARILEDFLAFMKGLISFPLYIPGTPYAKAVRARERISSTVKGIIKERRSAGSWNKQGDFLDVLLSSNELSDEEKVSFVLDSLLGGYETTSLLISMVVYFLGQSAQDLDLVKREHDSIRSNKGKEECLTSEDYKKMEYTQQVINEALRCGNIVKFVHRKALKDVKYKEYLIPSGWKVLPVFTAVHLNPSLHGDAQQFQPCRWEGTSQGTSKRFTPFGGGPRLCPGSELAKVETAFFLHHLVLNYRWRIDGDDIPMAYPYVEFQRGLPIEIEPTSPES

SEQ ID NO: 40691 - protein, 479 aa, Zea mays subsp. mays
  peptide (1)..(479): Ceres Seq. ID no. 12369729
  misc_feature (231)..(471): NCBI GI NO: 32487441 NR Description: OSJNBa0016O02.25
  misc_feature (2)..(199): NCBI GI NO: 32487441 NR Description: OSJNBa0016O02.25
  misc_feature (43)..(475): NCBI GI NO: 22326806 NR Description: cytochrome p450 family; protein id: At5g14400.1
  misc_feature (2)..(251): NCBI GI NO: 2935342 NR Description: steroid 22-alpha-hydroxylase; DWF4; CYP90B1
  misc_feature (2)..(251): NCBI GI NO: 15229822 NR Description: steroid 22-alpha-hydroxylase
  misc_feature (261)..(472): NCBI GI NO: 2935342 NR Description: steroid 22-alpha-hydroxylase; DWF4; CYP90B1
  misc_feature (261)..(472): NCBI GI NO: 15229822 NR Description: steroid 22-alpha-hydroxylase
  misc_feature (43)..(276): NCBI GI NO: 11357546 NR Description: hypothetical protein F18O22
  misc_feature (316)..(475): NCBI GI NO: 11357546 NR Description: hypothetical protein F18O22
  misc_feature (38)..(472): NCBI GI NO: 34902330 NR Description: Putative steroid 22-alpha-hydroxylase
MMMAGEHVLAALATLLLASLLTLVLNHFLPLLLNPKAPRGSFGWPLLGETLRFLTPHASNTLGGFLEDHCSRYGRVFKSHLFCTPTVVSCDQDLNHFILQNEERLFQCSYPRPIHGILGKSSMLVVLGEDHKRLRNLALALVTSTKLKPSYLGDIEKIALHVVGAWRRHGGVRVVAFCEEARKFAFSVIVKQVLGLSPEEPVTARILEDFLAFMKGLISFPLYIPGTPYAKAVRARERISSTVKGIIKERRSAGSWNKQGDFLDVLLSSNELSDEEKVSFVLDSLLGGYETTSLLISMVVYFLGQSAQDLDLVKREHDSIRSNKGKEECLTSEDYKKMEYTQQVINEALRCGNIVKFVHRKALKDVKYKEYLIPSGWKVLPVFTAVHLNPSLHGDAQQFQPCRWEGTSQGTSKRFTPFGGGPRLCPGSELAKVETAFFLHHLVLNYRWRIDGDDIPMAYPYVEFQRGLPIEIEPTSPES

SEQ ID NO: 40692 - DNA, 468 bp, Zea mays subsp. mays
  misc_feature (1)..(468): Ceres Seq. ID no. 1847474
  misc_feature (47)..(47): n is a, c, t, g, unknown, or other
gttgttttgttcttgcggagacgagacgagacgaggcgacgcgassnyaggagtcgaggaggatcggggctcaggtggtacaaacaaaggagcgtcaggggttgagggggaggggcaagatgaacaggaagccaggagactgggactgcagggcgtgccagcacctcaacttcagccgccgagacatatgccagcgctgcagcgagccacgtggagttgctgatcgtggcggcggaggaggaggaggcgactacgcaagcttcggtggccgcggtggctcctccttcggcggcggctttggcgctgctggctctgacgtccggcctggtgactggtactgctcctgcggcgcgcacaacttcgccagccgctccagctgcttcaagtgctccgcctacaaggaggaggccgctgtgaacagtggcgctggcggctttgacggcgacatgtcacgctcacggggctacg

SEQ ID NO: 40693 - protein, 155 aa, Zea mays subsp. mays
  peptide (1)..(155): Ceres Seq. ID no. 1847475
  misc_feature (43)..(70): Pfam Name: Pfam Description:  Zn-finger in Ran binding protein and others
  misc_feature (40)..(154): NCBI GI NO: 28849863 NR Description: zinc finger transcription factor ZFP30
  misc_feature (43)..(153): NCBI GI NO: 15232662 NR Description: putative zinc finger protein; protein id:At3g15680
  misc_feature (43)..(153): NCBI GI NO: 21595771 NR Description: putative zinc finger protein
  misc_feature (40)..(154): NCBI GI NO: 15239445 NR Description: putative protein; protein id: At5g25490.1
  misc_feature (40)..(152): NCBI GI NO: 5679336 NR Description: putative zinc finger protein [Oryza sativa]
  misc_feature (40)..(152): NCBI GI NO: 5803246 NR Description: ESTs AU077984
  misc_feature (93)..(145): NCBI GI NO: 34913970 NR Description: B1110C07.23
  misc_feature (42)..(81): NCBI GI NO: 34913970 NR Description: B1110C07.23
  misc_feature (43)..(111): NCBI GI NO: 27368046 NR Description: zinc finger protein [Gossypium hirsutum]
  misc_feature (84)..(135): NCBI GI NO: 15225776 NR Description: putative second messenger-dependent protein kinase
  misc_feature (15)..(15): Xaa is any aa, unknown or other
  misc_feature (16)..(16): Xaa is any aa, unknown or other
CFVLAETRRDEATRXXESRRIGAQVVQTKERQGLRGRGKMNRKPGDWDCRACQHLNFSRRDICQRCSEPRGVADRGGGGGGGDYASFGGRGGSSFGGGFGAAGSDVRPGDWYCSCGAHNFASRSSCFKCSAYKEEAAVNSGAGGFDGDMSRSRGY

SEQ ID NO: 40694 - protein, 116 aa, Zea mays subsp. mays
  peptide (1)..(116): Ceres Seq. ID no. 1847476
  misc_feature (4)..(31): Pfam Name: Pfam Description:  Zn-finger in Ran binding protein and others
  misc_feature (1)..(115): NCBI GI NO: 28849863 NR Description: zinc finger transcription factor ZFP30
  misc_feature (4)..(114): NCBI GI NO: 15232662 NR Description: putative zinc finger protein; protein id:At3g15680
  misc_feature (4)..(114): NCBI GI NO: 21595771 NR Description: putative zinc finger protein
  misc_feature (1)..(115): NCBI GI NO: 15239445 NR Description: putative protein; protein id: At5g25490.1
  misc_feature (1)..(113): NCBI GI NO: 5679336 NR Description: putative zinc finger protein [Oryza sativa]
  misc_feature (1)..(113): NCBI GI NO: 5803246 NR Description: ESTs AU077984
  misc_feature (54)..(106): NCBI GI NO: 34913970 NR Description: B1110C07.23
  misc_feature (3)..(42): NCBI GI NO: 34913970 NR Description: B1110C07.23
  misc_feature (4)..(72): NCBI GI NO: 27368046 NR Description: zinc finger protein [Gossypium hirsutum]
  misc_feature (45)..(96): NCBI GI NO: 15225776 NR Description: putative second messenger-dependent protein kinase
MNRKPGDWDCRACQHLNFSRRDICQRCSEPRGVADRGGGGGGGDYASFGGRGGSSFGGGFGAAGSDVRPGDWYCSCGAHNFASRSSCFKCSAYKEEAAVNSGAGGFDGDMSRSRGY

SEQ ID NO: 40695 - DNA, 1008 bp, Zea mays subsp. mays
  misc_feature (1)..(1008): Ceres Seq. ID no. 12384340
gaagacacaaagctgaaggcgagcgaagcaaagtagtagtagtagtactgccgttcccgtccccgacgcgcctcccgcccgagcccgcacaaccgcgccgcgtcaatcctcatgtggccgtcctgggtgaaggcgcacagctctgacagcgccgccgcctccacctccaccgccctcgtccccgccgcaggcgccggggcgtccccgcgcctctccatccccaacccgtctctcaaggacctccggtcgctgctcgcgccggactccgccgccacagccccgccctccgcctccccgtcgccgcgcgtcttgcaccgcatccgcgtcgccgcctccgcgctccgggccctccgcacgctccaccagcccccgtcccggcctccggcggcgcccgctggcaaggagccggtgccgggcggcgggcgggtggtgctgtacttcacgtccctccgcgtcgtccgcggcacctacgaggactgccgcgcggtgcgcgccatcctgcgcgggctccgcgcggccgtcgacgagcgcgacctctccatggaccccggccacctgcccgagctcgccgcgctcctcccccgcgtggcgctgccccaggtcttcgtcggcggccgccacctcggcggcgccgacgaggtccggcgcctccacgagtccggggagctccgccgcatcgtcgcccccgctcccggccccgcgttctacggcagctgcgcccgctgcggcggcgagcgatacctgctttgcggcgcctgcgacggcagccacaagcggtacagcctcaagggcggcggcgggttccgcgcctgcgccgagtgcaacgagaacgggctcgtccggtgccccgcctgctgcgtacccgtacccgtcgcctgatctagatccacgatccacctggtactggttttctgttttaattattattcaaactctactagctgtactctgtacacaaactgctaaggagcttgatgaggactggaggagaaagctaccactccgtcc

SEQ ID NO: 40696 - protein, 255 aa, Zea mays subsp. mays
  peptide (1)..(255): Ceres Seq. ID no. 12384341
  misc_feature (105)..(190): Pfam Name: Pfam Description:  Glutaredoxin
  misc_feature (1)..(251): NCBI GI NO: 34907946 NR Description: B1088C09.21
  misc_feature (1)..(186): NCBI GI NO: 19071642 NR Description: hypothetical protein
  misc_feature (160)..(249): NCBI GI NO: 19071642 NR Description: hypothetical protein
  misc_feature (78)..(249): NCBI GI NO: 34899098 NR Description: hypothetical protein~similar to Arabidopsisthaliana chromosome 5
  misc_feature (1)..(251): NCBI GI NO: 15237686 NR Description: putative protein; protein id: At5g58530.1
  misc_feature (3)..(250): NCBI GI NO: 15451042 NR Description: putative protein [Arabidopsis thaliana]
  misc_feature (3)..(250): NCBI GI NO: 30694571 NR Description: expressed protein [Arabidopsis thaliana]
  misc_feature (105)..(250): NCBI GI NO: 15227326 NR Description: unknown protein; protein id: At2g41330
  misc_feature (3)..(249): NCBI GI NO: 32490043 NR Description: OSJNBa0063C18.3
  misc_feature (100)..(248): NCBI GI NO: 15240723 NR Description: putative protein; protein id: At5g13810
MWPSWVKAHSSDSAAASTSTALVPAAGAGASPRLSIPNPSLKDLRSLLAPDSAATAPPSASPSPRVLHRIRVAASALRALRTLHQPPSRPPAAPAGKEPVPGGGRVVLYFTSLRVVRGTYEDCRAVRAILRGLRAAVDERDLSMDPGHLPELAALLPRVALPQVFVGGRHLGGADEVRRLHESGELRRIVAPAPGPAFYGSCARCGGERYLLCGACDGSHKRYSLKGGGGFRACAECNENGLVRCPACCVPVPVA

SEQ ID NO: 40697 - DNA, 1681 bp, Zea mays subsp. mays
  misc_feature (1)..(1681): Ceres Seq. ID no. 12381795
  misc_feature (1663)..(1663): n is a, c, t, g, unknown, or other
  misc_feature (1664)..(1664): n is a, c, t, g, unknown, or other
taataaaggaggcacatcgataggttctttatctggaagtagcagcataagtaattcttccggtcctggtggggatgattcacatctttggcctcagttgccagcttgggagatactggaggctgttccatttgtggttgatgctgctcttactgcttgttcccatggaagactatttccacgtgaactggccacaggcctgaaggatctggctgatttcctccctgcatctcttgctacaatagtaagctacttttccgctgaggtgacgcggggtgtctggaagcctgcatccatgaatggatcagattggcctagcccctctgtgaacctatccatggttgatgagcacatcaagaaaatcgtagctgctaccggtgttgatgttccaaagctagttacaggaggaagctcttcaggtacacttccgttaccattggctgctttcgtgagcctcacaatcacatacaagcttgacaaggcatcagagtgtttcctcaaccttgctggtccagctctagagaacctggctgcaagctgcccttggccaagcatggcaatcgttgcagcactgtggacccagaaggtgaagcgatggagcgatttcctaatattttcagcttcgcgcactgtgttccaccacaacaacgacgcagtcgtccagctcctccgaagctgcttcgccgctacccttggcatgtcttcgacatcagtatgcagctgtggaggtgtcgccagccttctgggcccacgggtactgccctggtggtttctcgccagttgcgccaggaatcctctacctccggatattccggtgcatcaaggactgctccatactcgccgaggacatactctcccttctgatgctctcagtgaaggatatcgcagaaacaactgtgcccagacaaaggtcagacaagctaaagaagaccaagtacgggatgaggcatggccaggtatctctttccgctgcaatgacgcaggtgaaggtggcggcatcgctgggggcgacactcgtctggctatccggcggcacggctctcgtccagtccctgatccaggagatgctgccgtcttggttcctgtccgcgcagaacctggatcagggcggggctagcggaggcgtggtgtacaagctgggcgggcacgcgttggcctacttcgcggtgtactcggggatgttggcctggggcatcgaccagacgcccgtgtcccggcgccgcgagagggtcatgcggtcgcacctggggttcctggcgagcgcgctggccgggaagatcttcctcggctgcgacctctccctgtggcgagcctacgtctctgggttcctaggactggtggttgaatgcaccccgtgctgggtgcaggaggtggacctgagggtgctcaagcgcctgagcagcggcctccggcactggggcgaggatgagctcgcggtggcgctcctccgccgcgccggtcccgaggctatgggcacagccgcggagatgatcttgggcagggagttgtgacgccgatgcgcgcgcgcgccgcgcggcgtatgctgttcgtcagcgatgatgcagtttttgtatataatcggttaaaatctggccatgtgtatgctcacgggtaatatttgaatgattttatctgtaaaactgttaagacgttttgatctctnnaatactaaccttcatcg

SEQ ID NO: 40698 - protein, 371 aa, Zea mays subsp. mays
  peptide (1)..(371): Ceres Seq. ID no. 12381796
  misc_feature (1)..(249): NCBI GI NO: 25370851 NR Description: hypothetical protein At2g48110
  misc_feature (1)..(249): NCBI GI NO: 18407529 NR Description: unknown protein; protein id: At2g48110.1
  misc_feature (13)..(249): NCBI GI NO: 15229478 NR Description: unknown protein; protein id: At3g23590.1
  misc_feature (13)..(249): NCBI GI NO: 26449340 NR Description: unknown protein [Arabidopsis thaliana]
  misc_feature (161)..(249): NCBI GI NO: 1223579 NR Description: cDNA101 [Arabidopsis thaliana]
  misc_feature (1)..(252): NCBI GI NO: 33146669 NR Description: unknown protein
  misc_feature (1)..(252): NCBI GI NO: 33146668 NR Description: unknown protein
  misc_feature (1)..(158): NCBI GI NO: 20197556 NR Description: unknown protein [Arabidopsis thaliana]
  misc_feature (185)..(313): NCBI GI NO: 34394478 NR Description: unknown protein
NKGGTSIGSLSGSSSISNSSGPGGDDSHLWPQLPAWEILEAVPFVVDAALTACSHGRLFPRELATGLKDLADFLPASLATIVSYFSAEVTRGVWKPASMNGSDWPSPSVNLSMVDEHIKKIVAATGVDVPKLVTGGSSSGTLPLPLAAFVSLTITYKLDKASECFLNLAGPALENLAASCPWPSMAIVAALWTQKVKRWSDFLIFSASRTVFHHNNDAVVQLLRSCFAATLGMSSTSVCSCGGVASLLGPRVLPWWFLASCARNPLPPDIPVHQGLLHTRRGHTLPSDALSEGYRRNNCAQTKVRQAKEDQVRDEAWPGISFRCNDAGEGGGIAGGDTRLAIRRHGSRPVPDPGDAAVLVPVRAEPGSGRG

SEQ ID NO: 40699 - protein, 273 aa, Zea mays subsp. mays
  peptide (1)..(273): Ceres Seq. ID no. 12381797
  misc_feature (1)..(151): NCBI GI NO: 25370851 NR Description: hypothetical protein At2g48110
  misc_feature (1)..(151): NCBI GI NO: 18407529 NR Description: unknown protein; protein id: At2g48110.1
  misc_feature (1)..(151): NCBI GI NO: 15229478 NR Description: unknown protein; protein id: At3g23590.1
  misc_feature (1)..(151): NCBI GI NO: 26449340 NR Description: unknown protein [Arabidopsis thaliana]
  misc_feature (63)..(151): NCBI GI NO: 1223579 NR Description: cDNA101 [Arabidopsis thaliana]
  misc_feature (1)..(154): NCBI GI NO: 33146669 NR Description: unknown protein
  misc_feature (1)..(154): NCBI GI NO: 33146668 NR Description: unknown protein
  misc_feature (1)..(60): NCBI GI NO: 20197556 NR Description: unknown protein [Arabidopsis thaliana]
  misc_feature (87)..(215): NCBI GI NO: 34394478 NR Description: unknown protein
MNGSDWPSPSVNLSMVDEHIKKIVAATGVDVPKLVTGGSSSGTLPLPLAAFVSLTITYKLDKASECFLNLAGPALENLAASCPWPSMAIVAALWTQKVKRWSDFLIFSASRTVFHHNNDAVVQLLRSCFAATLGMSSTSVCSCGGVASLLGPRVLPWWFLASCARNPLPPDIPVHQGLLHTRRGHTLPSDALSEGYRRNNCAQTKVRQAKEDQVRDEAWPGISFRCNDAGEGGGIAGGDTRLAIRRHGSRPVPDPGDAAVLVPVRAEPGSGRG

SEQ ID NO: 40700 - protein, 259 aa, Zea mays subsp. mays
  peptide (1)..(259): Ceres Seq. ID no. 12381798
  misc_feature (1)..(137): NCBI GI NO: 25370851 NR Description: hypothetical protein At2g48110
  misc_feature (1)..(137): NCBI GI NO: 18407529 NR Description: unknown protein; protein id: At2g48110.1
  misc_feature (1)..(137): NCBI GI NO: 15229478 NR Description: unknown protein; protein id: At3g23590.1
  misc_feature (1)..(137): NCBI GI NO: 26449340 NR Description: unknown protein [Arabidopsis thaliana]
  misc_feature (49)..(137): NCBI GI NO: 1223579 NR Description: cDNA101 [Arabidopsis thaliana]
  misc_feature (1)..(140): NCBI GI NO: 33146669 NR Description: unknown protein
  misc_feature (1)..(140): NCBI GI NO: 33146668 NR Description: unknown protein
  misc_feature (1)..(46): NCBI GI NO: 20197556 NR Description: unknown protein [Arabidopsis thaliana]
  misc_feature (73)..(201): NCBI GI NO: 34394478 NR Description: unknown protein
MVDEHIKKIVAATGVDVPKLVTGGSSSGTLPLPLAAFVSLTITYKLDKASECFLNLAGPALENLAASCPWPSMAIVAALWTQKVKRWSDFLIFSASRTVFHHNNDAVVQLLRSCFAATLGMSSTSVCSCGGVASLLGPRVLPWWFLASCARNPLPPDIPVHQGLLHTRRGHTLPSDALSEGYRRNNCAQTKVRQAKEDQVRDEAWPGISFRCNDAGEGGGIAGGDTRLAIRRHGSRPVPDPGDAAVLVPVRAEPGSGRG

SEQ ID NO: 40701 - DNA, 2573 bp, Zea mays subsp. mays
  misc_feature (1)..(2573): Ceres Seq. ID no. 12387940
  misc_feature (2542)..(2542): n is a, c, t, g, unknown, or other
  misc_feature (2543)..(2543): n is a, c, t, g, unknown, or other
gcacgagaccattacctagaacatcctaatcaaaaagtgctagggtttcccccgtcttatcgcttcctcgttcccgcagccgccgcccaaaccctagcaaacccgtcctccgccatggccgacgaccactactcgtccaagcggaagtacgacgacccctcgccgccgccgcggcgcacggggttctcttctggcccgccgcctgcctcgccgcccgctggcggcgccccgtcgtacaacagcgttgcgccgccccccgatgagatccagctcgcgaagcagcgtgcgcaggagatcgcggcgcggatctttaacgccgcagaggccaagcgccctcgcgtcgacaacggcgacgatgacgtcggcggcttcggtggaggaagttccctgggtggcagcggtggtggtggtggtggccgcatcgggggcgcaggacttggcttctcgtcctctgccggtggtgggcatggggcttctatcccaccgttatcttctcagagcagtgcaccacagtactcatatggtggacatcagggtacaagcaaaaagattgaaattccaaatggaagggttggtgttattattggaaaagctggggaaactattaggtatatccaacttcaatcaggagcaaagattcaagttacgagagaccatgaagctgaacctggtgcactgacaaggcaagttgagctttctggcaatcctgagcagataagcaaagctgaacagttgatcaaagaagttatagcagaggctgatgctgggtcatccggtgctgtatctggtggccggaaatacaatgcaccacagccaggcgctgagacattccagatgaaaattgctaataataaggtgggattgattattgggaagggtggtgagaccataaagtctatgcaggccaaatctggagcccgcattcaggttattcctttgcatctgcctgctggtgatacttcaactgaaagaactgtgcatattgatggcactcaagaacaaattgaacatgcaaagcagctggtggctgaggttaccagtgagaatcgtgccaggaatccaatgtctggtggctattctcagcagggctatcaccctcctcgtcctcagtcaaactggggcccgccttctgcgccaccccagcagtctggttatggttatatgcagcctggggcttatcctggggcaccgccacagtatggtgcacctcagcaaccttatggtagctatcccccaacatctggtggctatcagactgggtgggatcagtctcaaaaccagcaatctcatacaactccccctggtactgggtatgattattatagccagcagcagcaacctcaacaacaacaatctgcccctgggactgctgcttctactgatgccactagctacaattatggccagccttcaacatatgcttcacaaggatatgattctacctatactcagcatagtggtgggcagcaagcatatggacatgatggctactctggttaccagacccaaggccagcagcagggctactctcagcagactggttatgaccagcagggatatggtgcatctgcttatggatcagctgcgaactcgacccaggatgggtccagctatggtggtcctggtggggccacccaggcatctccggggcagcaaacttcaaccccagctgctggaagccaccctggctatgccagtcaaccgcctactagtgctgcagcaagctatccagttcaaggttcagctccatctggatatggtgctccaccaccccagcctggctatggcacccaacctccacagcaaggtggatatggtccgggcgcttatgggcagccttctccacacggcgagaaacctcctgcatcttcaccttatggacaagctccgcctcctggatctgctcagggtgttatgtgcagtatggttacagccaacctgcatacggtgcaccaccagcttaccctggtgcacccactgcaagccacccgggctatggccaacagcagtcttatggcgatgcttatggtagtggaagctatgggcagcctacagcctacactactgaagcagcagctcctgctgcatcccaggatcactctgccgcacctgccgcggcccctggaacaacagctgcgccagctcctgacaacaatgggggtgccaaaacttctgcggaaacttgatcttcaacagctaattgggaacaaactttttacaagcctctgttgtgtcgtttcctccactgttgcttaatattacacatctagtttaggctccacatctacaggttatatctttctgcctgttgttttgaccccatgaatcgctctttccgtgctgttgattagtactttgttgtttttttattgctggttagatgtttggactggtgatatatgtgtttgtgcggttactcttgttggactctaatgggtacctaccggcttggtctggacatatactgtcctatatttgtttttagcctccttttacattggttattatgtgtgctgtacaactgtcggacgtttccataagnnggtgatagttatggatgaaaatttggttcc

SEQ ID NO: 40702 - protein, 751 aa, Zea mays subsp. mays
  peptide (1)..(751): Ceres Seq. ID no. 12387941
  misc_feature (330)..(636): Pfam Name: Pfam Description:  High molecular weight glutenin subunit
  misc_feature (37)..(637): NCBI GI NO: 15225229 NR Description: KH domain protein; protein id: At2g25970
  misc_feature (171)..(635): NCBI GI NO: 7487735 NR Description: hypothetical protein T5L19
  misc_feature (171)..(635): NCBI GI NO: 22328551 NR Description: KH domain protein; protein id: At4g10070.1
  misc_feature (178)..(345): NCBI GI NO: 25511683 NR Description: F14M2.18 protein - Arabidopsis thaliana
  misc_feature (175)..(551): NCBI GI NO: 40555849 NR Description: Unknown (protein for MGC:66046) [Danio rerio]
  misc_feature (178)..(345): NCBI GI NO: 15217613 NR Description: KH domain protein; protein id: At1g33680.1
  misc_feature (174)..(562): NCBI GI NO: 28278093 NR Description: Similar to far upstream element
  misc_feature (174)..(562): NCBI GI NO: 39794540 NR Description: Unknown (protein for MGC:75632)
  misc_feature (123)..(627): NCBI GI NO: 24663043 NR Description: pericardine CG5700-PB
  misc_feature (123)..(627): NCBI GI NO: 33589386 NR Description: RE39441p [Drosophila melanogaster]
ARDHYLEHPNQKVLGFPPSYRFLVPAAAAQTLANPSSAMADDHYSSKRKYDDPSPPPRRTGFSSGPPPASPPAGGAPSYNSVAPPPDEIQLAKQRAQEIAARIFNAAEAKRPRVDNGDDDVGGFGGGSSLGGSGGGGGGRIGGAGLGFSSSAGGGHGASIPPLSSQSSAPQYSYGGHQGTSKKIEIPNGRVGVIIGKAGETIRYIQLQSGAKIQVTRDHEAEPGALTRQVELSGNPEQISKAEQLIKEVIAEADAGSSGAVSGGRKYNAPQPGAETFQMKIANNKVGLIIGKGGETIKSMQAKSGARIQVIPLHLPAGDTSTERTVHIDGTQEQIEHAKQLVAEVTSENRARNPMSGGYSQQGYHPPRPQSNWGPPSAPPQQSGYGYMQPGAYPGAPPQYGAPQQPYGSYPPTSGGYQTGWDQSQNQQSHTTPPGTGYDYYSQQQQPQQQQSAPGTAASTDATSYNYGQPSTYASQGYDSTYTQHSGGQQAYGHDGYSGYQTQGQQQGYSQQTGYDQQGYGASAYGSAANSTQDGSSYGGPGGATQASPGQQTSTPAAGSHPGYASQPPTSAAASYPVQGSAPSGYGAPPPQPGYGTQPPQQGGYGPGAYGQPSPHGEKPPASSPYGQAPPPGSAQGVMCSMVTANLHTVHHQLTLVHPLQATRAMANSSLMAMLMVVEAMGSLQPTLLKQQLLLHPRITLPHLPRPLEQQLRQLLTTMGVPKLLRKLDLQQLIGNKLFTSLCCVVSSTVA

SEQ ID NO: 40703 - protein, 713 aa, Zea mays subsp. mays
  peptide (1)..(713): Ceres Seq. ID no. 12387942
  misc_feature (292)..(598): Pfam Name: Pfam Description:  High molecular weight glutenin subunit
  misc_feature (1)..(599): NCBI GI NO: 15225229 NR Description: KH domain protein; protein id: At2g25970
  misc_feature (133)..(597): NCBI GI NO: 7487735 NR Description: hypothetical protein T5L19
  misc_feature (133)..(597): NCBI GI NO: 22328551 NR Description: KH domain protein; protein id: At4g10070.1
  misc_feature (140)..(307): NCBI GI NO: 25511683 NR Description: F14M2.18 protein - Arabidopsis thaliana
  misc_feature (137)..(513): NCBI GI NO: 40555849 NR Description: Unknown (protein for MGC:66046) [Danio rerio]
  misc_feature (140)..(307): NCBI GI NO: 15217613 NR Description: KH domain protein; protein id: At1g33680.1
  misc_feature (136)..(524): NCBI GI NO: 28278093 NR Description: Similar to far upstream element
  misc_feature (136)..(524): NCBI GI NO: 39794540 NR Description: Unknown (protein for MGC:75632)
  misc_feature (85)..(589): NCBI GI NO: 24663043 NR Description: pericardine CG5700-PB
  misc_feature (85)..(589): NCBI GI NO: 33589386 NR Description: RE39441p [Drosophila melanogaster]
MADDHYSSKRKYDDPSPPPRRTGFSSGPPPASPPAGGAPSYNSVAPPPDEIQLAKQRAQEIAARIFNAAEAKRPRVDNGDDDVGGFGGGSSLGGSGGGGGGRIGGAGLGFSSSAGGGHGASIPPLSSQSSAPQYSYGGHQGTSKKIEIPNGRVGVIIGKAGETIRYIQLQSGAKIQVTRDHEAEPGALTRQVELSGNPEQISKAEQLIKEVIAEADAGSSGAVSGGRKYNAPQPGAETFQMKIANNKVGLIIGKGGETIKSMQAKSGARIQVIPLHLPAGDTSTERTVHIDGTQEQIEHAKQLVAEVTSENRARNPMSGGYSQQGYHPPRPQSNWGPPSAPPQQSGYGYMQPGAYPGAPPQYGAPQQPYGSYPPTSGGYQTGWDQSQNQQSHTTPPGTGYDYYSQQQQPQQQQSAPGTAASTDATSYNYGQPSTYASQGYDSTYTQHSGGQQAYGHDGYSGYQTQGQQQGYSQQTGYDQQGYGASAYGSAANSTQDGSSYGGPGGATQASPGQQTSTPAAGSHPGYASQPPTSAAASYPVQGSAPSGYGAPPPQPGYGTQPPQQGGYGPGAYGQPSPHGEKPPASSPYGQAPPPGSAQGVMCSMVTANLHTVHHQLTLVHPLQATRAMANSSLMAMLMVVEAMGSLQPTLLKQQLLLHPRITLPHLPRPLEQQLRQLLTTMGVPKLLRKLDLQQLIGNKLFTSLCCVVSSTVA

SEQ ID NO: 40704 - protein, 473 aa, Zea mays subsp. mays
  peptide (1)..(473): Ceres Seq. ID no. 12387943
  misc_feature (52)..(358): Pfam Name: Pfam Description:  High molecular weight glutenin subunit
  misc_feature (1)..(359): NCBI GI NO: 15225229 NR Description: KH domain protein; protein id: At2g25970
  misc_feature (1)..(357): NCBI GI NO: 7487735 NR Description: hypothetical protein T5L19
  misc_feature (1)..(357): NCBI GI NO: 22328551 NR Description: KH domain protein; protein id: At4g10070.1
  misc_feature (1)..(67): NCBI GI NO: 25511683 NR Description: F14M2.18 protein - Arabidopsis thaliana
  misc_feature (1)..(273): NCBI GI NO: 40555849 NR Description: Unknown (protein for MGC:66046) [Danio rerio]
  misc_feature (1)..(67): NCBI GI NO: 15217613 NR Description: KH domain protein; protein id: At1g33680.1
  misc_feature (1)..(284): NCBI GI NO: 28278093 NR Description: Similar to far upstream element
  misc_feature (1)..(284): NCBI GI NO: 39794540 NR Description: Unknown (protein for MGC:75632)
  misc_feature (1)..(349): NCBI GI NO: 24663043 NR Description: pericardine CG5700-PB
  misc_feature (1)..(349): NCBI GI NO: 33589386 NR Description: RE39441p [Drosophila melanogaster]
MKIANNKVGLIIGKGGETIKSMQAKSGARIQVIPLHLPAGDTSTERTVHIDGTQEQIEHAKQLVAEVTSENRARNPMSGGYSQQGYHPPRPQSNWGPPSAPPQQSGYGYMQPGAYPGAPPQYGAPQQPYGSYPPTSGGYQTGWDQSQNQQSHTTPPGTGYDYYSQQQQPQQQQSAPGTAASTDATSYNYGQPSTYASQGYDSTYTQHSGGQQAYGHDGYSGYQTQGQQQGYSQQTGYDQQGYGASAYGSAANSTQDGSSYGGPGGATQASPGQQTSTPAAGSHPGYASQPPTSAAASYPVQGSAPSGYGAPPPQPGYGTQPPQQGGYGPGAYGQPSPHGEKPPASSPYGQAPPPGSAQGVMCSMVTANLHTVHHQLTLVHPLQATRAMANSSLMAMLMVVEAMGSLQPTLLKQQLLLHPRITLPHLPRPLEQQLRQLLTTMGVPKLLRKLDLQQLIGNKLFTSLCCVVSSTVA

SEQ ID NO: 40705 - DNA, 1388 bp, Zea mays subsp. mays
  misc_feature (1)..(1388): Ceres Seq. ID no. 12420175
  misc_feature (672)..(672): n is a, c, t, g, unknown, or other
gcacgagaccattacctagaacatcctaatcgaaaaataggataggaggtggtaaagagagagagccagaagcgaacgaggaggattcgagatggaggtggtggtgcctgtcatggcgccaagtgcgccgtgcagcccaagaaccgcggccatcgccggcgaccacctcccggcctactgctacttctactccagcgcgccgacgagcccgtccagggcgagctgcgcggggggcgccgccacgacgacgacgccgggctcgggcgacgaggccacgttcgacttcacgctcggcttcagcgggcagctgcaggaggccacgccgaccctcgcggccgccgacgagctcttcgagggcggcaggatccggccgctgaacacgccgcacccgagcattccgctggccgacgacgcctcgagctcctcctattccggtggccctcggtggtccccgagaagagccggcggcgcggatcgtcgggcggaggcgccgttggagagaggcaggtcgggctacagacccgccgcctcgacggcggcggcggcggcggcggcctcgtcgaggagtaggagggccacgcggtctctgtccccgttcagggtcaggggcggcggcggaggaggaggaggcgtggacgacgacgaggagtcccctccgtctccccgaacctntatgatgcggggctgcggcagcggcagcaagaagtggcggctcaaggacctgttcctgttccgcagcgcgtcggagggccgcgccaccaccggcggcggcagcaaggacccgctgttcaagtacaccatgctgtcgtcgtcccagacgctgcggaccggcggcgacggcagcgcgtccatgcgcaaggggagaggctccgcggcgtccgccagcgacatgccgatgccgtacgccgtgccccggggggcggcggcggccgaggacgcgcggcgccggacgacggccaccacgccgctgccgttccaccgcaacagcctcttcggctacctgcgctccaacccggcgatccacagcatcagcaggaagctcgggggcgggggcgggggcggcagcggcagcagcaaccatcccgtaccacccgccgcctccaactccagtagtcgtggcaggccgacatgatccgtccgcataccgcaagcagtcccgaaaccttgacggcgatgcagctcgacgcagaagtggccgccggcggccgtttttatctccccaccccactcctttttgttcccttgtaatttaatttgatgcgtattctttcgtttcatgtgaaccaacaaggtactagtagttagtgtagatatgtacgtacgtacgtacacggcggtatgtatgtatccccaaggatttctttgaagaaagaaaagataattagcgt

SEQ ID NO: 40706 - protein, 346 aa, Zea mays subsp. mays
  peptide (1)..(346): Ceres Seq. ID no. 12420176
  misc_feature (1)..(321): NCBI GI NO: 34906768 NR Description: contains EST AU082121
  misc_feature (33)..(315): NCBI GI NO: 18397927 NR Description: Calmodulin-binding protein; protein id:At2g15760
  misc_feature (194)..(194): Xaa is any aa, unknown or other
MEVVVPVMAPSAPCSPRTAAIAGDHLPAYCYFYSSAPTSPSRASCAGGAATTTTPGSGDEATFDFTLGFSGQLQEATPTLAAADELFEGGRIRPLNTPHPSIPLADDASSSSYSGGPRWSPRRAGGADRRAEAPLERGRSGYRPAASTAAAAAAASSRSRRATRSLSPFRVRGGGGGGGGVDDDEESPPSPRTXMMRGCGSGSKKWRLKDLFLFRSASEGRATTGGGSKDPLFKYTMLSSSQTLRTGGDGSASMRKGRGSAASASDMPMPYAVPRGAAAAEDARRRTTATTPLPFHRNSLFGYLRSNPAIHSISRKLGGGGGGGSGSSNHPVPPAASNSSSRGRPT

SEQ ID NO: 40707 - protein, 339 aa, Zea mays subsp. mays
  peptide (1)..(339): Ceres Seq. ID no. 12420177
  misc_feature (1)..(314): NCBI GI NO: 34906768 NR Description: contains EST AU082121
  misc_feature (26)..(308): NCBI GI NO: 18397927 NR Description: Calmodulin-binding protein; protein id:At2g15760
  misc_feature (187)..(187): Xaa is any aa, unknown or other
MAPSAPCSPRTAAIAGDHLPAYCYFYSSAPTSPSRASCAGGAATTTTPGSGDEATFDFTLGFSGQLQEATPTLAAADELFEGGRIRPLNTPHPSIPLADDASSSSYSGGPRWSPRRAGGADRRAEAPLERGRSGYRPAASTAAAAAAASSRSRRATRSLSPFRVRGGGGGGGGVDDDEESPPSPRTXMMRGCGSGSKKWRLKDLFLFRSASEGRATTGGGSKDPLFKYTMLSSSQTLRTGGDGSASMRKGRGSAASASDMPMPYAVPRGAAAAEDARRRTTATTPLPFHRNSLFGYLRSNPAIHSISRKLGGGGGGGSGSSNHPVPPAASNSSSRGRPT

SEQ ID NO: 40708 - DNA, 1865 bp, Zea mays subsp. mays
  misc_feature (1)..(1865): Ceres Seq. ID no. 12417373
gcacgagaccattacctagaacatcctaatcgaaaaactctcacgcacacactccacagtgccactcgtctcgctcgctcgcgccagctggtccggcagcagacagcatgggttcgtcggcggcgcttcagccgaagcagctgtaccagctcgtggtgaacaacttcgtcgccgtgctcgctgcgccgctggccgtggcggccgtcgtcaatgcggcgcgcgtcgggccggacgagctgctcggcaggctgcaggcgctccgggcggtgcacgtatttctggccgtgttcgtcgcggccgccacggcgatactgtacgtcctgctgcggccccgggccgtgtacctggtggactacgcctgcttccgcacgcggcccaactgccgcgtccccttcgccaccttcctggagcacgcgaagctggtgacgttcgtggagggggcctccatcgacgagcgcagcgtccggttcatgacgcggctgctggagcggtccggcctcggcgaggagacctgcctgcccccggcccaccactacatcccgccgtaccggaacatggaggcctcgcgcgcggaggtggagctcgtcatcttctcggccatcgacgacctgctcgcgaagacgggcatcagccccagcgccatcgacatcctggtggtgaactgcagcctcttcgcgcccgtcccgtccttcacggacatggtgatcaacaggtacgggatgcggccggacgtccgcaatgtgcacctgtccgggatggggtgcagcgccgggctcatctccgtggggctggcgcgcaacctgctgcaggtggcgggccggggcgcgcacgcgctggtggtgtcgacggagaccatcacccccaactactacgtgggcaaggagcgcgccatgctcctgcccaactgcctcttccgcatcggcggcgccgccgtgctgctgtccacgtcccggtccagggcccggttccgcctggcccgcgtggtgcgcacgctgacgggcgcccaggacagcgcgtaccggtgcgtgttccaggaggaggacggcgagggccaccgcgggatcaacctgtccaaggacctgatgaccatcgcgggcgacgcgctcaaggccaacatcaccgccatcgggccgctggtgctgccggcctcggagcagctgctgttcgcgctgtccttcatcgcgcggcgcgtgctgaaccggcgcgtgaagccgtacctcccggacttccgcacggcgttcgagcacttctgcatccacgcggggggccgcgcggtgatcgacgagctgcagcgcagcctgggcctgtcggacgaggacgtggaggcgtcgcgcatggcgcctgcaccggttcggcaacacgtcgagcagctcggtgtggtacgagctggcgtacatcgaggccaagggccggatgcgccgcggcgaccgcgtgtggatgatcggattcggctccgggttcaagtgcaacagcgcggcctgggagtgcatcgcgccggcgcgcaccgccgaggggccctgggcggagagcgtcagccgctaccccgtggacatccccgaggtgctcaagcactagccgctatcccgtggacatcaggccgggcatgcatgtgaccggccgacgacgtgacagcgtgttttggacttgcttgtggtgctggccgggccggacgcgttgaatgccgagcctgacgcgtccatgtgtgcggtgcgctccagcccggacaggtggttgcgagagggtacaccgtgttaaatccgggccatttacacacgtatagtactcgtgctcctctagatcgtgtaccccttccttctcttcttgttcttcttctttttaccttccttttcaacatttgttttccc

SEQ ID NO: 40709 - protein, 501 aa, Zea mays subsp. mays
  peptide (1)..(501): Ceres Seq. ID no. 12417374
  misc_feature (322)..(410): Pfam Name: Pfam Description:  Chalcone and stilbene synthases
  misc_feature (10)..(410): NCBI GI NO: 34913436 NR Description: putative fatty acid condensing enzyme CUT1
  misc_feature (1)..(410): NCBI GI NO: 17979464 NR Description: At1g68530/T26J14_10 [Arabidopsis thaliana]
  misc_feature (1)..(410): NCBI GI NO: 15221431 NR Description: very-long-chain fatty acid condensing enzyme
  misc_feature (3)..(410): NCBI GI NO: 21593111 NR Description: very-long-chain fatty acid condensing enzyme CUT1
  misc_feature (3)..(410): NCBI GI NO: 21618184 NR Description: fatty acid condensing enzyme CUT1, putative
  misc_feature (3)..(410): NCBI GI NO: 15222592 NR Description: fatty acid condensing enzyme CUT1, putative
  misc_feature (3)..(410): NCBI GI NO: 28393607 NR Description: putative fatty acid condensing enzyme CUT1
  misc_feature (13)..(410): NCBI GI NO: 32172502 NR Description: FAE1 [Marchantia polymorpha]
  misc_feature (13)..(410): NCBI GI NO: 15223556 NR Description: very-long-chain fatty acid condensing enzyme CUT1
  misc_feature (13)..(410): NCBI GI NO: 15226724 NR Description: putative beta-ketoacyl-CoA synthase
MGSSAALQPKQLYQLVVNNFVAVLAAPLAVAAVVNAARVGPDELLGRLQALRAVHVFLAVFVAAATAILYVLLRPRAVYLVDYACFRTRPNCRVPFATFLEHAKLVTFVEGASIDERSVRFMTRLLERSGLGEETCLPPAHHYIPPYRNMEASRAEVELVIFSAIDDLLAKTGISPSAIDILVVNCSLFAPVPSFTDMVINRYGMRPDVRNVHLSGMGCSAGLISVGLARNLLQVAGRGAHALVVSTETITPNYYVGKERAMLLPNCLFRIGGAAVLLSTSRSRARFRLARVVRTLTGAQDSAYRCVFQEEDGEGHRGINLSKDLMTIAGDALKANITAIGPLVLPASEQLLFALSFIARRVLNRRVKPYLPDFRTAFEHFCIHAGGRAVIDELQRSLGLSDEDVEASRMAPAPVRQHVEQLGVVRAGVHRGQGPDAPRRPRVDDRIRLRVQVQQRGLGVHRAGAHRRGALGGERQPLPRGHPRGAQALAAIPWTSGRACM

SEQ ID NO: 40710 - protein, 380 aa, Zea mays subsp. mays
  peptide (1)..(380): Ceres Seq. ID no. 12417375
  misc_feature (201)..(289): Pfam Name: Pfam Description:  Chalcone and stilbene synthases
  misc_feature (1)..(289): NCBI GI NO: 34913436 NR Description: putative fatty acid condensing enzyme CUT1
  misc_feature (1)..(289): NCBI GI NO: 17979464 NR Description: At1g68530/T26J14_10 [Arabidopsis thaliana]
  misc_feature (1)..(289): NCBI GI NO: 15221431 NR Description: very-long-chain fatty acid condensing enzyme
  misc_feature (1)..(289): NCBI GI NO: 21593111 NR Description: very-long-chain fatty acid condensing enzyme CUT1
  misc_feature (1)..(289): NCBI GI NO: 21618184 NR Description: fatty acid condensing enzyme CUT1, putative
  misc_feature (1)..(289): NCBI GI NO: 15222592 NR Description: fatty acid condensing enzyme CUT1, putative
  misc_feature (1)..(289): NCBI GI NO: 28393607 NR Description: putative fatty acid condensing enzyme CUT1
  misc_feature (1)..(289): NCBI GI NO: 32172502 NR Description: FAE1 [Marchantia polymorpha]
  misc_feature (1)..(289): NCBI GI NO: 15223556 NR Description: very-long-chain fatty acid condensing enzyme CUT1
  misc_feature (1)..(289): NCBI GI NO: 15226724 NR Description: putative beta-ketoacyl-CoA synthase
MTRLLERSGLGEETCLPPAHHYIPPYRNMEASRAEVELVIFSAIDDLLAKTGISPSAIDILVVNCSLFAPVPSFTDMVINRYGMRPDVRNVHLSGMGCSAGLISVGLARNLLQVAGRGAHALVVSTETITPNYYVGKERAMLLPNCLFRIGGAAVLLSTSRSRARFRLARVVRTLTGAQDSAYRCVFQEEDGEGHRGINLSKDLMTIAGDALKANITAIGPLVLPASEQLLFALSFIARRVLNRRVKPYLPDFRTAFEHFCIHAGGRAVIDELQRSLGLSDEDVEASRMAPAPVRQHVEQLGVVRAGVHRGQGPDAPRRPRVDDRIRLRVQVQQRGLGVHRAGAHRRGALGGERQPLPRGHPRGAQALAAIPWTSGRACM

SEQ ID NO: 40711 - protein, 352 aa, Zea mays subsp. mays
  peptide (1)..(352): Ceres Seq. ID no. 12417376
  misc_feature (173)..(261): Pfam Name: Pfam Description:  Chalcone and stilbene synthases
  misc_feature (1)..(261): NCBI GI NO: 34913436 NR Description: putative fatty acid condensing enzyme CUT1
  misc_feature (1)..(261): NCBI GI NO: 17979464 NR Description: At1g68530/T26J14_10 [Arabidopsis thaliana]
  misc_feature (1)..(261): NCBI GI NO: 15221431 NR Description: very-long-chain fatty acid condensing enzyme
  misc_feature (1)..(261): NCBI GI NO: 21593111 NR Description: very-long-chain fatty acid condensing enzyme CUT1
  misc_feature (1)..(261): NCBI GI NO: 21618184 NR Description: fatty acid condensing enzyme CUT1, putative
  misc_feature (1)..(261): NCBI GI NO: 15222592 NR Description: fatty acid condensing enzyme CUT1, putative
  misc_feature (1)..(261): NCBI GI NO: 28393607 NR Description: putative fatty acid condensing enzyme CUT1
  misc_feature (1)..(261): NCBI GI NO: 32172502 NR Description: FAE1 [Marchantia polymorpha]
  misc_feature (1)..(261): NCBI GI NO: 15223556 NR Description: very-long-chain fatty acid condensing enzyme CUT1
  misc_feature (1)..(261): NCBI GI NO: 15226724 NR Description: putative beta-ketoacyl-CoA synthase
MEASRAEVELVIFSAIDDLLAKTGISPSAIDILVVNCSLFAPVPSFTDMVINRYGMRPDVRNVHLSGMGCSAGLISVGLARNLLQVAGRGAHALVVSTETITPNYYVGKERAMLLPNCLFRIGGAAVLLSTSRSRARFRLARVVRTLTGAQDSAYRCVFQEEDGEGHRGINLSKDLMTIAGDALKANITAIGPLVLPASEQLLFALSFIARRVLNRRVKPYLPDFRTAFEHFCIHAGGRAVIDELQRSLGLSDEDVEASRMAPAPVRQHVEQLGVVRAGVHRGQGPDAPRRPRVDDRIRLRVQVQQRGLGVHRAGAHRRGALGGERQPLPRGHPRGAQALAAIPWTSGRACM

SEQ ID NO: 40712 - DNA, 2782 bp, Zea mays subsp. mays
  misc_feature (1)..(2782): Ceres Seq. ID no. 12361524
gaaaaatcccaccccccctccactccactaccacggcggcacggcctgcctctgcagctctgccctgctccgcacccctcgctctccaaccccaacgcgcggcgttgctaaaattcaccgcagcgcttactccagtttggccacctcaccacccgccgccgctgtttaagaaggccccgcgcccgatcggggatcacgaaccttggccgccgctgccggagtgggggcgtagatttccggcggccatggggggcgccgtgatggtcgccatcgcggcctctatcggcaacttgctgcagggctgggacaatgcgacaattgctggagccgtcctgtacataaagaaggaattcaacctgcagagcgagcctctgatcgagggcctcatcgtcgccatgtccctcattggggcaacagtcatcacgacgttctccggggcagcggccgactgcgttggtaggaggcccatgctggtcgcctcggctgtcctctacttcgtcagtgggctggtgatgctttgggcgccaagtgtgtacatcttgctcctcgcaaggctcattgatgggttcggtatcggtttggcggtcacacttgttcctctctacatctccgagactgcaccgacagacattcgtgggctgttgaacacgttgccgcagttcagtgggtcaggagggatgttcctctcctactgcatggtgtttgggatgtccctcatgcccaaacctgattggaggctcatgcttggagttctgtcgatcccgtcacttatttactttggactgactgtcttctacttgcctgaatcaccaaggtggcttgtgagcaaaggaaggatggcggaggcgaagagagtgttgcaaaggctgcggggaagagaagatgtctcaggggagatggctcttctagttgaaggtttgggggtcggtaaagatacacgtattgaagaatacataattggtcccgatgatgaacttgctgatgaagggctggctccagatccagagaagatcaaactatatggacctgaagaaggcctatcttgggttgcccgacctgttcggggacaaagtgctcttggaagcgcgttaggtctcatctctcgtcatgggagtatggcggctagtcagggtaagcccctcgtggatcctatggtcactcttttcggaagtgttcatgaaaagatgcctgagatcatggggagcatgaggagcacattgtttcccaactttggcagcatgtttagtgttgccgaccagcagcaggtgaaagctgactgggacgccgagagtcaaagggaaggtgaagattatgcttcggatcatggtggcgatgacatcgaggataacctccaaagcccacttatttctcgtcaggcaacaagtgtggaaggaaaggagatcgctgcacctcatggtagcatattgggtgctgtgggaaggagcagtagcttgcagggaggggaggcagtaagcagcatgggcattggcggaggatggcagttggcgtggaaatggaccgagagagagggcgaagatgggcaaaaggaaggtggcttccagcgtatttacttgcatgaggagggcgtacaaggcaacaggggttctatattgtcattaccaggcggggatgttcctcctggtggtgagttcatccaggctgcagctcttgtgagccaaccagctctttactctaaggaactgctggagcaacgtgctgctggtcctgcgatgatgcatccatctgaagcagttactaaaggtccaagatgggccgacctatttgagcctggggtgaagcatgcactgtttgttggcataggaatacagatcctgcaacagtttgctggcatcaacggcgttctctactacactcctcaaattcttgagcaagcaggcgttggtgttcttctgtcgaacctcggccttaacgcttcttcggcatcaatcctcattagcgccctgacgaccttactgatgctcccaagcatcggcattgcgatgaggctcatggatatgtccggaaggaggtttctcctcctcgcgacgatcccagtcctaatagtcgcgctactcgtcctggtggtgtccaacatcgtggacgtgggggacgtggcgcacgcggcgctctccacggccagcgtcatagtctacttctgcttcttcgtcatggggttcgggcccgtccccaacatcctctgcgcagagatcttccccaccacggtccgcggtgtctgcatcgccatctgcgccctggccttctggctcggtgacatcatcgtgacgtacactctccccgtgatgctgaacgtcgtcgggctcgccggcgtctttggggtgtacgccgtcgtgtgcgtcctagccctcgcgttcgtgttcgtcaaggtgcccgagacgaagggcatgcctctcgaggtcatcaccgagttcttctccgttggggcaaagcaagccaaggaagaggaggaggaggaggccagggaaggttgatcacccggacggccggacccagttaccggcaccgcctgtggggatttttgtggtctgcacacttcactgtggttggtcctgtgatgatgtatttgtgaaaaaaaaaactttgggtagggggcagagatgatttggctgtacaatgtgaggcttgattctgccaaaggctggccttcagaactaggaagggtgtctgttatcttcttttgttgcttggagaccttgtgcttgtgttggttggaattttgttgcctatgtaactagtggtgtatgacagttatgctattggtttc

SEQ ID NO: 40713 - protein, 828 aa, Zea mays subsp. mays
  peptide (1)..(828): Ceres Seq. ID no. 12361525
  misc_feature (156)..(828): NCBI GI NO: 26986188 NR Description: sugar transporter [Hordeum vulgare subsp. vulgare]
  misc_feature (82)..(823): NCBI GI NO: 25402933 NR Description: Sugar transporter
  misc_feature (82)..(823): NCBI GI NO: 15218044 NR Description: putative sugar transporter protein
  misc_feature (82)..(823): NCBI GI NO: 11358863 NR Description: sugar transport protein
  misc_feature (85)..(401): NCBI GI NO: 6063538 NR Description: similar to sugar transporter protein. (AL022604)
  misc_feature (85)..(401): NCBI GI NO: 23306123 NR Description: Putative sugar transporter protein
  misc_feature (542)..(822): NCBI GI NO: 6063538 NR Description: similar to sugar transporter protein. (AL022604)
  misc_feature (542)..(822): NCBI GI NO: 23306123 NR Description: Putative sugar transporter protein
  misc_feature (488)..(535): NCBI GI NO: 6063538 NR Description: similar to sugar transporter protein. (AL022604)
  misc_feature (488)..(535): NCBI GI NO: 23306123 NR Description: Putative sugar transporter protein
KIPPPLHSTTTAARPASAALPCSAPLALQPQRAALLKFTAALTPVWPPHHPPPLFKKAPRPIGDHEPWPPLPEWGRRFPAAMGGAVMVAIAASIGNLLQGWDNATIAGAVLYIKKEFNLQSEPLIEGLIVAMSLIGATVITTFSGAAADCVGRRPMLVASAVLYFVSGLVMLWAPSVYILLLARLIDGFGIGLAVTLVPLYISETAPTDIRGLLNTLPQFSGSGGMFLSYCMVFGMSLMPKPDWRLMLGVLSIPSLIYFGLTVFYLPESPRWLVSKGRMAEAKRVLQRLRGREDVSGEMALLVEGLGVGKDTRIEEYIIGPDDELADEGLAPDPEKIKLYGPEEGLSWVARPVRGQSALGSALGLISRHGSMAASQGKPLVDPMVTLFGSVHEKMPEIMGSMRSTLFPNFGSMFSVADQQQVKADWDAESQREGEDYASDHGGDDIEDNLQSPLISRQATSVEGKEIAAPHGSILGAVGRSSSLQGGEAVSSMGIGGGWQLAWKWTEREGEDGQKEGGFQRIYLHEEGVQGNRGSILSLPGGDVPPGGEFIQAAALVSQPALYSKELLEQRAAGPAMMHPSEAVTKGPRWADLFEPGVKHALFVGIGIQILQQFAGINGVLYYTPQILEQAGVGVLLSNLGLNASSASILISALTTLLMLPSIGIAMRLMDMSGRRFLLLATIPVLIVALLVLVVSNIVDVGDVAHAALSTASVIVYFCFFVMGFGPVPNILCAEIFPTTVRGVCIAICALAFWLGDIIVTYTLPVMLNVVGLAGVFGVYAVVCVLALAFVFVKVPETKGMPLEVITEFFSVGAKQAKEEEEEEAREG

SEQ ID NO: 40714 - protein, 747 aa, Zea mays subsp. mays
  peptide (1)..(747): Ceres Seq. ID no. 12361526
  misc_feature (75)..(747): NCBI GI NO: 26986188 NR Description: sugar transporter [Hordeum vulgare subsp. vulgare]
  misc_feature (1)..(742): NCBI GI NO: 25402933 NR Description: Sugar transporter
  misc_feature (1)..(742): NCBI GI NO: 15218044 NR Description: putative sugar transporter protein
  misc_feature (1)..(742): NCBI GI NO: 11358863 NR Description: sugar transport protein
  misc_feature (4)..(320): NCBI GI NO: 6063538 NR Description: similar to sugar transporter protein. (AL022604)
  misc_feature (4)..(320): NCBI GI NO: 23306123 NR Description: Putative sugar transporter protein
  misc_feature (461)..(741): NCBI GI NO: 6063538 NR Description: similar to sugar transporter protein. (AL022604)
  misc_feature (461)..(741): NCBI GI NO: 23306123 NR Description: Putative sugar transporter protein
  misc_feature (407)..(454): NCBI GI NO: 6063538 NR Description: similar to sugar transporter protein. (AL022604)
  misc_feature (407)..(454): NCBI GI NO: 23306123 NR Description: Putative sugar transporter protein
MGGAVMVAIAASIGNLLQGWDNATIAGAVLYIKKEFNLQSEPLIEGLIVAMSLIGATVITTFSGAAADCVGRRPMLVASAVLYFVSGLVMLWAPSVYILLLARLIDGFGIGLAVTLVPLYISETAPTDIRGLLNTLPQFSGSGGMFLSYCMVFGMSLMPKPDWRLMLGVLSIPSLIYFGLTVFYLPESPRWLVSKGRMAEAKRVLQRLRGREDVSGEMALLVEGLGVGKDTRIEEYIIGPDDELADEGLAPDPEKIKLYGPEEGLSWVARPVRGQSALGSALGLISRHGSMAASQGKPLVDPMVTLFGSVHEKMPEIMGSMRSTLFPNFGSMFSVADQQQVKADWDAESQREGEDYASDHGGDDIEDNLQSPLISRQATSVEGKEIAAPHGSILGAVGRSSSLQGGEAVSSMGIGGGWQLAWKWTEREGEDGQKEGGFQRIYLHEEGVQGNRGSILSLPGGDVPPGGEFIQAAALVSQPALYSKELLEQRAAGPAMMHPSEAVTKGPRWADLFEPGVKHALFVGIGIQILQQFAGINGVLYYTPQILEQAGVGVLLSNLGLNASSASILISALTTLLMLPSIGIAMRLMDMSGRRFLLLATIPVLIVALLVLVVSNIVDVGDVAHAALSTASVIVYFCFFVMGFGPVPNILCAEIFPTTVRGVCIAICALAFWLGDIIVTYTLPVMLNVVGLAGVFGVYAVVCVLALAFVFVKVPETKGMPLEVITEFFSVGAKQAKEEEEEEAREG

SEQ ID NO: 40715 - protein, 742 aa, Zea mays subsp. mays
  peptide (1)..(742): Ceres Seq. ID no. 12361527
  misc_feature (70)..(742): NCBI GI NO: 26986188 NR Description: sugar transporter [Hordeum vulgare subsp. vulgare]
  misc_feature (1)..(737): NCBI GI NO: 25402933 NR Description: Sugar transporter
  misc_feature (1)..(737): NCBI GI NO: 15218044 NR Description: putative sugar transporter protein
  misc_feature (1)..(737): NCBI GI NO: 11358863 NR Description: sugar transport protein
  misc_feature (1)..(315): NCBI GI NO: 6063538 NR Description: similar to sugar transporter protein. (AL022604)
  misc_feature (1)..(315): NCBI GI NO: 23306123 NR Description: Putative sugar transporter protein
  misc_feature (456)..(736): NCBI GI NO: 6063538 NR Description: similar to sugar transporter protein. (AL022604)
  misc_feature (456)..(736): NCBI GI NO: 23306123 NR Description: Putative sugar transporter protein
  misc_feature (402)..(449): NCBI GI NO: 6063538 NR Description: similar to sugar transporter protein. (AL022604)
  misc_feature (402)..(449): NCBI GI NO: 23306123 NR Description: Putative sugar transporter protein
MVAIAASIGNLLQGWDNATIAGAVLYIKKEFNLQSEPLIEGLIVAMSLIGATVITTFSGAAADCVGRRPMLVASAVLYFVSGLVMLWAPSVYILLLARLIDGFGIGLAVTLVPLYISETAPTDIRGLLNTLPQFSGSGGMFLSYCMVFGMSLMPKPDWRLMLGVLSIPSLIYFGLTVFYLPESPRWLVSKGRMAEAKRVLQRLRGREDVSGEMALLVEGLGVGKDTRIEEYIIGPDDELADEGLAPDPEKIKLYGPEEGLSWVARPVRGQSALGSALGLISRHGSMAASQGKPLVDPMVTLFGSVHEKMPEIMGSMRSTLFPNFGSMFSVADQQQVKADWDAESQREGEDYASDHGGDDIEDNLQSPLISRQATSVEGKEIAAPHGSILGAVGRSSSLQGGEAVSSMGIGGGWQLAWKWTEREGEDGQKEGGFQRIYLHEEGVQGNRGSILSLPGGDVPPGGEFIQAAALVSQPALYSKELLEQRAAGPAMMHPSEAVTKGPRWADLFEPGVKHALFVGIGIQILQQFAGINGVLYYTPQILEQAGVGVLLSNLGLNASSASILISALTTLLMLPSIGIAMRLMDMSGRRFLLLATIPVLIVALLVLVVSNIVDVGDVAHAALSTASVIVYFCFFVMGFGPVPNILCAEIFPTTVRGVCIAICALAFWLGDIIVTYTLPVMLNVVGLAGVFGVYAVVCVLALAFVFVKVPETKGMPLEVITEFFSVGAKQAKEEEEEEAREG

SEQ ID NO: 40716 - DNA, 1315 bp, Zea mays subsp. mays
  misc_feature (1)..(1315): Ceres Seq. ID no. 13598890
cacctggagttctctccgaggaaacaatcgagaagatggaatttgaggtcgagaggttaacaagactaaagaccagcagactgaaggaaatcgtcatgaaaaggagggcagagttagaagcgatctgccagaatgcacacatagaacctgatgtcagcacggcccctgaacagactgattctttgatcgattctggcctcatcgacccttctgagctcctggcgaatattgagtcacaaatattaaaagcgaaagaagagtctcttagtcggaaagatataatggacaggataaatagatggattgctgcttgcgatgaagaggcttggcttgaagaatataaccaggacccaaagaggtacagtgctggaaggggtgctcatataaaccttaaacgggcagaaaaggcacggattttggttagaaaaatcccaagtatggtggacgacttgataaaccgaacctttgcttgggaaaacgcaagaaataaaccctttctctatgatgggggacgcctaatatctgtactagaagagtacaggcttagccggcatcagaaagaagaggaaaatcgacggtaccgggaccagaagaagctggagagcatcctacttgcagagaaagaagcgatcttcggatctagaccaagcccaaggaagacgagcagcttaagtaggaaggcaaatgggtaccggccaaatgggaacaccaacggactcaagactccaactcctcgccgattgtctctcggcagtgctactcctgagcttttgacgcccagatcgtactctggccataatagatactttggcgatgtgaggcgtctatcgacttcccatctgaacttcggtgatgattcgctgtcaacgtttacatccatcagtggctctgaaccagaatccccctctattggatgaacaccgtactgctggatgactggatggtcagtattgcgtattgtaaatgggcaccatgttaccaagttcttgcactagcatgtacattcctgatgtcatatatttagctcatattggagtactaagtattggacgggttgacttggtttgggttgggtgtggagttgaattgtttcaagttgatggctttgtagattgacaattaggcggaaagatgtaggggagcgatctggatttgggcagtcagctgtaacatatcataacttatgtgtttggtttgtgtgtgcaaaaaaaaaaaaaaaaaaaaaaaaaaaaaaaaaaaaaaaaaaaaaaaaaaaaaaaaaaaaataaaaaaaaaaaaaaaaaatatcgataccgtcgacctcgagggggggccc

SEQ ID NO: 40717 - protein, 304 aa, Zea mays subsp. mays
  peptide (1)..(304): Ceres Seq. ID no. 13598891
  misc_feature (3)..(301): Pfam Name: MAP65/ASE1 family Pfam Description: Microtubule associated protein
  misc_feature (3)..(303): NCBI GI NO: 27357984 NR Description: Unknown protein
  misc_feature (1)..(304): NCBI GI NO: 25410943 NR Description: hypothetical protein At2g01910
  misc_feature (1)..(304): NCBI GI NO: 30677965 NR Description: microtubule associated protein (MAP65/ASE1) family
  misc_feature (1)..(301): NCBI GI NO: 21539547 NR Description: unknown protein [Arabidopsis thaliana]
  misc_feature (1)..(301): NCBI GI NO: 8778239 NR Description: F10B6.9 [Arabidopsis thaliana]
  misc_feature (2)..(278): NCBI GI NO: 28301942 NR Description: unknown protein
  misc_feature (1)..(251): NCBI GI NO: 11558252 NR Description: microtubule-associated protein MAP65-1a
  misc_feature (1)..(301): NCBI GI NO: 11558256 NR Description: microtubule-associated protein MAP65-1c
  misc_feature (1)..(251): NCBI GI NO: 28200790 NR Description: 65kD microtubule associated protein
  misc_feature (1)..(251): NCBI GI NO: 15240485 NR Description: microtubule associated protein (MAP65/ASE1) family
PGVLSEETIEKMEFEVERLTRLKTSRLKEIVMKRRAELEAICQNAHIEPDVSTAPEQTDSLIDSGLIDPSELLANIESQILKAKEESLSRKDIMDRINRWIAACDEEAWLEEYNQDPKRYSAGRGAHINLKRAEKARILVRKIPSMVDDLINRTFAWENARNKPFLYDGGRLISVLEEYRLSRHQKEEENRRYRDQKKLESILLAEKEAIFGSRPSPRKTSSLSRKANGYRPNGNTNGLKTPTPRRLSLGSATPELLTPRSYSGHNRYFGDVRRLSTSHLNFGDDSLSTFTSISGSEPESPSIG

SEQ ID NO: 40718 - protein, 293 aa, Zea mays subsp. mays
  peptide (1)..(293): Ceres Seq. ID no. 13598892
  misc_feature (1)..(290): Pfam Name: MAP65/ASE1 family Pfam Description: Microtubule associated protein
  misc_feature (1)..(292): NCBI GI NO: 27357984 NR Description: Unknown protein
  misc_feature (1)..(293): NCBI GI NO: 25410943 NR Description: hypothetical protein At2g01910
  misc_feature (1)..(293): NCBI GI NO: 30677965 NR Description: microtubule associated protein (MAP65/ASE1) family
  misc_feature (1)..(290): NCBI GI NO: 21539547 NR Description: unknown protein [Arabidopsis thaliana]
  misc_feature (1)..(290): NCBI GI NO: 8778239 NR Description: F10B6.9 [Arabidopsis thaliana]
  misc_feature (1)..(267): NCBI GI NO: 28301942 NR Description: unknown protein
  misc_feature (1)..(240): NCBI GI NO: 11558252 NR Description: microtubule-associated protein MAP65-1a
  misc_feature (1)..(290): NCBI GI NO: 11558256 NR Description: microtubule-associated protein MAP65-1c
  misc_feature (1)..(240): NCBI GI NO: 28200790 NR Description: 65kD microtubule associated protein
  misc_feature (1)..(240): NCBI GI NO: 15240485 NR Description: microtubule associated protein (MAP65/ASE1) family
MEFEVERLTRLKTSRLKEIVMKRRAELEAICQNAHIEPDVSTAPEQTDSLIDSGLIDPSELLANIESQILKAKEESLSRKDIMDRINRWIAACDEEAWLEEYNQDPKRYSAGRGAHINLKRAEKARILVRKIPSMVDDLINRTFAWENARNKPFLYDGGRLISVLEEYRLSRHQKEEENRRYRDQKKLESILLAEKEAIFGSRPSPRKTSSLSRKANGYRPNGNTNGLKTPTPRRLSLGSATPELLTPRSYSGHNRYFGDVRRLSTSHLNFGDDSLSTFTSISGSEPESPSIG

SEQ ID NO: 40719 - protein, 273 aa, Zea mays subsp. mays
  peptide (1)..(273): Ceres Seq. ID no. 13598893
  misc_feature (1)..(270): Pfam Name: MAP65/ASE1 family Pfam Description: Microtubule associated protein
  misc_feature (1)..(272): NCBI GI NO: 27357984 NR Description: Unknown protein
  misc_feature (1)..(273): NCBI GI NO: 25410943 NR Description: hypothetical protein At2g01910
  misc_feature (1)..(273): NCBI GI NO: 30677965 NR Description: microtubule associated protein (MAP65/ASE1) family
  misc_feature (1)..(270): NCBI GI NO: 21539547 NR Description: unknown protein [Arabidopsis thaliana]
  misc_feature (1)..(270): NCBI GI NO: 8778239 NR Description: F10B6.9 [Arabidopsis thaliana]
  misc_feature (1)..(247): NCBI GI NO: 28301942 NR Description: unknown protein
  misc_feature (1)..(220): NCBI GI NO: 11558252 NR Description: microtubule-associated protein MAP65-1a
  misc_feature (1)..(270): NCBI GI NO: 11558256 NR Description: microtubule-associated protein MAP65-1c
  misc_feature (1)..(220): NCBI GI NO: 28200790 NR Description: 65kD microtubule associated protein
  misc_feature (1)..(220): NCBI GI NO: 15240485 NR Description: microtubule associated protein (MAP65/ASE1) family
MKRRAELEAICQNAHIEPDVSTAPEQTDSLIDSGLIDPSELLANIESQILKAKEESLSRKDIMDRINRWIAACDEEAWLEEYNQDPKRYSAGRGAHINLKRAEKARILVRKIPSMVDDLINRTFAWENARNKPFLYDGGRLISVLEEYRLSRHQKEEENRRYRDQKKLESILLAEKEAIFGSRPSPRKTSSLSRKANGYRPNGNTNGLKTPTPRRLSLGSATPELLTPRSYSGHNRYFGDVRRLSTSHLNFGDDSLSTFTSISGSEPESPSIG

SEQ ID NO: 40720 - DNA, 1101 bp, Zea mays subsp. mays
  misc_feature (1)..(1101): Ceres Seq. ID no. 12375844
gcacgagaccattacctagaacatcctaatcgaaaaacatccctcaaccggtatgtgtttcgtgccaactgctgtaggaagtaggatccagcagtctgcaaggtgtccaaagaaaacaacacggcaggagtgaagatctctgataggatgacttcagtgtctgaatcaacacttgtgctggcttcaggtgcatcaatgttaccgcatcctgcgaaggtacggacaggtggtgaagatgcatattttatagcttgtgatggctggtttggtgtagcagatggagttggtcagtggtcatttgaagggatcaatgccggactttatgccagagaactaatggatggctgcaaaaagatcgtggaagagacccaaggagctccggggatgagaaccgaggaagttcttgccaaggctgcagatgaagcacggtcccctggttcttccactgttttagttgctcactttgatggcaaggtccttcacgcatcaaacatcggagattctggattcctcgtgattaggaacggaggggtccataagaaatcaaacccaatgacttacggtttcaatttcccgttgcagattgagaagggcgacgaccctctaaaacttgtacagaaatacgccatctgtctacaagaaggcgacgtcgttgtaacagcgtcagacggtcttttcgacaacgtctacgaggaagaagtagcaggcatcgtctccaaatcattagaagctgatctgaagcccacggaaatggccgatttactggttgcccgagcgaaggaggtggggcggtgtgggtttggaaggagcccgttctcggactcggctctcgcggctgggtacctgggctactccggcggcaagctggatgatgtaacggttgttgtatcgattgttcggaaatctgaagtttaataaactagaaacgaactctcaaagttgagcgcacttcttatttttttcttcttctttttctcttcttgcaacagctgcactcgctggcaaaatgcccgtgagcatttcgcacgtccctggcctacgcgcccaggcgcattgcgaaacgtgtattgtgtacacttgatacatactataaggttgtat

SEQ ID NO: 40721 - protein, 255 aa, Zea mays subsp. mays
  peptide (1)..(255): Ceres Seq. ID no. 12375845
  misc_feature (23)..(219): Pfam Name: Pfam Description:  Protein phosphatase 2C
  misc_feature (23)..(255): NCBI GI NO: 37533570 NR Description: putative protein phosphatase 2C
  misc_feature (1)..(24): NCBI GI NO: 37533570 NR Description: putative protein phosphatase 2C
  misc_feature (1)..(251): NCBI GI NO: 18418226 NR Description: putative protein; protein id: At4g33500
  misc_feature (1)..(251): NCBI GI NO: 7485658 NR Description: hypothetical protein F17M5
  misc_feature (1)..(253): NCBI GI NO: 15240071 NR Description: putative protein; protein id: At5g66720.1
  misc_feature (1)..(254): NCBI GI NO: 25366932 NR Description: hypothetical protein dl4315c
  misc_feature (1)..(254): NCBI GI NO: 30683717 NR Description: expressed protein [Arabidopsis thaliana]
  misc_feature (10)..(251): NCBI GI NO: 34896100 NR Description: B1189A09.35
  misc_feature (9)..(253): NCBI GI NO: 18402284 NR Description: expressed protein; protein id: At2g30170
  misc_feature (28)..(250): NCBI GI NO: 17555536 NR Description: Protein phosphatase 2C (35.3 kD)
MTSVSESTLVLASGASMLPHPAKVRTGGEDAYFIACDGWFGVADGVGQWSFEGINAGLYARELMDGCKKIVEETQGAPGMRTEEVLAKAADEARSPGSSTVLVAHFDGKVLHASNIGDSGFLVIRNGGVHKKSNPMTYGFNFPLQIEKGDDPLKLVQKYAICLQEGDVVVTASDGLFDNVYEEEVAGIVSKSLEADLKPTEMADLLVARAKEVGRCGFGRSPFSDSALAAGYLGYSGGKLDDVTVVVSIVRKSEV

SEQ ID NO: 40722 - protein, 239 aa, Zea mays subsp. mays
  peptide (1)..(239): Ceres Seq. ID no. 12375846
  misc_feature (7)..(203): Pfam Name: Pfam Description:  Protein phosphatase 2C
  misc_feature (7)..(239): NCBI GI NO: 37533570 NR Description: putative protein phosphatase 2C
  misc_feature (1)..(235): NCBI GI NO: 18418226 NR Description: putative protein; protein id: At4g33500
  misc_feature (1)..(235): NCBI GI NO: 7485658 NR Description: hypothetical protein F17M5
  misc_feature (1)..(237): NCBI GI NO: 15240071 NR Description: putative protein; protein id: At5g66720.1
  misc_feature (1)..(238): NCBI GI NO: 25366932 NR Description: hypothetical protein dl4315c
  misc_feature (1)..(238): NCBI GI NO: 30683717 NR Description: expressed protein [Arabidopsis thaliana]
  misc_feature (1)..(235): NCBI GI NO: 34896100 NR Description: B1189A09.35
  misc_feature (1)..(237): NCBI GI NO: 18402284 NR Description: expressed protein; protein id: At2g30170
  misc_feature (12)..(234): NCBI GI NO: 17555536 NR Description: Protein phosphatase 2C (35.3 kD)
  misc_feature (12)..(234): NCBI GI NO: 39591835 NR Description: Hypothetical protein CBG18323
MLPHPAKVRTGGEDAYFIACDGWFGVADGVGQWSFEGINAGLYARELMDGCKKIVEETQGAPGMRTEEVLAKAADEARSPGSSTVLVAHFDGKVLHASNIGDSGFLVIRNGGVHKKSNPMTYGFNFPLQIEKGDDPLKLVQKYAICLQEGDVVVTASDGLFDNVYEEEVAGIVSKSLEADLKPTEMADLLVARAKEVGRCGFGRSPFSDSALAAGYLGYSGGKLDDVTVVVSIVRKSEV

SEQ ID NO: 40723 - protein, 192 aa, Zea mays subsp. mays
  peptide (1)..(192): Ceres Seq. ID no. 12375847
  misc_feature (1)..(156): Pfam Name: Pfam Description:  Protein phosphatase 2C
  misc_feature (1)..(192): NCBI GI NO: 37533570 NR Description: putative protein phosphatase 2C
  misc_feature (1)..(188): NCBI GI NO: 18418226 NR Description: putative protein; protein id: At4g33500
  misc_feature (1)..(188): NCBI GI NO: 7485658 NR Description: hypothetical protein F17M5
  misc_feature (1)..(190): NCBI GI NO: 15240071 NR Description: putative protein; protein id: At5g66720.1
  misc_feature (1)..(191): NCBI GI NO: 25366932 NR Description: hypothetical protein dl4315c
  misc_feature (1)..(191): NCBI GI NO: 30683717 NR Description: expressed protein [Arabidopsis thaliana]
  misc_feature (1)..(188): NCBI GI NO: 34896100 NR Description: B1189A09.35
  misc_feature (1)..(190): NCBI GI NO: 18402284 NR Description: expressed protein; protein id: At2g30170
  misc_feature (1)..(187): NCBI GI NO: 17555536 NR Description: Protein phosphatase 2C (35.3 kD)
  misc_feature (1)..(187): NCBI GI NO: 39591835 NR Description: Hypothetical protein CBG18323
MDGCKKIVEETQGAPGMRTEEVLAKAADEARSPGSSTVLVAHFDGKVLHASNIGDSGFLVIRNGGVHKKSNPMTYGFNFPLQIEKGDDPLKLVQKYAICLQEGDVVVTASDGLFDNVYEEEVAGIVSKSLEADLKPTEMADLLVARAKEVGRCGFGRSPFSDSALAAGYLGYSGGKLDDVTVVVSIVRKSEV

SEQ ID NO: 40724 - DNA, 1298 bp, Zea mays subsp. mays
  misc_feature (1)..(1298): Ceres Seq. ID no. 12384330
gcacgagaccattacctagaacatcctaatcaaaaatctcattctacagggaagacgaaaacacactgcagctggagcagcactgatatcgaccatggctccagcagcacctgcatctgcgacaaaatgcagcagcggcatcgtcatctctgtgctcttgcccctcgcgctgctaatggcggccgccggcacctcgtcggcgcagctgtccacgggcttctactcttcctcgtgtcccggcgtgtacgacgccgtcaagtcggtggtgcagtccgccgtcgccagcgagcagcgcatgggcgcctccatcgtccgcctcttcttccacgactgcttcgtccagggctgcgacgcgtcgctgctgctggacgacacgcctagcttccagggagagaagatggccaaccctaacaacggctccgtgaggggattcgaggtcatcgacgccgtcaagtccgccgtcgagaaggtgtgccccggcgtcgtctcctgcgccgacatcctcgccatcgccgccagggacagcgtcgtcatcctgggtggtccgacctgggacgtgaaggtcgggcggcgggactccacgacggcgagcttcagcggcgccaacaacaacatcccgccgccgacgtcgggcctcgccaacctcacgtcgctcttcgccgcccaaggcctctcccaaaaggacatggtcgcgctctccggagctcacaccatcggccaagcacgctgcaccaacttcagagcccacgtgtacaacgacaccaacatcgacggcagcttcgcaagaacaaggcagtcaggctgccctagatcgtcctcaggctcatcaggcgacaacaacctggcgccattggaccttcaaaccccgaccgtcttcgacaacaactactacaagaaccttgtctgcaagaaggggctcctgcactccgaccaggagctcttcaatggcggagccaccgacgcgctggtccagtcctacgccagtggccagagcgagttcttctcggactttgtgacgggcatggtgaagatgggtgacatcactccgttaactggctcccggtgggcagattaggaagaactgcagaagggtcaattaattaaccaattaataacaaggtcggccggcggtgcacactatctaacagggggcttgctttcagtcgttaattaagtttgtaatctttctacttcgtccacaaaattgtgagatcatcatgcatgttgtaccagccaaccaaggtgttgagacgatgttgttcgtcgtttgaataagtaatccatcatttgttcttctt

SEQ ID NO: 40725 - protein, 326 aa, Zea mays subsp. mays
  peptide (1)..(326): Ceres Seq. ID no. 12384331
  misc_feature (54)..(297): Pfam Name: Pfam Description:  Peroxidase
  misc_feature (21)..(321): NCBI GI NO: 28400798 NR Description: peroxidase [Asparagus officinalis]
  misc_feature (23)..(322): NCBI GI NO: 28400794 NR Description: peroxidase [Asparagus officinalis]
  misc_feature (32)..(323): NCBI GI NO: 28400796 NR Description: peroxidase [Asparagus officinalis]
  misc_feature (14)..(322): NCBI GI NO: 5381253 NR Description: peroxidase [Nicotiana tabacum]
  misc_feature (4)..(322): NCBI GI NO: 39777536 NR Description: peroxidase precursor [Quercus suber]
  misc_feature (4)..(322): NCBI GI NO: 39777532 NR Description: peroxidase precursor [Quercus suber]
  misc_feature (20)..(322): NCBI GI NO: 19698446 NR Description: gaiacol peroxidase [Gossypium hirsutum]
  misc_feature (13)..(322): NCBI GI NO: 15239075 NR Description: peroxidase, putative; protein id: At5g05340
  misc_feature (13)..(322): NCBI GI NO: 7433048 NR Description: probable peroxidase (EC 1
  misc_feature (37)..(322): NCBI GI NO: 464365 NR Description: Peroxidase P7 (TP7)
MAPAAPASATKCSSGIVISVLLPLALLMAAAGTSSAQLSTGFYSSSCPGVYDAVKSVVQSAVASEQRMGASIVRLFFHDCFVQGCDASLLLDDTPSFQGEKMANPNNGSVRGFEVIDAVKSAVEKVCPGVVSCADILAIAARDSVVILGGPTWDVKVGRRDSTTASFSGANNNIPPPTSGLANLTSLFAAQGLSQKDMVALSGAHTIGQARCTNFRAHVYNDTNIDGSFARTRQSGCPRSSSGSSGDNNLAPLDLQTPTVFDNNYYKNLVCKKGLLHSDQELFNGGATDALVQSYASGQSEFFSDFVTGMVKMGDITPLTGSRWAD

SEQ ID NO: 40726 - protein, 299 aa, Zea mays subsp. mays
  peptide (1)..(299): Ceres Seq. ID no. 12384332
  misc_feature (27)..(270): Pfam Name: Pfam Description:  Peroxidase
  misc_feature (1)..(294): NCBI GI NO: 28400798 NR Description: peroxidase [Asparagus officinalis]
  misc_feature (1)..(295): NCBI GI NO: 28400794 NR Description: peroxidase [Asparagus officinalis]
  misc_feature (5)..(296): NCBI GI NO: 28400796 NR Description: peroxidase [Asparagus officinalis]
  misc_feature (1)..(295): NCBI GI NO: 5381253 NR Description: peroxidase [Nicotiana tabacum]
  misc_feature (1)..(295): NCBI GI NO: 39777536 NR Description: peroxidase precursor [Quercus suber]
  misc_feature (1)..(295): NCBI GI NO: 39777532 NR Description: peroxidase precursor [Quercus suber]
  misc_feature (1)..(295): NCBI GI NO: 19698446 NR Description: gaiacol peroxidase [Gossypium hirsutum]
  misc_feature (1)..(295): NCBI GI NO: 15239075 NR Description: peroxidase, putative; protein id: At5g05340
  misc_feature (1)..(295): NCBI GI NO: 7433048 NR Description: probable peroxidase (EC 1
  misc_feature (10)..(295): NCBI GI NO: 464365 NR Description: Peroxidase P7 (TP7)
MAAAGTSSAQLSTGFYSSSCPGVYDAVKSVVQSAVASEQRMGASIVRLFFHDCFVQGCDASLLLDDTPSFQGEKMANPNNGSVRGFEVIDAVKSAVEKVCPGVVSCADILAIAARDSVVILGGPTWDVKVGRRDSTTASFSGANNNIPPPTSGLANLTSLFAAQGLSQKDMVALSGAHTIGQARCTNFRAHVYNDTNIDGSFARTRQSGCPRSSSGSSGDNNLAPLDLQTPTVFDNNYYKNLVCKKGLLHSDQELFNGGATDALVQSYASGQSEFFSDFVTGMVKMGDITPLTGSRWAD

SEQ ID NO: 40727 - protein, 259 aa, Zea mays subsp. mays
  peptide (1)..(259): Ceres Seq. ID no. 12384333
  misc_feature (1)..(230): Pfam Name: Pfam Description:  Peroxidase
  misc_feature (1)..(254): NCBI GI NO: 28400798 NR Description: peroxidase [Asparagus officinalis]
  misc_feature (1)..(255): NCBI GI NO: 28400794 NR Description: peroxidase [Asparagus officinalis]
  misc_feature (1)..(256): NCBI GI NO: 28400796 NR Description: peroxidase [Asparagus officinalis]
  misc_feature (1)..(255): NCBI GI NO: 5381253 NR Description: peroxidase [Nicotiana tabacum]
  misc_feature (1)..(255): NCBI GI NO: 39777536 NR Description: peroxidase precursor [Quercus suber]
  misc_feature (1)..(255): NCBI GI NO: 39777532 NR Description: peroxidase precursor [Quercus suber]
  misc_feature (1)..(255): NCBI GI NO: 19698446 NR Description: gaiacol peroxidase [Gossypium hirsutum]
  misc_feature (1)..(255): NCBI GI NO: 15239075 NR Description: peroxidase, putative; protein id: At5g05340
  misc_feature (1)..(255): NCBI GI NO: 7433048 NR Description: probable peroxidase (EC 1
  misc_feature (1)..(255): NCBI GI NO: 464365 NR Description: Peroxidase P7 (TP7)
MGASIVRLFFHDCFVQGCDASLLLDDTPSFQGEKMANPNNGSVRGFEVIDAVKSAVEKVCPGVVSCADILAIAARDSVVILGGPTWDVKVGRRDSTTASFSGANNNIPPPTSGLANLTSLFAAQGLSQKDMVALSGAHTIGQARCTNFRAHVYNDTNIDGSFARTRQSGCPRSSSGSSGDNNLAPLDLQTPTVFDNNYYKNLVCKKGLLHSDQELFNGGATDALVQSYASGQSEFFSDFVTGMVKMGDITPLTGSRWAD

SEQ ID NO: 40728 - DNA, 2440 bp, Zea mays subsp. mays
  misc_feature (1)..(2440): Ceres Seq. ID no. 12436117
gcacgagaccattacctagaacatcctaatcgaaaaagctactctgtagattgacagagagacaagagcgctcttgctaccaatctcctcctcgtcgccgccgcggccgctctcgctcccacgatccggcgctgccacgagcttccagatccgccgcccgggcaatgctgtagctgcccgcgccgagatgggcggcgtcggcgccggctctctcgccctgctgcggctgctcctcctcctgctcctccgctccgaggcctccgctctccacggttgttctagttatatctgcaccgagccactgactgcaacaccaattggttccccttgtggctgtgtcgagcctattagtgttatcgttgatctggacttagctccttatctactgttcatgagcatagctgagttagaagttgaggttgcagctgggacatttcttaaacaaagccaggtgaagatcatggctgcagttgcaagtatccaggatgaccagaagacacgggtgaccatttatttggtgccgctaagagaacagttcgatacttatacggcatccctaatatctgataggttcatggagaaaaaggttcagataaattcatctatatttggagattataaagttatcaatatcagctatcatggattgcaatccccgccatcatctctgcctggaggatcggatccttcaggaactgaagaatatcctataactgcagaggtgcctgatcagaagaaaaagcacaataaatcagatattttggtcatcgtggtagtgttagggtcttctcttggacttctgatgacatgtgctgttgtgctgatcttactagtaagatggaagaaacttggacggcttcatgaggctatgacccctgcaactatcccagcagttaatagaagatatggcaccaggccaactttgtcaaccagcatggtgagctctgcgtcagcatcagtgttttcaacagtggctacttgcacaacatctgtaaagacattttcactagcccaacttcagaaggccacagatggttttgattcaagaagagttttgggtcaagggggctttgggcgtgtctaccatgggacgatagaggatggaaacgaaattgctgttaaattgcttacaagggaggacaggagtggtgaccgtgagtttattgcagaagtggaaatgctcagtcgattgcaccaccggaatcttgtcaaattgattggtatttgcattgagcggagtaaaaggtgtcttgtgtatgagctcatacgaaacggaagtgtggaatcccatcttcatggcgctgacaaggctaagggtaagctgaactgggatgttaggatgaaaattgctcttggcgctgctcgaggcttagcatatctgcatgaagattcaaaccctcatgtcatacaccgtgacttcaaggccagtaatatattattagaggaagatttcactcctaaagtgaccgattttggtttagcaagggaagcatccaatgcgactcaacctatatctaccagggtaatgggtactttcggttatgttgctccagaatatgcaatgacgggccatcttcttgttaaaagcgatgtttacagttatggggttgtcttgctggaacttatatcaggaaggaagcctgtaaacatctctgagtccaaggatcctgagaaccttgtaacttgggcccgtcctctgctaagccataaggagggcctggagaagttaattgatccgtctctggatggaaattttaacttcgacaatgtagcgaaggtggcatccatcgcttccatgtgtgtgcacacagatccatcgcagaggccgtttatgggtgaagttgtccaggcactgaagctgatctacaatgatccagatgaggcttgcgacgattcctacagtccaaggaattcatctgatcaagacggtgactacgaaggagacctggtctttgagagtggaagctggggctttggggcctctgggtgtctagactaccggaattccttaccgtttgtcactatggactacagttctggccgaatagaagggccgcacgaccctcgcgcggcattgtcagcgggatcccatgcccagtcaccagtgctgctgaatagatcaggccccttgcggatgaagaagaagctggcctccttctaccgctctagaggcagcattagtgagcatgggcacctgccgcgccattgatcagtcagtgaactagtgttaggctgttagcttcggttgactctgggattgaggctggcgggggttgtcactacctgattcgtgcctcatgttagtgtacagttcgtggtgacccttcacccttgggtatgggtgttttttttctctctttgccttctgcttcttccccggaagcaatgaggatggggttggcaggtgctctctaattttcgcaaattgcggttcatttct

SEQ ID NO: 40729 - protein, 673 aa, Zea mays subsp. mays
  peptide (1)..(673): Ceres Seq. ID no. 12436118
  misc_feature (284)..(485): Pfam Name: Pfam Description:  Protein kinase domain
  misc_feature (20)..(668): NCBI GI NO: 30680947 NR Description: protein kinase family [Arabidopsis thaliana]
  misc_feature (30)..(668): NCBI GI NO: 20453162 NR Description: At5g56885 [Arabidopsis thaliana]
  misc_feature (30)..(668): NCBI GI NO: 22327898 NR Description: Expressed protein; protein id: At5g56890
  misc_feature (247)..(668): NCBI GI NO: 25287641 NR Description: probable protein kinase
  misc_feature (37)..(584): NCBI GI NO: 34903544 NR Description: putative protein kinase APK1AArabidopsis thaliana
  misc_feature (73)..(565): NCBI GI NO: 34910468 NR Description: putative protein kinase
  misc_feature (106)..(592): NCBI GI NO: 34902828 NR Description: unnamed protein product
  misc_feature (117)..(606): NCBI GI NO: 7488203 NR Description: probable serine/threonine-specific protein kinase
  misc_feature (117)..(606): NCBI GI NO: 30679031 NR Description: protein kinase family [Arabidopsis thaliana]
  misc_feature (155)..(557): NCBI GI NO: 15221470 NR Description: protein kinase, putative; protein id: At1g68690
MGGVGAGSLALLRLLLLLLLRSEASALHGCSSYICTEPLTATPIGSPCGCVEPISVIVDLDLAPYLLFMSIAELEVEVAAGTFLKQSQVKIMAAVASIQDDQKTRVTIYLVPLREQFDTYTASLISDRFMEKKVQINSSIFGDYKVINISYHGLQSPPSSLPGGSDPSGTEEYPITAEVPDQKKKHNKSDILVIVVVLGSSLGLLMTCAVVLILLVRWKKLGRLHEAMTPATIPAVNRRYGTRPTLSTSMVSSASASVFSTVATCTTSVKTFSLAQLQKATDGFDSRRVLGQGGFGRVYHGTIEDGNEIAVKLLTREDRSGDREFIAEVEMLSRLHHRNLVKLIGICIERSKRCLVYELIRNGSVESHLHGADKAKGKLNWDVRMKIALGAARGLAYLHEDSNPHVIHRDFKASNILLEEDFTPKVTDFGLAREASNATQPISTRVMGTFGYVAPEYAMTGHLLVKSDVYSYGVVLLELISGRKPVNISESKDPENLVTWARPLLSHKEGLEKLIDPSLDGNFNFDNVAKVASIASMCVHTDPSQRPFMGEVVQALKLIYNDPDEACDDSYSPRNSSDQDGDYEGDLVFESGSWGFGASGCLDYRNSLPFVTMDYSSGRIEGPHDPRAALSAGSHAQSPVLLNRSGPLRMKKKLASFYRSRGSISEHGHLPRH

SEQ ID NO: 40730 - protein, 605 aa, Zea mays subsp. mays
  peptide (1)..(605): Ceres Seq. ID no. 12436119
  misc_feature (216)..(417): Pfam Name: Pfam Description:  Protein kinase domain
  misc_feature (1)..(600): NCBI GI NO: 30680947 NR Description: protein kinase family [Arabidopsis thaliana]
  misc_feature (1)..(600): NCBI GI NO: 20453162 NR Description: At5g56885 [Arabidopsis thaliana]
  misc_feature (1)..(600): NCBI GI NO: 22327898 NR Description: Expressed protein; protein id: At5g56890
  misc_feature (179)..(600): NCBI GI NO: 25287641 NR Description: probable protein kinase
  misc_feature (1)..(516): NCBI GI NO: 34903544 NR Description: putative protein kinase APK1AArabidopsis thaliana
  misc_feature (5)..(497): NCBI GI NO: 34910468 NR Description: putative protein kinase
  misc_feature (38)..(524): NCBI GI NO: 34902828 NR Description: unnamed protein product
  misc_feature (49)..(538): NCBI GI NO: 7488203 NR Description: probable serine/threonine-specific protein kinase
  misc_feature (49)..(538): NCBI GI NO: 30679031 NR Description: protein kinase family [Arabidopsis thaliana]
  misc_feature (87)..(489): NCBI GI NO: 15221470 NR Description: protein kinase, putative; protein id: At1g68690
MSIAELEVEVAAGTFLKQSQVKIMAAVASIQDDQKTRVTIYLVPLREQFDTYTASLISDRFMEKKVQINSSIFGDYKVINISYHGLQSPPSSLPGGSDPSGTEEYPITAEVPDQKKKHNKSDILVIVVVLGSSLGLLMTCAVVLILLVRWKKLGRLHEAMTPATIPAVNRRYGTRPTLSTSMVSSASASVFSTVATCTTSVKTFSLAQLQKATDGFDSRRVLGQGGFGRVYHGTIEDGNEIAVKLLTREDRSGDREFIAEVEMLSRLHHRNLVKLIGICIERSKRCLVYELIRNGSVESHLHGADKAKGKLNWDVRMKIALGAARGLAYLHEDSNPHVIHRDFKASNILLEEDFTPKVTDFGLAREASNATQPISTRVMGTFGYVAPEYAMTGHLLVKSDVYSYGVVLLELISGRKPVNISESKDPENLVTWARPLLSHKEGLEKLIDPSLDGNFNFDNVAKVASIASMCVHTDPSQRPFMGEVVQALKLIYNDPDEACDDSYSPRNSSDQDGDYEGDLVFESGSWGFGASGCLDYRNSLPFVTMDYSSGRIEGPHDPRAALSAGSHAQSPVLLNRSGPLRMKKKLASFYRSRGSISEHGHLPRH

SEQ ID NO: 40731 - protein, 582 aa, Zea mays subsp. mays
  peptide (1)..(582): Ceres Seq. ID no. 12436120
  misc_feature (193)..(394): Pfam Name: Pfam Description:  Protein kinase domain
  misc_feature (1)..(577): NCBI GI NO: 30680947 NR Description: protein kinase family [Arabidopsis thaliana]
  misc_feature (1)..(577): NCBI GI NO: 20453162 NR Description: At5g56885 [Arabidopsis thaliana]
  misc_feature (1)..(577): NCBI GI NO: 22327898 NR Description: Expressed protein; protein id: At5g56890
  misc_feature (156)..(577): NCBI GI NO: 25287641 NR Description: probable protein kinase
  misc_feature (1)..(493): NCBI GI NO: 34903544 NR Description: putative protein kinase APK1AArabidopsis thaliana
  misc_feature (1)..(474): NCBI GI NO: 34910468 NR Description: putative protein kinase
  misc_feature (15)..(501): NCBI GI NO: 34902828 NR Description: unnamed protein product
  misc_feature (26)..(515): NCBI GI NO: 7488203 NR Description: probable serine/threonine-specific protein kinase
  misc_feature (26)..(515): NCBI GI NO: 30679031 NR Description: protein kinase family [Arabidopsis thaliana]
  misc_feature (64)..(466): NCBI GI NO: 15221470 NR Description: protein kinase, putative; protein id: At1g68690
MAAVASIQDDQKTRVTIYLVPLREQFDTYTASLISDRFMEKKVQINSSIFGDYKVINISYHGLQSPPSSLPGGSDPSGTEEYPITAEVPDQKKKHNKSDILVIVVVLGSSLGLLMTCAVVLILLVRWKKLGRLHEAMTPATIPAVNRRYGTRPTLSTSMVSSASASVFSTVATCTTSVKTFSLAQLQKATDGFDSRRVLGQGGFGRVYHGTIEDGNEIAVKLLTREDRSGDREFIAEVEMLSRLHHRNLVKLIGICIERSKRCLVYELIRNGSVESHLHGADKAKGKLNWDVRMKIALGAARGLAYLHEDSNPHVIHRDFKASNILLEEDFTPKVTDFGLAREASNATQPISTRVMGTFGYVAPEYAMTGHLLVKSDVYSYGVVLLELISGRKPVNISESKDPENLVTWARPLLSHKEGLEKLIDPSLDGNFNFDNVAKVASIASMCVHTDPSQRPFMGEVVQALKLIYNDPDEACDDSYSPRNSSDQDGDYEGDLVFESGSWGFGASGCLDYRNSLPFVTMDYSSGRIEGPHDPRAALSAGSHAQSPVLLNRSGPLRMKKKLASFYRSRGSISEHGHLPRH

SEQ ID NO: 40732 - DNA, 1796 bp, Zea mays subsp. mays
  misc_feature (1)..(1796): Ceres Seq. ID no. 13586203
ggctggcggttgctctcctcctctcccctgccctcgcaaacgcacgcaccacagcatcgtccttcgttccattcccatccataccccctcgatcggccgggatgctgggtgtggggatggccgcggcggtgctgctcggggccgtggcgttgctgctcgcggacgccgctgcgaggagagcgcactggtggtacagggaggcggctgaggcggtgctggtcggcgccgtggctttggtggtggtggacgccgcggcgcggagggcgcacgggtggtacagggaagcggcgctgggcgcggcgcggcgggcgcggctgccgccgggggagatggggtggcccttggtcggcggcatgtgggccttcctccgcgccttcaagtccggcaagcccgacgccttcatcgcctccttcgtccggcggttcggtcgcacgggcgtgtaccgaagcttcatgttcagcagcccgactgtgctggtgacgacggcggaggggtgcaagcaggtgctgatggacgacgacgcgttcgtgacggggtggcccaaggcgacggttgcgctggtcgggccgcggtcgttcgtggcgatgccgtacgacgagcaccggcgcatccgcaagctgactgccgcgcccatcaacggcttcgacgcgctgacggggtacctgcccttcatcgaccgcaccgtcacgtcgtcgctgcgcgcgtgggcggaccacggcggcagcgtcgagttcctgacggagctgcggcgcatgacgttcaagatcatcgtgcagatcttcctgggcggcgcggaccaggccaccacgcgcgcgctggagcgcagctacacggagctcaactacggcatgcgcgccatggccatcaacctgcccggcttcgcgtaccgcggggcgctgcgcgcgcgccgccgcctcgtggccgtgctgcagggcgtgctggacgagcgccgcgccgccagggccaagggggtctcgggcggaggagtggacatgatggaccggctgatcgaggcccaggacgagcgcgggcggcacctggacgacgacgagatcatcgacgtgctcgtcatgtacctcaacgccggccacgagtcgtccggccacatcaccatgtgggccaccgtgttcctgcaggagaacccggacatgttcgcgagagcaaaggcggagcaggaggcgatcatgaggagcatcccgtcgtcgcagcgggggctgacgctcagggacttcaggaagatggagtacctgtcgcaggtgatcgacgagacgctgcggctcgtcaacatctccttcgtctccttccgtcaggccaccagagacgtcttcgtgaacggatacctcatccccaaggggtggaaggttcagctctggtaccggagcgtgcacatggacccacaggtgtaccctgaccccaccaagttcgacccgtcgagatgggagggccactcgccgagagccggcacgttcctggcgttcgggctgggcgccaggctctgccccggcaacgacctcgccaagctggagatttccgtcttcctccaccacttcctcctcggctacaagctggcgaggacgaaccctaggtgccgggtgaggtacctcccgcacccgaggccggtggacaactgcttggccaagatcaccagagtcggtagctagctgctagattgtgatggaagtacgaatgaaaaaaaagcccagcagaaactctagcggctgggccggctggaaattatgggccgggccattgtggttgccccccctgtctgtgcaaaaataaaacaagcagaaagg

SEQ ID NO: 40733 - protein, 552 aa, Zea mays subsp. mays
  peptide (1)..(552): Ceres Seq. ID no. 13586204
  misc_feature (34)..(552): NCBI GI NO: 5915847 NR Description: Cytochrome P450 88A1 (Dwarf3 protein)
  misc_feature (62)..(552): NCBI GI NO: 13022042 NR Description: ent-kaurenoic acid oxidase [Hordeum vulgare]
  misc_feature (97)..(490): NCBI GI NO: 17980376 NR Description: DWARF3 [Zea mays subsp. mays]
  misc_feature (97)..(490): NCBI GI NO: 17980355 NR Description: DWARF3 [Zea mays subsp. mays]
  misc_feature (97)..(490): NCBI GI NO: 17980331 NR Description: DWARF3 [Zea mays subsp. mays]
  misc_feature (97)..(490): NCBI GI NO: 17980396 NR Description: DWARF3 [Zea mays subsp. mays]
  misc_feature (97)..(490): NCBI GI NO: 17980343 NR Description: DWARF3 [Zea mays subsp. mays]
  misc_feature (97)..(490): NCBI GI NO: 17980335 NR Description: DWARF3 [Zea mays subsp. mays]
  misc_feature (97)..(490): NCBI GI NO: 17980337 NR Description: DWARF3 [Zea mays subsp. mays]
  misc_feature (67)..(521): NCBI GI NO: 34903584 NR Description: cytochrome P450-like protein
LAVALLLSPALANARTTASSFVPFPSIPPRSAGMLGVGMAAAVLLGAVALLLADAAARRAHWWYREAAEAVLVGAVALVVVDAAARRAHGWYREAALGAARRARLPPGEMGWPLVGGMWAFLRAFKSGKPDAFIASFVRRFGRTGVYRSFMFSSPTVLVTTAEGCKQVLMDDDAFVTGWPKATVALVGPRSFVAMPYDEHRRIRKLTAAPINGFDALTGYLPFIDRTVTSSLRAWADHGGSVEFLTELRRMTFKIIVQIFLGGADQATTRALERSYTELNYGMRAMAINLPGFAYRGALRARRRLVAVLQGVLDERRAARAKGVSGGGVDMMDRLIEAQDERGRHLDDDEIIDVLVMYLNAGHESSGHITMWATVFLQENPDMFARAKAEQEAIMRSIPSSQRGLTLRDFRKMEYLSQVIDETLRLVNISFVSFRQATRDVFVNGYLIPKGWKVQLWYRSVHMDPQVYPDPTKFDPSRWEGHSPRAGTFLAFGLGARLCPGNDLAKLEISVFLHHFLLGYKLARTNPRCRVRYLPHPRPVDNCLAKITRVGS

SEQ ID NO: 40734 - protein, 519 aa, Zea mays subsp. mays
  peptide (1)..(519): Ceres Seq. ID no. 13586205
  misc_feature (1)..(519): NCBI GI NO: 5915847 NR Description: Cytochrome P450 88A1 (Dwarf3 protein)
  misc_feature (29)..(519): NCBI GI NO: 13022042 NR Description: ent-kaurenoic acid oxidase [Hordeum vulgare]
  misc_feature (64)..(457): NCBI GI NO: 17980376 NR Description: DWARF3 [Zea mays subsp. mays]
  misc_feature (64)..(457): NCBI GI NO: 17980355 NR Description: DWARF3 [Zea mays subsp. mays]
  misc_feature (64)..(457): NCBI GI NO: 17980331 NR Description: DWARF3 [Zea mays subsp. mays]
  misc_feature (64)..(457): NCBI GI NO: 17980396 NR Description: DWARF3 [Zea mays subsp. mays]
  misc_feature (64)..(457): NCBI GI NO: 17980343 NR Description: DWARF3 [Zea mays subsp. mays]
  misc_feature (64)..(457): NCBI GI NO: 17980335 NR Description: DWARF3 [Zea mays subsp. mays]
  misc_feature (64)..(457): NCBI GI NO: 17980337 NR Description: DWARF3 [Zea mays subsp. mays]
  misc_feature (34)..(488): NCBI GI NO: 34903584 NR Description: cytochrome P450-like protein
MLGVGMAAAVLLGAVALLLADAAARRAHWWYREAAEAVLVGAVALVVVDAAARRAHGWYREAALGAARRARLPPGEMGWPLVGGMWAFLRAFKSGKPDAFIASFVRRFGRTGVYRSFMFSSPTVLVTTAEGCKQVLMDDDAFVTGWPKATVALVGPRSFVAMPYDEHRRIRKLTAAPINGFDALTGYLPFIDRTVTSSLRAWADHGGSVEFLTELRRMTFKIIVQIFLGGADQATTRALERSYTELNYGMRAMAINLPGFAYRGALRARRRLVAVLQGVLDERRAARAKGVSGGGVDMMDRLIEAQDERGRHLDDDEIIDVLVMYLNAGHESSGHITMWATVFLQENPDMFARAKAEQEAIMRSIPSSQRGLTLRDFRKMEYLSQVIDETLRLVNISFVSFRQATRDVFVNGYLIPKGWKVQLWYRSVHMDPQVYPDPTKFDPSRWEGHSPRAGTFLAFGLGARLCPGNDLAKLEISVFLHHFLLGYKLARTNPRCRVRYLPHPRPVDNCLAKITRVGS

SEQ ID NO: 40735 - protein, 514 aa, Zea mays subsp. mays
  peptide (1)..(514): Ceres Seq. ID no. 13586206
  misc_feature (1)..(514): NCBI GI NO: 5915847 NR Description: Cytochrome P450 88A1 (Dwarf3 protein)
  misc_feature (24)..(514): NCBI GI NO: 13022042 NR Description: ent-kaurenoic acid oxidase [Hordeum vulgare]
  misc_feature (59)..(452): NCBI GI NO: 17980376 NR Description: DWARF3 [Zea mays subsp. mays]
  misc_feature (59)..(452): NCBI GI NO: 17980355 NR Description: DWARF3 [Zea mays subsp. mays]
  misc_feature (59)..(452): NCBI GI NO: 17980331 NR Description: DWARF3 [Zea mays subsp. mays]
  misc_feature (59)..(452): NCBI GI NO: 17980396 NR Description: DWARF3 [Zea mays subsp. mays]
  misc_feature (59)..(452): NCBI GI NO: 17980343 NR Description: DWARF3 [Zea mays subsp. mays]
  misc_feature (59)..(452): NCBI GI NO: 17980335 NR Description: DWARF3 [Zea mays subsp. mays]
  misc_feature (59)..(452): NCBI GI NO: 17980337 NR Description: DWARF3 [Zea mays subsp. mays]
  misc_feature (29)..(483): NCBI GI NO: 34903584 NR Description: cytochrome P450-like protein
MAAAVLLGAVALLLADAAARRAHWWYREAAEAVLVGAVALVVVDAAARRAHGWYREAALGAARRARLPPGEMGWPLVGGMWAFLRAFKSGKPDAFIASFVRRFGRTGVYRSFMFSSPTVLVTTAEGCKQVLMDDDAFVTGWPKATVALVGPRSFVAMPYDEHRRIRKLTAAPINGFDALTGYLPFIDRTVTSSLRAWADHGGSVEFLTELRRMTFKIIVQIFLGGADQATTRALERSYTELNYGMRAMAINLPGFAYRGALRARRRLVAVLQGVLDERRAARAKGVSGGGVDMMDRLIEAQDERGRHLDDDEIIDVLVMYLNAGHESSGHITMWATVFLQENPDMFARAKAEQEAIMRSIPSSQRGLTLRDFRKMEYLSQVIDETLRLVNISFVSFRQATRDVFVNGYLIPKGWKVQLWYRSVHMDPQVYPDPTKFDPSRWEGHSPRAGTFLAFGLGARLCPGNDLAKLEISVFLHHFLLGYKLARTNPRCRVRYLPHPRPVDNCLAKITRVGS

SEQ ID NO: 40736 - DNA, 1980 bp, Zea mays subsp. mays; identical to SEQ ID NO: 29682
  misc_feature (1)..(1980): Ceres Seq. ID no. 13567373

SEQ ID NO: 40737 - protein, 474 aa, Zea mays subsp. mays; identical to SEQ ID NO: 29683
  peptide (1)..(474): Ceres Seq. ID no. 13567374
  misc_feature (43)..(461): Pfam Name: Pfam Description:  Serine carboxypeptidase
  misc_feature (39)..(474): NCBI GI NO: 2493494 NR Description: Serine carboxypeptidase II-2 precursor (CP-MII.2)
  misc_feature (4)..(473): NCBI GI NO: 18417667 NR Description: serine carboxypeptidase -related
  misc_feature (5)..(474): NCBI GI NO: 34895992 NR Description: putative carboxypeptidase D
  misc_feature (1)..(467): NCBI GI NO: 34908012 NR Description: putative carboxypeptidase D
  misc_feature (12)..(466): NCBI GI NO: 15231911 NR Description: serine carboxypeptidase -related
  misc_feature (1)..(465): NCBI GI NO: 7428204 NR Description: carboxypeptidase D (EC 3
  misc_feature (1)..(465): NCBI GI NO: 20455471 NR Description: Serine carboxypeptidase II precursor
  misc_feature (31)..(466): NCBI GI NO: 15227493 NR Description: serine carboxypeptidase -related
  misc_feature (13)..(465): NCBI GI NO: 13877871 NR Description: putative serine carboxypeptidase II
  misc_feature (13)..(465): NCBI GI NO: 15234795 NR Description: serine carboxypeptidase -related

SEQ ID NO: 40738 - protein, 257 aa, Zea mays subsp. mays; identical to SEQ ID NO: 29684
  peptide (1)..(257): Ceres Seq. ID no. 13567375
  misc_feature (1)..(244): Pfam Name: Pfam Description:  Serine carboxypeptidase
  misc_feature (1)..(257): NCBI GI NO: 2493494 NR Description: Serine carboxypeptidase II-2 precursor (CP-MII.2)
  misc_feature (1)..(256): NCBI GI NO: 18417667 NR Description: serine carboxypeptidase -related
  misc_feature (1)..(257): NCBI GI NO: 34895992 NR Description: putative carboxypeptidase D
  misc_feature (1)..(250): NCBI GI NO: 34908012 NR Description: putative carboxypeptidase D
  misc_feature (1)..(249): NCBI GI NO: 15231911 NR Description: serine carboxypeptidase -related
  misc_feature (1)..(248): NCBI GI NO: 7428204 NR Description: carboxypeptidase D (EC 3
  misc_feature (1)..(248): NCBI GI NO: 20455471 NR Description: Serine carboxypeptidase II precursor
  misc_feature (1)..(249): NCBI GI NO: 15227493 NR Description: serine carboxypeptidase -related
  misc_feature (1)..(248): NCBI GI NO: 13877871 NR Description: putative serine carboxypeptidase II
  misc_feature (1)..(248): NCBI GI NO: 15234795 NR Description: serine carboxypeptidase -related

SEQ ID NO: 40739 - protein, 238 aa, Zea mays subsp. mays; identical to SEQ ID NO: 29685
  peptide (1)..(238): Ceres Seq. ID no. 13567376
  misc_feature (1)..(225): Pfam Name: Pfam Description:  Serine carboxypeptidase
  misc_feature (1)..(238): NCBI GI NO: 2493494 NR Description: Serine carboxypeptidase II-2 precursor (CP-MII.2)
  misc_feature (1)..(237): NCBI GI NO: 18417667 NR Description: serine carboxypeptidase -related
  misc_feature (1)..(238): NCBI GI NO: 34895992 NR Description: putative carboxypeptidase D
  misc_feature (1)..(231): NCBI GI NO: 34908012 NR Description: putative carboxypeptidase D
  misc_feature (1)..(230): NCBI GI NO: 15231911 NR Description: serine carboxypeptidase -related
  misc_feature (1)..(229): NCBI GI NO: 7428204 NR Description: carboxypeptidase D (EC 3
  misc_feature (1)..(229): NCBI GI NO: 20455471 NR Description: Serine carboxypeptidase II precursor
  misc_feature (1)..(230): NCBI GI NO: 15227493 NR Description: serine carboxypeptidase -related
  misc_feature (1)..(229): NCBI GI NO: 13877871 NR Description: putative serine carboxypeptidase II
  misc_feature (1)..(229): NCBI GI NO: 15234795 NR Description: serine carboxypeptidase -related

SEQ ID NO: 40740 - DNA, 1853 bp, Zea mays subsp. mays
  misc_feature (1)..(1853): Ceres Seq. ID no. 12419992
  misc_feature (218)..(218): n is a, c, t, g, unknown, or other
atcgacgaacatttccacgaaaatctcgctgctctcgcgaaaaaaggacgccacccgcccttgcttgctctccagtttgcaccctggaggcaggtgcaggggcgctcctcgccagcgggcagtcaaccgcccgcgtcggccatggcggaggcggggaggcggacgcttgcgctggtgaacctggcggccatcatggagcgcgccgacgaggcgctgcngcccgcggtgtaccgggaggtgggcgcagcgctgggcgccacgcccgtggcactcggcgcgctcacgctctaccgctcagccgtgcaggccgcctgctacccgctggccgcctacgccgccgtgcgctacaaccgcgcccacgtagtcgccgttggggccgttctctgggccgccgccaccttcctcgtcgccgtctcagacacctttgcccagcaggtagcgatagctagatgtttgaatggtattggcctagcacttgtcaccccggcgatccaatctctggtggcagattgctctgatgacaacactcgaggcgccgcatttggatggcttcaacttacgggaaacattggttcaattattggtggtttgttttccctgatgcttgcacccaccacagtcatgggtattgccggctggcgtgttgcatttcacattgttgctgttataagcgttgtagtcggtgtgttggttggcctatttgcagtggaccctcatttcctccatgttgaaagtggcgagcagctgttacgcaagtctgcatgggcagagatgaaggatttggtgagagaagccaaggctgttgtgaagatctcatcgtttcagatcattgtggctcagggtgtcacaggctcgtttccatggtctgccctggcctttgccccaatgtggctggagttgatggggtttacgcacaacagaactgggctcctgatggtaacatttgcattggcaagctcacttggagggctgttaggtggaaagatgggggatcactttgctactcgcttcccgaattccggccgaatagtcctgtcgcagataagctcagcttctgctattccgttggctgctctgttgcttttggggctccctgataactcttctggttccttgcatggacttgtcatgtttatcatgggtctgagcatctcctggaatggtcctgcaactaacaacccgatatttgctgagattgtacctgagaggtcaaggacaagcatctatgcattggaccgttctttagagtcagttctagcttcattcgctccaccagttgttgggtttctagccgagcatgtctatgggtacaatcccgtcccctacggagctgcagataacaatgttggcagggataaatcaaatgctggcgccctagccaaagctctgtacacgtcgatcgccatccctatgctgctgtgctgcttcatctactccctgttgtaccggacgtacccacgagacagggagagggcaaggatggactctctgatcactccagagctccagcagattgaactggaaagatgtcatgggcaagcggattattattctggaaggaaggacaaggacggctctactgtcttcgatatggattacagaggaatcgacgcctatgatgacgagaagggattaatcgatcagcaggctaagcagagcggcaatgtcaagtggcacaggagtcattcacagaatttgtgacgtttttgccaaagtatcagtgctctcggatctgtacagaaaacgtgagtgagagtgagttacctctcgaaggacgattacatagggttgtttagatagactcagaagcatcagaacaattcggttatgttcagcattatatatatatatat

SEQ ID NO: 40741 - protein, 566 aa, Zea mays subsp. mays
  peptide (1)..(566): Ceres Seq. ID no. 12419993
  misc_feature (55)..(453): Pfam Name: and other Pfam Description: Sugar
  misc_feature (50)..(505): NCBI GI NO: 15218229 NR Description: putative transporter; protein id: At1g78130.1
  misc_feature (55)..(516): NCBI GI NO: 15238089 NR Description: putative protein; protein id: At5g10190
  misc_feature (89)..(516): NCBI GI NO: 11358310 NR Description: hypothetical protein T31P16
  misc_feature (55)..(496): NCBI GI NO: 15234530 NR Description: putative protein; protein id: At4g36790.1
  misc_feature (64)..(496): NCBI GI NO: 15224194 NR Description: hypothetical protein; protein id: At2g18590.1
  misc_feature (202)..(502): NCBI GI NO: 34393426 NR Description: membrane transporter PFB0275w-like protein
  misc_feature (259)..(501): NCBI GI NO: 23593282 NR Description: hypothetical protein, conserved
  misc_feature (51)..(237): NCBI GI NO: 23593282 NR Description: hypothetical protein, conserved
  misc_feature (259)..(501): NCBI GI NO: 7494336 NR Description: membrane transporter PFB0275w - malaria parasite
  misc_feature (51)..(237): NCBI GI NO: 7494336 NR Description: membrane transporter PFB0275w - malaria parasite
  misc_feature (73)..(73): Xaa is any aa, unknown or other
IDEHFHENLAALAKKGRHPPLLALQFAPWRQVQGRSSPAGSQPPASAMAEAGRRTLALVNLAAIMERADEALXPAVYREVGAALGATPVALGALTLYRSAVQAACYPLAAYAAVRYNRAHVVAVGAVLWAAATFLVAVSDTFAQQVAIARCLNGIGLALVTPAIQSLVADCSDDNTRGAAFGWLQLTGNIGSIIGGLFSLMLAPTTVMGIAGWRVAFHIVAVISVVVGVLVGLFAVDPHFLHVESGEQLLRKSAWAEMKDLVREAKAVVKISSFQIIVAQGVTGSFPWSALAFAPMWLELMGFTHNRTGLLMVTFALASSLGGLLGGKMGDHFATRFPNSGRIVLSQISSASAIPLAALLLLGLPDNSSGSLHGLVMFIMGLSISWNGPATNNPIFAEIVPERSRTSIYALDRSLESVLASFAPPVVGFLAEHVYGYNPVPYGAADNNVGRDKSNAGALAKALYTSIAIPMLLCCFIYSLLYRTYPRDRERARMDSLITPELQQIELERCHGQADYYSGRKDKDGSTVFDMDYRGIDAYDDEKGLIDQQAKQSGNVKWHRSHSQNL

SEQ ID NO: 40742 - protein, 519 aa, Zea mays subsp. mays
  peptide (1)..(519): Ceres Seq. ID no. 12419994
  misc_feature (8)..(406): Pfam Name: and other Pfam Description: Sugar
  misc_feature (3)..(458): NCBI GI NO: 15218229 NR Description: putative transporter; protein id: At1g78130.1
  misc_feature (8)..(469): NCBI GI NO: 15238089 NR Description: putative protein; protein id: At5g10190
  misc_feature (42)..(469): NCBI GI NO: 11358310 NR Description: hypothetical protein T31P16
  misc_feature (8)..(449): NCBI GI NO: 15234530 NR Description: putative protein; protein id: At4g36790.1
  misc_feature (17)..(449): NCBI GI NO: 15224194 NR Description: hypothetical protein; protein id: At2g18590.1
  misc_feature (155)..(455): NCBI GI NO: 34393426 NR Description: membrane transporter PFB0275w-like protein
  misc_feature (212)..(454): NCBI GI NO: 23593282 NR Description: hypothetical protein, conserved
  misc_feature (4)..(190): NCBI GI NO: 23593282 NR Description: hypothetical protein, conserved
  misc_feature (212)..(454): NCBI GI NO: 7494336 NR Description: membrane transporter PFB0275w - malaria parasite
  misc_feature (4)..(190): NCBI GI NO: 7494336 NR Description: membrane transporter PFB0275w - malaria parasite
  misc_feature (26)..(26): Xaa is any aa, unknown or other
MAEAGRRTLALVNLAAIMERADEALXPAVYREVGAALGATPVALGALTLYRSAVQAACYPLAAYAAVRYNRAHVVAVGAVLWAAATFLVAVSDTFAQQVAIARCLNGIGLALVTPAIQSLVADCSDDNTRGAAFGWLQLTGNIGSIIGGLFSLMLAPTTVMGIAGWRVAFHIVAVISVVVGVLVGLFAVDPHFLHVESGEQLLRKSAWAEMKDLVREAKAVVKISSFQIIVAQGVTGSFPWSALAFAPMWLELMGFTHNRTGLLMVTFALASSLGGLLGGKMGDHFATRFPNSGRIVLSQISSASAIPLAALLLLGLPDNSSGSLHGLVMFIMGLSISWNGPATNNPIFAEIVPERSRTSIYALDRSLESVLASFAPPVVGFLAEHVYGYNPVPYGAADNNVGRDKSNAGALAKALYTSIAIPMLLCCFIYSLLYRTYPRDRERARMDSLITPELQQIELERCHGQADYYSGRKDKDGSTVFDMDYRGIDAYDDEKGLIDQQAKQSGNVKWHRSHSQNL

SEQ ID NO: 40743 - protein, 502 aa, Zea mays subsp. mays
  peptide (1)..(502): Ceres Seq. ID no. 12419995
  misc_feature (1)..(389): Pfam Name: and other Pfam Description: Sugar
  misc_feature (1)..(441): NCBI GI NO: 15218229 NR Description: putative transporter; protein id: At1g78130.1
  misc_feature (1)..(452): NCBI GI NO: 15238089 NR Description: putative protein; protein id: At5g10190
  misc_feature (25)..(452): NCBI GI NO: 11358310 NR Description: hypothetical protein T31P16
  misc_feature (1)..(432): NCBI GI NO: 15234530 NR Description: putative protein; protein id: At4g36790.1
  misc_feature (1)..(432): NCBI GI NO: 15224194 NR Description: hypothetical protein; protein id: At2g18590.1
  misc_feature (138)..(438): NCBI GI NO: 34393426 NR Description: membrane transporter PFB0275w-like protein
  misc_feature (195)..(437): NCBI GI NO: 23593282 NR Description: hypothetical protein, conserved
  misc_feature (1)..(173): NCBI GI NO: 23593282 NR Description: hypothetical protein, conserved
  misc_feature (195)..(437): NCBI GI NO: 7494336 NR Description: membrane transporter PFB0275w - malaria parasite
  misc_feature (1)..(173): NCBI GI NO: 7494336 NR Description: membrane transporter PFB0275w - malaria parasite
  misc_feature (9)..(9): Xaa is any aa, unknown or other
MERADEALXPAVYREVGAALGATPVALGALTLYRSAVQAACYPLAAYAAVRYNRAHVVAVGAVLWAAATFLVAVSDTFAQQVAIARCLNGIGLALVTPAIQSLVADCSDDNTRGAAFGWLQLTGNIGSIIGGLFSLMLAPTTVMGIAGWRVAFHIVAVISVVVGVLVGLFAVDPHFLHVESGEQLLRKSAWAEMKDLVREAKAVVKISSFQIIVAQGVTGSFPWSALAFAPMWLELMGFTHNRTGLLMVTFALASSLGGLLGGKMGDHFATRFPNSGRIVLSQISSASAIPLAALLLLGLPDNSSGSLHGLVMFIMGLSISWNGPATNNPIFAEIVPERSRTSIYALDRSLESVLASFAPPVVGFLAEHVYGYNPVPYGAADNNVGRDKSNAGALAKALYTSIAIPMLLCCFIYSLLYRTYPRDRERARMDSLITPELQQIELERCHGQADYYSGRKDKDGSTVFDMDYRGIDAYDDEKGLIDQQAKQSGNVKWHRSHSQNL

SEQ ID NO: 40744 - DNA, 454 bp, Zea mays subsp. mays
  misc_feature (1)..(454): Ceres Seq. ID no. 1851894
cgtttccagctccgatccaacccagcatctgtaccgcgccgscgagcacgtccggcgccggtgcggcaggcgaaatccgagagcgaggggatccggtacaagaagaatgaagtcttcttggatgtagtggagagtgttaacattctagttaacagcaatggccagattgtgagatcagatgtggttggggcactgaagatgcgaacatatttgagtggaatgccggagtgcaaacttggcttgaatgatagggttcttttggaggctcaaggcagagcaactaaaggcaaagcgatagacctcgatgatatcaaatttcatcagtgtgtacgtttggctagatttgagaatgatagaactatatcgttcatacctcctgatggatcttttgatctaatgacatacaggcttagcactcaggtaaaacctcttatctgggtcgaagcacagattg

SEQ ID NO: 40745 - protein, 151 aa, Zea mays subsp. mays
  peptide (1)..(151): Ceres Seq. ID no. 1851895
  misc_feature (18)..(150): Pfam Name: Pfam Description:  Adaptor complexes medium subunit family
  misc_feature (18)..(150): NCBI GI NO: 34910334 NR Description: putative clathrin-associated protein
  misc_feature (18)..(150): NCBI GI NO: 15219810 NR Description: clathrin adaptor medium chain protein MU1B
  misc_feature (18)..(150): NCBI GI NO: 15220202 NR Description: putative clathrin-coat assembly protein
  misc_feature (18)..(150): NCBI GI NO: 6573741 NR Description: F20B24.16 [Arabidopsis thaliana]
  misc_feature (15)..(150): NCBI GI NO: 28949965 NR Description: probable clathrin assembly protein AP47
  misc_feature (18)..(150): NCBI GI NO: 24645407 NR Description: CG9388-PA [Drosophila melanogaster]
  misc_feature (18)..(150): NCBI GI NO: 31227815 NR Description: ENSANGP00000020532 [Anopheles gambiae]
  misc_feature (5)..(150): NCBI GI NO: 9506797 NR Description: adaptor-related protein complex 1, mu 2 subunit
  misc_feature (18)..(150): NCBI GI NO: 21913172 NR Description: mu1 adaptin [Toxoplasma gondii]
  misc_feature (5)..(150): NCBI GI NO: 6753072 NR Description: adaptor-related protein complex AP-1, mu 2 subunit
  misc_feature (14)..(14): Xaa is any aa, unknown or other
RFQLRSNPASVPRXRARPAPVRQAKSESEGIRYKKNEVFLDVVESVNILVNSNGQIVRSDVVGALKMRTYLSGMPECKLGLNDRVLLEAQGRATKGKAIDLDDIKFHQCVRLARFENDRTISFIPPDGSFDLMTYRLSTQVKPLIWVEAQI

SEQ ID NO: 40746 - protein, 85 aa, Zea mays subsp. mays
  peptide (1)..(85): Ceres Seq. ID no. 1851896
  misc_feature (1)..(84): Pfam Name: Pfam Description:  Adaptor complexes medium subunit family
  misc_feature (1)..(84): NCBI GI NO: 34910334 NR Description: putative clathrin-associated protein
  misc_feature (1)..(84): NCBI GI NO: 15219810 NR Description: clathrin adaptor medium chain protein MU1B
  misc_feature (1)..(84): NCBI GI NO: 15220202 NR Description: putative clathrin-coat assembly protein
  misc_feature (1)..(84): NCBI GI NO: 6573741 NR Description: F20B24.16 [Arabidopsis thaliana]
  misc_feature (1)..(84): NCBI GI NO: 28949965 NR Description: probable clathrin assembly protein AP47
  misc_feature (1)..(84): NCBI GI NO: 24645407 NR Description: CG9388-PA [Drosophila melanogaster]
  misc_feature (1)..(84): NCBI GI NO: 31227815 NR Description: ENSANGP00000020532 [Anopheles gambiae]
  misc_feature (1)..(84): NCBI GI NO: 9506797 NR Description: adaptor-related protein complex 1, mu 2 subunit
  misc_feature (1)..(84): NCBI GI NO: 21913172 NR Description: mu1 adaptin [Toxoplasma gondii]
  misc_feature (1)..(84): NCBI GI NO: 6753072 NR Description: adaptor-related protein complex AP-1, mu 2 subunit
MRTYLSGMPECKLGLNDRVLLEAQGRATKGKAIDLDDIKFHQCVRLARFENDRTISFIPPDGSFDLMTYRLSTQVKPLIWVEAQI

SEQ ID NO: 40747 - protein, 78 aa, Zea mays subsp. mays
  peptide (1)..(78): Ceres Seq. ID no. 1851897
  misc_feature (1)..(77): Pfam Name: Pfam Description:  Adaptor complexes medium subunit family
  misc_feature (1)..(77): NCBI GI NO: 34910334 NR Description: putative clathrin-associated protein
  misc_feature (1)..(77): NCBI GI NO: 15219810 NR Description: clathrin adaptor medium chain protein MU1B
  misc_feature (1)..(77): NCBI GI NO: 15220202 NR Description: putative clathrin-coat assembly protein
  misc_feature (1)..(77): NCBI GI NO: 6573741 NR Description: F20B24.16 [Arabidopsis thaliana]
  misc_feature (1)..(77): NCBI GI NO: 28949965 NR Description: probable clathrin assembly protein AP47
  misc_feature (1)..(77): NCBI GI NO: 24645407 NR Description: CG9388-PA [Drosophila melanogaster]
  misc_feature (1)..(77): NCBI GI NO: 31227815 NR Description: ENSANGP00000020532 [Anopheles gambiae]
  misc_feature (1)..(77): NCBI GI NO: 9506797 NR Description: adaptor-related protein complex 1, mu 2 subunit
  misc_feature (1)..(77): NCBI GI NO: 21913172 NR Description: mu1 adaptin [Toxoplasma gondii]
  misc_feature (1)..(77): NCBI GI NO: 6753072 NR Description: adaptor-related protein complex AP-1, mu 2 subunit
MPECKLGLNDRVLLEAQGRATKGKAIDLDDIKFHQCVRLARFENDRTISFIPPDGSFDLMTYRLSTQVKPLIWVEAQI

SEQ ID NO: 40748 - DNA, 1707 bp, Zea mays subsp. mays
  misc_feature (1)..(1707): Ceres Seq. ID no. 12363479
gcacgagaccattacctagaacatcctaatcgaaaacacaagaggctcaggctgagctcatctgcggcagtagccaaggagtggagtgaggtagctcgctctgtgagcagaaaacaatggagacgatggcggcggctcccgcgccgcagcaaaggacggggggcatcgcgcggaggctggccaggctgctccgccgcaagagctccccggcaggtgcggggatggcgtactccgtcgccggggacgagttcgacgactcgcttgacagctcaatcaactcgctcagcaagctcaagctgtccggcaacctggctgctgcctacacgctggacgccatcttcaagaatgccacggagaagaaggcagcggcggcggcgccgcagacgcagaagcagccgtcgccggcgaaggacgccgcgaagcacgcgttcttggcgaccctattcgcgagggcgtccgcggtgaaggcggcctacgcgcagctgcagctctcgctgcatccctacgacgccgagtccatccaggccgccggacgccggcctggtggcagagcttaccaagctgacgagcctcaagcggcggtacacaagggacccggccgccgcggccaggggcgccggtgccctcgcggcgcacgccgacgagcagctccacctcctgcggacctacgagatcacggcgcgcaagctggaggcggagctccgtgcgcgggacgccgaggccgagcgcgcacgcgccgcgctggccgacgagctccgcgccgtgcggggcctggaggagcgcgaccacccgggccgccgcaccctggacggcctccacctctccggcctcaacgccacccacttcctcaccgcgctgcaacacgccgtgaagtccgtccgcgccttcgccagggcaatggtcgacgcgatgcggccggccggttgggatcccgcggcggcggcggcggcggccgtgcacccgggcgccaggctgtgggaccccgcaggcgacgccaggttcgcgctcgagtcctacgtggcgctgaggatgttcgcgggcttccaccgcaaggacttgggcctgagctccctgcacgggcggggctcccacgaccggcgccgcttcttccaggagttcgcggaggcgagggccgcggctgcggcggatcagctccaggacgcgagcgacgcgcggtgggatgcgctccgggagttcctgcgggacaggtacgtgtccgtggtgcacgagagcatggaggcggccttcttcgggcgcggcggggacgcgctgccgcgcgccgcgtggctccgcgagttcgcggagatggcgcgccgcgtgtggctgctgcactgcctgttctgggcgttcgacggcgccgcgtccgtcttccaggcgcgccctggggagcggttctcggaggtgttcatggtgagcgtccgcgacgcggacgccggcaggagcgggcacgtctccgtcgggttcaccgtggtgccggggttcaagctcggcgcgacggtgatacaatgccgggtatacctttcacacccggagcgccgtccctgaggaccgtcacacttgggcggccttgtcgcacaccggcacacgagggaggcggtggggtttaagggtggcaggcaggcagcaatgacccctgtgcaatttgttatgtttatgtatgtatggatggatccaagtatatgtatctagtatgagcattccatttcc

SEQ ID NO: 40749 - protein, 496 aa, Zea mays subsp. mays
  peptide (1)..(496): Ceres Seq. ID no. 12363480
  misc_feature (37)..(138): NCBI GI NO: 34903732 NR Description: unnamed protein product
  misc_feature (104)..(138): NCBI GI NO: 15219282 NR Description: unknown protein; protein id: At1g53380.1
  misc_feature (81)..(138): NCBI GI NO: 8777470 NR Description: gb|AAB82637
  misc_feature (81)..(138): NCBI GI NO: 15231944 NR Description: hypothetical protein; protein id: At3g14870.1
  misc_feature (100)..(138): NCBI GI NO: 22329840 NR Description: unknown protein; protein id: At1g29300
  misc_feature (100)..(138): NCBI GI NO: 20466324 NR Description: unknown protein [Arabidopsis thaliana]
  misc_feature (88)..(140): NCBI GI NO: 15225441 NR Description: hypothetical protein; protein id: At2g45260
  misc_feature (139)..(496): NCBI GI NO: 29247944 NR Description: GLP_26_54603_52153 [Giardia lamblia ATCC 50803]
  misc_feature (136)..(488): NCBI GI NO: 29247944 NR Description: GLP_26_54603_52153 [Giardia lamblia ATCC 50803]
  misc_feature (149)..(495): NCBI GI NO: 79833 NR Description: hypothetical 119
METMAAAPAPQQRTGGIARRLARLLRRKSSPAGAGMAYSVAGDEFDDSLDSSINSLSKLKLSGNLAAAYTLDAIFKNATEKKAAAAAPQTQKQPSPAKDAAKHAFLATLFARASAVKAAYAQLQLSLHPYDAESIQAAGRRPGGRAYQADEPQAAVHKGPGRRGQGRRCPRGARRRAAPPPADLRDHGAQAGGGAPCAGRRGRARTRRAGRRAPRRAGPGGARPPGPPHPGRPPPLRPQRHPLPHRAATRREVRPRLRQGNGRRDAAGRLGSRGGGGGGRAPGRQAVGPRRRRQVRARVLRGAEDVRGLPPQGLGPELPARAGLPRPAPLLPGVRGGEGRGCGGSAPGRERRAVGCAPGVPAGQVRVRGAREHGGGLLRARRGRAAARRVAPRVRGDGAPRVAAALPVLGVRRRRVRLPGAPWGAVLGGVHGERPRRGRRQERARLRRVHRGAGVQARRDGDTMPGIPFTPGAPSLRTVTLGRPCRTPAHEGGGGV

SEQ ID NO: 40750 - protein, 493 aa, Zea mays subsp. mays
  peptide (1)..(493): Ceres Seq. ID no. 12363481
  misc_feature (34)..(135): NCBI GI NO: 34903732 NR Description: unnamed protein product
  misc_feature (101)..(135): NCBI GI NO: 15219282 NR Description: unknown protein; protein id: At1g53380.1
  misc_feature (78)..(135): NCBI GI NO: 8777470 NR Description: gb|AAB82637
  misc_feature (78)..(135): NCBI GI NO: 15231944 NR Description: hypothetical protein; protein id: At3g14870.1
  misc_feature (97)..(135): NCBI GI NO: 22329840 NR Description: unknown protein; protein id: At1g29300
  misc_feature (97)..(135): NCBI GI NO: 20466324 NR Description: unknown protein [Arabidopsis thaliana]
  misc_feature (85)..(137): NCBI GI NO: 15225441 NR Description: hypothetical protein; protein id: At2g45260
  misc_feature (136)..(493): NCBI GI NO: 29247944 NR Description: GLP_26_54603_52153 [Giardia lamblia ATCC 50803]
  misc_feature (133)..(485): NCBI GI NO: 29247944 NR Description: GLP_26_54603_52153 [Giardia lamblia ATCC 50803]
  misc_feature (146)..(492): NCBI GI NO: 79833 NR Description: hypothetical 119
MAAAPAPQQRTGGIARRLARLLRRKSSPAGAGMAYSVAGDEFDDSLDSSINSLSKLKLSGNLAAAYTLDAIFKNATEKKAAAAAPQTQKQPSPAKDAAKHAFLATLFARASAVKAAYAQLQLSLHPYDAESIQAAGRRPGGRAYQADEPQAAVHKGPGRRGQGRRCPRGARRRAAPPPADLRDHGAQAGGGAPCAGRRGRARTRRAGRRAPRRAGPGGARPPGPPHPGRPPPLRPQRHPLPHRAATRREVRPRLRQGNGRRDAAGRLGSRGGGGGGRAPGRQAVGPRRRRQVRARVLRGAEDVRGLPPQGLGPELPARAGLPRPAPLLPGVRGGEGRGCGGSAPGRERRAVGCAPGVPAGQVRVRGAREHGGGLLRARRGRAAARRVAPRVRGDGAPRVAAALPVLGVRRRRVRLPGAPWGAVLGGVHGERPRRGRRQERARLRRVHRGAGVQARRDGDTMPGIPFTPGAPSLRTVTLGRPCRTPAHEGGGGV

SEQ ID NO: 40751 - protein, 461 aa, Zea mays subsp. mays
  peptide (1)..(461): Ceres Seq. ID no. 12363482
  misc_feature (2)..(103): NCBI GI NO: 34903732 NR Description: unnamed protein product
  misc_feature (69)..(103): NCBI GI NO: 15219282 NR Description: unknown protein; protein id: At1g53380.1
  misc_feature (46)..(103): NCBI GI NO: 8777470 NR Description: gb|AAB82637
  misc_feature (46)..(103): NCBI GI NO: 15231944 NR Description: hypothetical protein; protein id: At3g14870.1
  misc_feature (65)..(103): NCBI GI NO: 22329840 NR Description: unknown protein; protein id: At1g29300
  misc_feature (65)..(103): NCBI GI NO: 20466324 NR Description: unknown protein [Arabidopsis thaliana]
  misc_feature (53)..(105): NCBI GI NO: 15225441 NR Description: hypothetical protein; protein id: At2g45260
  misc_feature (104)..(461): NCBI GI NO: 29247944 NR Description: GLP_26_54603_52153 [Giardia lamblia ATCC 50803]
  misc_feature (101)..(453): NCBI GI NO: 29247944 NR Description: GLP_26_54603_52153 [Giardia lamblia ATCC 50803]
  misc_feature (114)..(460): NCBI GI NO: 79833 NR Description: hypothetical 119
MAYSVAGDEFDDSLDSSINSLSKLKLSGNLAAAYTLDAIFKNATEKKAAAAAPQTQKQPSPAKDAAKHAFLATLFARASAVKAAYAQLQLSLHPYDAESIQAAGRRPGGRAYQADEPQAAVHKGPGRRGQGRRCPRGARRRAAPPPADLRDHGAQAGGGAPCAGRRGRARTRRAGRRAPRRAGPGGARPPGPPHPGRPPPLRPQRHPLPHRAATRREVRPRLRQGNGRRDAAGRLGSRGGGGGGRAPGRQAVGPRRRRQVRARVLRGAEDVRGLPPQGLGPELPARAGLPRPAPLLPGVRGGEGRGCGGSAPGRERRAVGCAPGVPAGQVRVRGAREHGGGLLRARRGRAAARRVAPRVRGDGAPRVAAALPVLGVRRRRVRLPGAPWGAVLGGVHGERPRRGRRQERARLRRVHRGAGVQARRDGDTMPGIPFTPGAPSLRTVTLGRPCRTPAHEGGGGV

SEQ ID NO: 40752 - DNA, 1424 bp, Zea mays subsp. mays
  misc_feature (1)..(1424): Ceres Seq. ID no. 12359128
ctcccgcgatcgccaccggggaaggggcaatagaataaagtgagggcagccaatgcaggccgccgtcaacaccaccactgtcggcgctcacccgcacccaacaaagtcctcgttcctccgtccgtcccctccttgccgcgtctacttccacgcttctccacgcccgaaccttagggcgatcgccatggccagcaagtcgcagctgcaggaccaactgatcatcactcgccccgacgactggcacctccatcttcgcgaaggcggtgtcctcgaggctgtagtgccacacagcgcgaggcattttgggagggccatcatcatgcccaacctgaagccgccggtgaccacaacggcacgggccgtggagtacagggaggagataatgagggcgctgccgccagggagtagcttcgagccgctcatgacactatacctcacagacaacacaagcccagaggagatcaagctcgcaagaaagagtggtataatttttgctgtgaagttgtatcctgctggagcaactaccaattcccaagatggtgtcactgatatatttgggaagtgcttgccggtcctcgaggagatggtcaggcaggaaatgccgttgcttgttcatggagaagtcacagatccacatgttgacacatttgaccgcgagaaggttttcattgacaaaatattagcaccacttgtacaaaaacttccgcagctgaaaattgtcatggaacatatcacaactatggatgcagtgaacttcatagaatcatgtgaagaaggtcatgttgctgcaacagtgactccccagcatctcctcctcaataggaatgctttatttcagggtggcttgcagccacacaattattgcttgccagtactgaaaagagagactcatagacaagctattgtgtctgctgtaacaaatgggagtagacggtacttccttggtactgacagcgctccccatgataaacggaacaaagagtgttcctgtggatgtgctggaatatatagcgctcctgttgccttgtctctttatgtgaaggtatttgaagaggctggtgcccttgataaactagaagcatttacaagcttcaatggccctgatttttatggcctcccaaggaacacttcaaagattatcttgagaaagaatgcctggaaagttcctgctacttataaacacagttcaggggagattgtgcctatgtttaatggcagcacccttgaatggcttccatctgatcagcctaaagagtaaacagtatacattattggacccagcacttgggggaatcaataggtggagttttctagttctttttcccgtttccactagaatcagcatagcgaaactattctgcttgttgaaagcaacggtggaggatctgcttgttgagttgttatatccatttgcattgcagtgc

SEQ ID NO: 40753 - protein, 401 aa, Zea mays subsp. mays
  peptide (1)..(401): Ceres Seq. ID no. 12359129
  misc_feature (54)..(395): Pfam Name: Pfam Description:  Amidohydrolase family
  misc_feature (44)..(401): NCBI GI NO: 34909480 NR Description: putative dihydroorotase
  misc_feature (54)..(395): NCBI GI NO: 15235865 NR Description: dihydroorotase; protein id: At4g22930
  misc_feature (54)..(396): NCBI GI NO: 17977977 NR Description: dihydroorotase [Beta vulgaris]
  misc_feature (53)..(393): NCBI GI NO: 30248736 NR Description: Dihydroorotase homodimeric type
  misc_feature (46)..(393): NCBI GI NO: 22988480 NR Description: hypothetical protein [Burkholderia fungorum]
  misc_feature (48)..(393): NCBI GI NO: 34499785 NR Description: dihydroorotase
  misc_feature (53)..(393): NCBI GI NO: 16331133 NR Description: dihydroorotase [Synechocystis sp. PCC 6803]
  misc_feature (53)..(393): NCBI GI NO: 17545206 NR Description: PROBABLE DIHYDROOROTASE PROTEIN
  misc_feature (55)..(393): NCBI GI NO: 15676580 NR Description: dihydroorotase [Neisseria meningitidis MC58]
  misc_feature (46)..(393): NCBI GI NO: 33598272 NR Description: dihydroorotase [Bordetella parapertussis]
MQAAVNTTTVGAHPHPTKSSFLRPSPPCRVYFHASPRPNLRAIAMASKSQLQDQLIITRPDDWHLHLREGGVLEAVVPHSARHFGRAIIMPNLKPPVTTTARAVEYREEIMRALPPGSSFEPLMTLYLTDNTSPEEIKLARKSGIIFAVKLYPAGATTNSQDGVTDIFGKCLPVLEEMVRQEMPLLVHGEVTDPHVDTFDREKVFIDKILAPLVQKLPQLKIVMEHITTMDAVNFIESCEEGHVAATVTPQHLLLNRNALFQGGLQPHNYCLPVLKRETHRQAIVSAVTNGSRRYFLGTDSAPHDKRNKECSCGCAGIYSAPVALSLYVKVFEEAGALDKLEAFTSFNGPDFYGLPRNTSKIILRKNAWKVPATYKHSSGEIVPMFNGSTLEWLPSDQPKE

SEQ ID NO: 40754 - protein, 357 aa, Zea mays subsp. mays
  peptide (1)..(357): Ceres Seq. ID no. 12359130
  misc_feature (10)..(351): Pfam Name: Pfam Description:  Amidohydrolase family
  misc_feature (1)..(357): NCBI GI NO: 34909480 NR Description: putative dihydroorotase
  misc_feature (10)..(351): NCBI GI NO: 15235865 NR Description: dihydroorotase; protein id: At4g22930
  misc_feature (10)..(352): NCBI GI NO: 17977977 NR Description: dihydroorotase [Beta vulgaris]
  misc_feature (9)..(349): NCBI GI NO: 30248736 NR Description: Dihydroorotase homodimeric type
  misc_feature (2)..(349): NCBI GI NO: 22988480 NR Description: hypothetical protein [Burkholderia fungorum]
  misc_feature (4)..(349): NCBI GI NO: 34499785 NR Description: dihydroorotase
  misc_feature (9)..(349): NCBI GI NO: 16331133 NR Description: dihydroorotase [Synechocystis sp. PCC 6803]
  misc_feature (9)..(349): NCBI GI NO: 17545206 NR Description: PROBABLE DIHYDROOROTASE PROTEIN
  misc_feature (11)..(349): NCBI GI NO: 15676580 NR Description: dihydroorotase [Neisseria meningitidis MC58]
  misc_feature (2)..(349): NCBI GI NO: 33598272 NR Description: dihydroorotase [Bordetella parapertussis]
MASKSQLQDQLIITRPDDWHLHLREGGVLEAVVPHSARHFGRAIIMPNLKPPVTTTARAVEYREEIMRALPPGSSFEPLMTLYLTDNTSPEEIKLARKSGIIFAVKLYPAGATTNSQDGVTDIFGKCLPVLEEMVRQEMPLLVHGEVTDPHVDTFDREKVFIDKILAPLVQKLPQLKIVMEHITTMDAVNFIESCEEGHVAATVTPQHLLLNRNALFQGGLQPHNYCLPVLKRETHRQAIVSAVTNGSRRYFLGTDSAPHDKRNKECSCGCAGIYSAPVALSLYVKVFEEAGALDKLEAFTSFNGPDFYGLPRNTSKIILRKNAWKVPATYKHSSGEIVPMFNGSTLEWLPSDQPKE

SEQ ID NO: 40755 - protein, 312 aa, Zea mays subsp. mays
  peptide (1)..(312): Ceres Seq. ID no. 12359131
  misc_feature (1)..(306): Pfam Name: Pfam Description:  Amidohydrolase family
  misc_feature (1)..(312): NCBI GI NO: 34909480 NR Description: putative dihydroorotase
  misc_feature (1)..(306): NCBI GI NO: 15235865 NR Description: dihydroorotase; protein id: At4g22930
  misc_feature (1)..(307): NCBI GI NO: 17977977 NR Description: dihydroorotase [Beta vulgaris]
  misc_feature (1)..(304): NCBI GI NO: 30248736 NR Description: Dihydroorotase homodimeric type
  misc_feature (1)..(304): NCBI GI NO: 22988480 NR Description: hypothetical protein [Burkholderia fungorum]
  misc_feature (1)..(304): NCBI GI NO: 34499785 NR Description: dihydroorotase
  misc_feature (1)..(304): NCBI GI NO: 16331133 NR Description: dihydroorotase [Synechocystis sp. PCC 6803]
  misc_feature (1)..(304): NCBI GI NO: 17545206 NR Description: PROBABLE DIHYDROOROTASE PROTEIN
  misc_feature (1)..(304): NCBI GI NO: 15676580 NR Description: dihydroorotase [Neisseria meningitidis MC58]
  misc_feature (1)..(304): NCBI GI NO: 33598272 NR Description: dihydroorotase [Bordetella parapertussis]
MPNLKPPVTTTARAVEYREEIMRALPPGSSFEPLMTLYLTDNTSPEEIKLARKSGIIFAVKLYPAGATTNSQDGVTDIFGKCLPVLEEMVRQEMPLLVHGEVTDPHVDTFDREKVFIDKILAPLVQKLPQLKIVMEHITTMDAVNFIESCEEGHVAATVTPQHLLLNRNALFQGGLQPHNYCLPVLKRETHRQAIVSAVTNGSRRYFLGTDSAPHDKRNKECSCGCAGIYSAPVALSLYVKVFEEAGALDKLEAFTSFNGPDFYGLPRNTSKIILRKNAWKVPATYKHSSGEIVPMFNGSTLEWLPSDQPKE

SEQ ID NO: 40756 - DNA, 1364 bp, Zea mays subsp. mays
  misc_feature (1)..(1364): Ceres Seq. ID no. 12368136
atcctttgggaattaatagtaagtgtttgggacttgggagagggagaggcgtcatgtacctgaacccaagaatcgtaggctctggggagaggacactggttctctcccatggctatggaggcagccaggctatctgggacaaggtgctgccgcacctctcacggacgaacaaggtactactcttcgactgggacttctcgagtaccgccgccggagaggaggaggaggacgcggagcacagctgctacacgttctcgaggttcgccgaagagctggtggcgctcatggacaagatgaagctgagcggcgccgtgtacgtggggcactccatggccggcatggtcggctgcattgcgtccatcacgcgccccgacctcttcacccacctcgtcctcgtcggcgcatccccgaggtacatgaactcggaggactacgagggcgggttcgacgagcccgacatcaaggcgatgctgtcgaggatctcgtcggacttccgcggctgggccgagggcttcgtgccgctcgccatcggcggcagcgcggacgaccaaccctcggcggtggagctgctggcgcggagcttcttcgccatggacccgcgcgtggcgcacggcctggcgcgcatgatcttcctgggcgaccagcgcgagctgctgggtgacgtggccgtgccgtgcacgctggtgcacgtctccggcgacttcgcggcgcccccctgcgtcgggcgctacatgcaggcccgcatgcgcaccgcctccatgtataccatcgactcggtgggacacttcccgcagctcgtcacgcccgacgagatgctcaggatactcgaccgcattctcgtcggctccgctgcttcccaagaggaggagactaccgcggcggcggcggctgccgccaagaccgagacgacgagtagcgaggtcgtatcctctggtggtgttgccgatgcgctggagtccaagggccgtatcgacgtggcgacatagtgctcctgctgctctggtgcaacatccctctcgaagtctcgatctatcagccttggctggctcttgtgctggtctcagttgatttgcttcggtccacactccacacgtttaacttacattattgcgcttttggattttctaatgcgtagaaacattaccatggttcgttcggaatttttagccatcacgtcacccaaactgcgtgtattattggtttgatcatggattgaattaaatgaaacactgagtgttaaagcattgtaaatgacatgcatggtttgcagccttgcaggattctagcttcctagaattatttatttttttggaaaatatttcatggattgaattaaatgaaacacttgagtgttaaagcattgt

SEQ ID NO: 40757 - protein, 327 aa, Zea mays subsp. mays
  peptide (1)..(327): Ceres Seq. ID no. 12368137
  misc_feature (56)..(276): Pfam Name: Pfam Description:  alpha/beta hydrolase fold
  misc_feature (20)..(327): NCBI GI NO: 34912326 NR Description: P0451D05.26
  misc_feature (4)..(279): NCBI GI NO: 15230110 NR Description: unknown protein; protein id: At3g24420.1
  misc_feature (21)..(277): NCBI GI NO: 15235567 NR Description: putative protein; protein id: At4g37470
  misc_feature (20)..(279): NCBI GI NO: 18396732 NR Description: expressed protein; protein id: At3g03990
  misc_feature (20)..(279): NCBI GI NO: 21593927 NR Description: unknown [Arabidopsis thaliana]
  misc_feature (138)..(277): NCBI GI NO: 40736991 NR Description: putative hydrolases
  misc_feature (21)..(139): NCBI GI NO: 40736991 NR Description: putative hydrolases
  misc_feature (21)..(273): NCBI GI NO: 24216360 NR Description: Predicted hydrolases or acyltransferases
  misc_feature (21)..(268): NCBI GI NO: 22987307 NR Description: hypothetical protein [Burkholderia fungorum]
  misc_feature (23)..(275): NCBI GI NO: 16080463 NR Description: similar to hydrolase [Bacillus subtilis]
PLGINSKCLGLGRGRGVMYLNPRIVGSGERTLVLSHGYGGSQAIWDKVLPHLSRTNKVLLFDWDFSSTAAGEEEEDAEHSCYTFSRFAEELVALMDKMKLSGAVYVGHSMAGMVGCIASITRPDLFTHLVLVGASPRYMNSEDYEGGFDEPDIKAMLSRISSDFRGWAEGFVPLAIGGSADDQPSAVELLARSFFAMDPRVAHGLARMIFLGDQRELLGDVAVPCTLVHVSGDFAAPPCVGRYMQARMRTASMYTIDSVGHFPQLVTPDEMLRILDRILVGSAASQEEETTAAAAAAAKTETTSSEVVSSGGVADALESKGRIDVAT

SEQ ID NO: 40758 - protein, 310 aa, Zea mays subsp. mays
  peptide (1)..(310): Ceres Seq. ID no. 12368138
  misc_feature (39)..(259): Pfam Name: Pfam Description:  alpha/beta hydrolase fold
  misc_feature (3)..(310): NCBI GI NO: 34912326 NR Description: P0451D05.26
  misc_feature (1)..(262): NCBI GI NO: 15230110 NR Description: unknown protein; protein id: At3g24420.1
  misc_feature (4)..(260): NCBI GI NO: 15235567 NR Description: putative protein; protein id: At4g37470
  misc_feature (3)..(262): NCBI GI NO: 18396732 NR Description: expressed protein; protein id: At3g03990
  misc_feature (3)..(262): NCBI GI NO: 21593927 NR Description: unknown [Arabidopsis thaliana]
  misc_feature (121)..(260): NCBI GI NO: 40736991 NR Description: putative hydrolases
  misc_feature (4)..(122): NCBI GI NO: 40736991 NR Description: putative hydrolases
  misc_feature (4)..(256): NCBI GI NO: 24216360 NR Description: Predicted hydrolases or acyltransferases
  misc_feature (4)..(251): NCBI GI NO: 22987307 NR Description: hypothetical protein [Burkholderia fungorum]
  misc_feature (6)..(258): NCBI GI NO: 16080463 NR Description: similar to hydrolase [Bacillus subtilis]
MYLNPRIVGSGERTLVLSHGYGGSQAIWDKVLPHLSRTNKVLLFDWDFSSTAAGEEEEDAEHSCYTFSRFAEELVALMDKMKLSGAVYVGHSMAGMVGCIASITRPDLFTHLVLVGASPRYMNSEDYEGGFDEPDIKAMLSRISSDFRGWAEGFVPLAIGGSADDQPSAVELLARSFFAMDPRVAHGLARMIFLGDQRELLGDVAVPCTLVHVSGDFAAPPCVGRYMQARMRTASMYTIDSVGHFPQLVTPDEMLRILDRILVGSAASQEEETTAAAAAAAKTETTSSEVVSSGGVADALESKGRIDVAT

SEQ ID NO: 40759 - protein, 233 aa, Zea mays subsp. mays
  peptide (1)..(233): Ceres Seq. ID no. 12368139
  misc_feature (1)..(182): Pfam Name: Pfam Description:  alpha/beta hydrolase fold
  misc_feature (1)..(233): NCBI GI NO: 34912326 NR Description: P0451D05.26
  misc_feature (1)..(185): NCBI GI NO: 15230110 NR Description: unknown protein; protein id: At3g24420.1
  misc_feature (1)..(183): NCBI GI NO: 15235567 NR Description: putative protein; protein id: At4g37470
  misc_feature (1)..(185): NCBI GI NO: 18396732 NR Description: expressed protein; protein id: At3g03990
  misc_feature (1)..(185): NCBI GI NO: 21593927 NR Description: unknown [Arabidopsis thaliana]
  misc_feature (44)..(183): NCBI GI NO: 40736991 NR Description: putative hydrolases
  misc_feature (1)..(45): NCBI GI NO: 40736991 NR Description: putative hydrolases
  misc_feature (1)..(179): NCBI GI NO: 24216360 NR Description: Predicted hydrolases or acyltransferases
  misc_feature (1)..(174): NCBI GI NO: 22987307 NR Description: hypothetical protein [Burkholderia fungorum]
  misc_feature (1)..(181): NCBI GI NO: 16080463 NR Description: similar to hydrolase [Bacillus subtilis]
MDKMKLSGAVYVGHSMAGMVGCIASITRPDLFTHLVLVGASPRYMNSEDYEGGFDEPDIKAMLSRISSDFRGWAEGFVPLAIGGSADDQPSAVELLARSFFAMDPRVAHGLARMIFLGDQRELLGDVAVPCTLVHVSGDFAAPPCVGRYMQARMRTASMYTIDSVGHFPQLVTPDEMLRILDRILVGSAASQEEETTAAAAAAAKTETTSSEVVSSGGVADALESKGRIDVAT

SEQ ID NO: 40760 - DNA, 2090 bp, Zea mays subsp. mays
  misc_feature (1)..(2090): Ceres Seq. ID no. 12387564
tcgcaccacaaccacctcctaccccttctcttcttcttctccccccttgcgaatcggagaccaagtgcaattgcccacccaagccccggaaccgggggccaagagcagtacagggggttggtttctgcgacggcgaggacgcgaagcggattcggatcgcgccgccatgccgctcgacgagctcgccgacaaagggccgtcgtcctccgaggaagttcagctcgcgccgtcggattccaagttccggagcctcagtccttcgccgattccgctcccaactcttccgagcatcagatcattggtccactcggtttctgacgagagtgtaaatgtagatgtcgcggcctcacatcaaagtgaaaatggatctatctctactgttagttcactagaatcagagagggcagcatatgaatttcttgctcaaactcctgtcaggtcaactgatgcacatcttcttgagttttcggaggctatgagaactgttgcaaaagccttacgacgagtggctgaagggaaggctgctgctcaagcagaggcagcggagtggaaacgtaagtatgaattagagacagcgcacaagcatcggagtaaaatcaaaggctacagcagttgtatcaataatgacttagacaaactggtcagccaactaaccctggagacacctacatctgatcaattaggatgttgcggaaagcatggtatatgtgcacatgagattctccaggacgaagttcctgggcctatcccaagatctaatcacaaggtggtggggagaaaggcatcatttaaactttcatggggatgtaatggggataaaaatggacaacataagcatgattttgtgtcctttgaaaaaggtgatataacaaccgcagaacgaagcaataagcagatcttactgaaatgggaatcgccaccacaaacagtgcttttcataaccaaaccgaattccaactctgttcgtgttctttgtgctgaaatgatcagatggcttagggagcataaaaatataaacatctttgttgagccacgtgttagcaaggaacttctaacagaggattcttactacaacttcgtccaaacatgggataatgatgaggagataaagatgctgcgcacaaaggttgatttaattataactcttggtggtgatggaactgttctgtgggctgcatcattgttcaaaggacctgttcctccggttgttgcatttgccctgggatcactgggcttcatgacgcctttcccaagcgagcaataccgtgagttgttggacaatgtgctgaatgggccatttagcatcacgctgagaaaccgcatacagtgtcatgtaatacgtgacgaggcaaaggatgaaatcgtgtctgaggagccattcttagtgttgaacgaagttacaatcgaccgaggaatatcatcctaccttaccaacctggaagtctactgtgacagctcttttgttacttgcgtacaaggggatggactaatcatatcaactacatctggaagtacagcatattcattagcagctggagggtccatggttcatcctcaggtcccagggatccttttcaccccaatctgcccgcactctctgtcattcagacctttgattctgcctgaatacgtgaccctccgcgttcaagtgccgttcaacagcaggggcaatgcctgggcatccttcgacggcaaagaccgacagcagctgtcgcccggtgacgccctgatctgcagcatttctccctggcccgtgcccacagcctgcctggtggactcgacgaccgatttcctccgcagcatccatgagggtctccactggaacttgaggaaatcccagtcatttgacggcccgcgtgattgatgcaacagctgttcagttatatttcagcccggtgccagaattcaagctgggaattctcaacaggaataactgtagctactccagggtgctctcacctttaccgttccatacttgcctatatacaaaggttgcgtgcgttagatgtgaggtatagatagatgtatagaatatggatggatgataacgactggacatgttgaataatacaacgccaacgtatgcacgc

SEQ ID NO: 40761 - protein, 620 aa, Zea mays subsp. mays
  peptide (1)..(620): Ceres Seq. ID no. 12387565
  misc_feature (309)..(591): Pfam Name: Pfam Description:  ATP-NAD kinase
  misc_feature (56)..(298): NCBI GI NO: 34905734 NR Description: putative inorganic polyphosphate/ATP-NAD kinase
  misc_feature (418)..(620): NCBI GI NO: 34905734 NR Description: putative inorganic polyphosphate/ATP-NAD kinase
  misc_feature (366)..(390): NCBI GI NO: 34905734 NR Description: putative inorganic polyphosphate/ATP-NAD kinase
  misc_feature (93)..(618): NCBI GI NO: 20259322 NR Description: unknown protein [Arabidopsis thaliana]
  misc_feature (93)..(618): NCBI GI NO: 22331228 NR Description: unknown protein; protein id: At3g21070.1
  misc_feature (120)..(618): NCBI GI NO: 39843359 NR Description: NADK1 [Arabidopsis thaliana]
  misc_feature (145)..(618): NCBI GI NO: 11994267 NR Description: contains similarity to unknownprotein~gb|AAF58357
  misc_feature (301)..(613): NCBI GI NO: 28573826 NR Description: CG33156-PC [Drosophila melanogaster]
  misc_feature (301)..(613): NCBI GI NO: 28573832 NR Description: CG33156-PB [Drosophila melanogaster]
  misc_feature (301)..(613): NCBI GI NO: 28573828 NR Description: CG33156-PA [Drosophila melanogaster]
RTTTTSYPFSSSSPPLRIGDQVQLPTQAPEPGAKSSTGGWFLRRRGREADSDRAAMPLDELADKGPSSSEEVQLAPSDSKFRSLSPSPIPLPTLPSIRSLVHSVSDESVNVDVAASHQSENGSISTVSSLESERAAYEFLAQTPVRSTDAHLLEFSEAMRTVAKALRRVAEGKAAAQAEAAEWKRKYELETAHKHRSKIKGYSSCINNDLDKLVSQLTLETPTSDQLGCCGKHGICAHEILQDEVPGPIPRSNHKVVGRKASFKLSWGCNGDKNGQHKHDFVSFEKGDITTAERSNKQILLKWESPPQTVLFITKPNSNSVRVLCAEMIRWLREHKNINIFVEPRVSKELLTEDSYYNFVQTWDNDEEIKMLRTKVDLIITLGGDGTVLWAASLFKGPVPPVVAFALGSLGFMTPFPSEQYRELLDNVLNGPFSITLRNRIQCHVIRDEAKDEIVSEEPFLVLNEVTIDRGISSYLTNLEVYCDSSFVTCVQGDGLIISTTSGSTAYSLAAGGSMVHPQVPGILFTPICPHSLSFRPLILPEYVTLRVQVPFNSRGNAWASFDGKDRQQLSPGDALICSISPWPVPTACLVDSTTDFLRSIHEGLHWNLRKSQSFDGPRD

SEQ ID NO: 40762 - protein, 565 aa, Zea mays subsp. mays
  peptide (1)..(565): Ceres Seq. ID no. 12387566
  misc_feature (254)..(536): Pfam Name: Pfam Description:  ATP-NAD kinase
  misc_feature (1)..(243): NCBI GI NO: 34905734 NR Description: putative inorganic polyphosphate/ATP-NAD kinase
  misc_feature (363)..(565): NCBI GI NO: 34905734 NR Description: putative inorganic polyphosphate/ATP-NAD kinase
  misc_feature (311)..(335): NCBI GI NO: 34905734 NR Description: putative inorganic polyphosphate/ATP-NAD kinase
  misc_feature (38)..(563): NCBI GI NO: 20259322 NR Description: unknown protein [Arabidopsis thaliana]
  misc_feature (38)..(563): NCBI GI NO: 22331228 NR Description: unknown protein; protein id: At3g21070.1
  misc_feature (65)..(563): NCBI GI NO: 39843359 NR Description: NADK1 [Arabidopsis thaliana]
  misc_feature (90)..(563): NCBI GI NO: 11994267 NR Description: contains similarity to unknownprotein~gb|AAF58357
  misc_feature (246)..(558): NCBI GI NO: 28573826 NR Description: CG33156-PC [Drosophila melanogaster]
  misc_feature (246)..(558): NCBI GI NO: 28573828 NR Description: CG33156-PA [Drosophila melanogaster]
  misc_feature (246)..(558): NCBI GI NO: 28573832 NR Description: CG33156-PB [Drosophila melanogaster]
MPLDELADKGPSSSEEVQLAPSDSKFRSLSPSPIPLPTLPSIRSLVHSVSDESVNVDVAASHQSENGSISTVSSLESERAAYEFLAQTPVRSTDAHLLEFSEAMRTVAKALRRVAEGKAAAQAEAAEWKRKYELETAHKHRSKIKGYSSCINNDLDKLVSQLTLETPTSDQLGCCGKHGICAHEILQDEVPGPIPRSNHKVVGRKASFKLSWGCNGDKNGQHKHDFVSFEKGDITTAERSNKQILLKWESPPQTVLFITKPNSNSVRVLCAEMIRWLREHKNINIFVEPRVSKELLTEDSYYNFVQTWDNDEEIKMLRTKVDLIITLGGDGTVLWAASLFKGPVPPVVAFALGSLGFMTPFPSEQYRELLDNVLNGPFSITLRNRIQCHVIRDEAKDEIVSEEPFLVLNEVTIDRGISSYLTNLEVYCDSSFVTCVQGDGLIISTTSGSTAYSLAAGGSMVHPQVPGILFTPICPHSLSFRPLILPEYVTLRVQVPFNSRGNAWASFDGKDRQQLSPGDALICSISPWPVPTACLVDSTTDFLRSIHEGLHWNLRKSQSFDGPRD

SEQ ID NO: 40763 - protein, 462 aa, Zea mays subsp. mays
  peptide (1)..(462): Ceres Seq. ID no. 12387567
  misc_feature (151)..(433): Pfam Name: Pfam Description:  ATP-NAD kinase
  misc_feature (1)..(140): NCBI GI NO: 34905734 NR Description: putative inorganic polyphosphate/ATP-NAD kinase
  misc_feature (260)..(462): NCBI GI NO: 34905734 NR Description: putative inorganic polyphosphate/ATP-NAD kinase
  misc_feature (208)..(232): NCBI GI NO: 34905734 NR Description: putative inorganic polyphosphate/ATP-NAD kinase
  misc_feature (1)..(460): NCBI GI NO: 20259322 NR Description: unknown protein [Arabidopsis thaliana]
  misc_feature (1)..(460): NCBI GI NO: 22331228 NR Description: unknown protein; protein id: At3g21070.1
  misc_feature (1)..(460): NCBI GI NO: 39843359 NR Description: NADK1 [Arabidopsis thaliana]
  misc_feature (1)..(460): NCBI GI NO: 11994267 NR Description: contains similarity to unknownprotein~gb|AAF58357
  misc_feature (143)..(455): NCBI GI NO: 28573826 NR Description: CG33156-PC [Drosophila melanogaster]
  misc_feature (143)..(455): NCBI GI NO: 28573828 NR Description: CG33156-PA [Drosophila melanogaster]
  misc_feature (143)..(455): NCBI GI NO: 28573832 NR Description: CG33156-PB [Drosophila melanogaster]
MRTVAKALRRVAEGKAAAQAEAAEWKRKYELETAHKHRSKIKGYSSCINNDLDKLVSQLTLETPTSDQLGCCGKHGICAHEILQDEVPGPIPRSNHKVVGRKASFKLSWGCNGDKNGQHKHDFVSFEKGDITTAERSNKQILLKWESPPQTVLFITKPNSNSVRVLCAEMIRWLREHKNINIFVEPRVSKELLTEDSYYNFVQTWDNDEEIKMLRTKVDLIITLGGDGTVLWAASLFKGPVPPVVAFALGSLGFMTPFPSEQYRELLDNVLNGPFSITLRNRIQCHVIRDEAKDEIVSEEPFLVLNEVTIDRGISSYLTNLEVYCDSSFVTCVQGDGLIISTTSGSTAYSLAAGGSMVHPQVPGILFTPICPHSLSFRPLILPEYVTLRVQVPFNSRGNAWASFDGKDRQQLSPGDALICSISPWPVPTACLVDSTTDFLRSIHEGLHWNLRKSQSFDGPRD

SEQ ID NO: 40764 - DNA, 1917 bp, Zea mays subsp. mays
  misc_feature (1)..(1917): Ceres Seq. ID no. 13493155
tagaacatcctaatcaaaaacacataagaggcgacatcacatcgcgttccgccgcctcacacgctagttggagctgtagtattagccaaccagccagcctccgatctccatccatatggaggaggctgcgcccgcggcggtcatggagcgggagcgcctcacggccgagatggccttccgcggcgcggacgaagctcggcgggaaggcggcgacccggcgcccagcatcgtcatcaagatccgccgccggctcccggacttcgcccgcaacatcaagctcaagtacgtgaagctcgggatccgccacggcggcagccccacgtcgctgctgccggcgctctgcgtgccggcggtcgccgccgccgcctactcgttcgtccgcctcgacgtcatctactactccgtcgacctgctcacctgcgtcgcctggctcggcaccgcgctgctgctgctcaccgtctactacctcaagcggccccgccccgtgtacctcgtcgagttcgcgtgctacaagccggaggagcggctcaagatctccaagtcggccttcctcgagatgaccgagagcaccggctccttcaatgaggcggctctggacttccagaccaagatcaccagccgctccgcgctcggggacgagacgtacctgcccccgggcgtccaggcgcgcccgcccaggctaaacatggcggaggcgcggaaggaggccgaggcggtcatgttcgggtgcctggacgcgctgttcgagtccacggggatcgacccgcgccgcgacgtgcgcatcctcatcgtcaactgcagcctcttcaacccgacgccgtcgctggcgtccatggtcatcaaccactacaggatgagggaggacgtcaagtcgttcaacctcggcggcatggggtgcagcgccggcctcatcgccgtcgacctcgccaaggacatgctccaggcgaaccccggatcgtacgccgtggtgctcagcaccgagaacatcaccctcaactggtacttcggcaacgaccgctccatgctcctctccaactgcatcttccgcatgggcggggccgcggcgctgctgtccaacaggcgcgcggacgccgggcgcgccaagtaccggctgctccacacggtgcgcacccacaaggcgccaccgacgagtgcttcaactgcgtgtaccagcgcgaggacgaggccggcaaggcgggcgtctcgctggcgcgggagctcatggcggtggccggcgacgcgctcaagaccaacatcacgacgctggggcccctggtgctgcccctgagcgagcagctcaagttcctcaggtcgctgatgatgcgccgcgtgttccgcgtcaggggcgtgcgcccctacatcccggacttccggcgcgcgttcgagcacttctgcgtgcacgccggcgggcgcgcggtgctggaggaggtgcagcgcagcctgagcctgcgggacacggacatggagcccagcaagtgctccctccaccggttcggcaacaccagcagcagctcgctgtggtacgagctggcgtacgccgaggccaagggccgggtaaggcgcggccaccgcgtgtggcagatcggcttcggctcggggttcaagtgcaacagcgccgtgtggcgcgctctacgcgacgtgccgccgctgccgtcgtcgcccggcgccgcggcggggccgggggccaggaagggcgcgccgcagagctgctgcaatccctgggtggacgacgtggacaggtaccctcccaaggcgtacgtctgatgggccacgtcacgtggccacaacaattgcatgatcccaatcccattcggatttcctcacgacgaattaatgaagaagggcgtgtgagtgtgagggagaaagttatacttgtatgtattttttttttcagttttattttgtcgtttcgttttc

SEQ ID NO: 40765 - protein, 390 aa, Zea mays subsp. mays
  peptide (1)..(390): Ceres Seq. ID no. 13493156
  misc_feature (179)..(320): Pfam Name: Pfam Description:  Chalcone and stilbene synthases
  misc_feature (23)..(341): NCBI GI NO: 37531254 NR Description: putative senescence-associated protein 15
  misc_feature (10)..(346): NCBI GI NO: 3551960 NR Description: senescence-associated protein 15
  misc_feature (10)..(341): NCBI GI NO: 4091810 NR Description: fatty acid elongase 3-ketoacyl-CoA synthase 1
  misc_feature (10)..(341): NCBI GI NO: 22329274 NR Description: fatty acid elongase 3-ketoacyl-CoA synthase 1
  misc_feature (27)..(344): NCBI GI NO: 29417540 NR Description: beta-ketoacyl-CoA-synthase [Marchantia polymorpha]
  misc_feature (48)..(341): NCBI GI NO: 9714501 NR Description: putative fatty acid elongase [Zea mays]
  misc_feature (46)..(347): NCBI GI NO: 14334714 NR Description: putative beta-ketoacyl-CoA synthase
  misc_feature (44)..(364): NCBI GI NO: 15225767 NR Description: beta-ketoacyl-CoA synthase, putative
  misc_feature (46)..(347): NCBI GI NO: 15239981 NR Description: beta-ketoacyl-CoA synthase, putative
  misc_feature (44)..(347): NCBI GI NO: 15219676 NR Description: beta-ketoacyl-CoA synthase, putative
MEEAAPAAVMERERLTAEMAFRGADEARREGGDPAPSIVIKIRRRLPDFARNIKLKYVKLGIRHGGSPTSLLPALCVPAVAAAAYSFVRLDVIYYSVDLLTCVAWLGTALLLLTVYYLKRPRPVYLVEFACYKPEERLKISKSAFLEMTESTGSFNEAALDFQTKITSRSALGDETYLPPGVQARPPRLNMAEARKEAEAVMFGCLDALFESTGIDPRRDVRILIVNCSLFNPTPSLASMVINHYRMREDVKSFNLGGMGCSAGLIAVDLAKDMLQANPGSYAVVLSTENITLNWYFGNDRSMLLSNCIFRMGGAAALLSNRRADAGRAKYRLLHTVRTHKAPPTSASTACTSARTRPARRASRWRGSSWRWPATRSRPTSRRWGPWCCP

SEQ ID NO: 40766 - protein, 381 aa, Zea mays subsp. mays
  peptide (1)..(381): Ceres Seq. ID no. 13493157
  misc_feature (170)..(311): Pfam Name: Pfam Description:  Chalcone and stilbene synthases
  misc_feature (14)..(332): NCBI GI NO: 37531254 NR Description: putative senescence-associated protein 15
  misc_feature (1)..(337): NCBI GI NO: 3551960 NR Description: senescence-associated protein 15
  misc_feature (1)..(332): NCBI GI NO: 4091810 NR Description: fatty acid elongase 3-ketoacyl-CoA synthase 1
  misc_feature (1)..(332): NCBI GI NO: 22329274 NR Description: fatty acid elongase 3-ketoacyl-CoA synthase 1
  misc_feature (18)..(335): NCBI GI NO: 29417540 NR Description: beta-ketoacyl-CoA-synthase [Marchantia polymorpha]
  misc_feature (39)..(332): NCBI GI NO: 9714501 NR Description: putative fatty acid elongase [Zea mays]
  misc_feature (37)..(338): NCBI GI NO: 14334714 NR Description: putative beta-ketoacyl-CoA synthase
  misc_feature (35)..(355): NCBI GI NO: 15225767 NR Description: beta-ketoacyl-CoA synthase, putative
  misc_feature (37)..(338): NCBI GI NO: 15239981 NR Description: beta-ketoacyl-CoA synthase, putative
  misc_feature (35)..(338): NCBI GI NO: 15219676 NR Description: beta-ketoacyl-CoA synthase, putative
MERERLTAEMAFRGADEARREGGDPAPSIVIKIRRRLPDFARNIKLKYVKLGIRHGGSPTSLLPALCVPAVAAAAYSFVRLDVIYYSVDLLTCVAWLGTALLLLTVYYLKRPRPVYLVEFACYKPEERLKISKSAFLEMTESTGSFNEAALDFQTKITSRSALGDETYLPPGVQARPPRLNMAEARKEAEAVMFGCLDALFESTGIDPRRDVRILIVNCSLFNPTPSLASMVINHYRMREDVKSFNLGGMGCSAGLIAVDLAKDMLQANPGSYAVVLSTENITLNWYFGNDRSMLLSNCIFRMGGAAALLSNRRADAGRAKYRLLHTVRTHKAPPTSASTACTSARTRPARRASRWRGSSWRWPATRSRPTSRRWGPWCCP

SEQ ID NO: 40767 - protein, 372 aa, Zea mays subsp. mays
  peptide (1)..(372): Ceres Seq. ID no. 13493158
  misc_feature (161)..(302): Pfam Name: Pfam Description:  Chalcone and stilbene synthases
  misc_feature (5)..(323): NCBI GI NO: 37531254 NR Description: putative senescence-associated protein 15
  misc_feature (1)..(328): NCBI GI NO: 3551960 NR Description: senescence-associated protein 15
  misc_feature (1)..(323): NCBI GI NO: 4091810 NR Description: fatty acid elongase 3-ketoacyl-CoA synthase 1
  misc_feature (1)..(323): NCBI GI NO: 22329274 NR Description: fatty acid elongase 3-ketoacyl-CoA synthase 1
  misc_feature (9)..(326): NCBI GI NO: 29417540 NR Description: beta-ketoacyl-CoA-synthase [Marchantia polymorpha]
  misc_feature (30)..(323): NCBI GI NO: 9714501 NR Description: putative fatty acid elongase [Zea mays]
  misc_feature (28)..(329): NCBI GI NO: 14334714 NR Description: putative beta-ketoacyl-CoA synthase
  misc_feature (26)..(346): NCBI GI NO: 15225767 NR Description: beta-ketoacyl-CoA synthase, putative
  misc_feature (28)..(329): NCBI GI NO: 15239981 NR Description: beta-ketoacyl-CoA synthase, putative
  misc_feature (26)..(329): NCBI GI NO: 15219676 NR Description: beta-ketoacyl-CoA synthase, putative
MAFRGADEARREGGDPAPSIVIKIRRRLPDFARNIKLKYVKLGIRHGGSPTSLLPALCVPAVAAAAYSFVRLDVIYYSVDLLTCVAWLGTALLLLTVYYLKRPRPVYLVEFACYKPEERLKISKSAFLEMTESTGSFNEAALDFQTKITSRSALGDETYLPPGVQARPPRLNMAEARKEAEAVMFGCLDALFESTGIDPRRDVRILIVNCSLFNPTPSLASMVINHYRMREDVKSFNLGGMGCSAGLIAVDLAKDMLQANPGSYAVVLSTENITLNWYFGNDRSMLLSNCIFRMGGAAALLSNRRADAGRAKYRLLHTVRTHKAPPTSASTACTSARTRPARRASRWRGSSWRWPATRSRPTSRRWGPWCCP

SEQ ID NO: 40768 - DNA, 1297 bp, Zea mays subsp. mays
  misc_feature (1)..(1297): Ceres Seq. ID no. 12418944
gcacgagaccattacctagaacatcctaatcgacttttcccaccaacacctccaaacctcctctctatttccaatttccacgccgccgccaacatgaccacctcagccgccgcctccgccaccgccgcgttgtccaccccatcctccgtcaatccccatcgatcgtcttctgcgctcaggctcccagcgtccctccgccgatcccatcccaacagattcttatcgtcgtcaccctcgcgctctccactcgtgccggtctccgccatggcctctcccgccgccgccggtgagacgtcctccaggaagaaactcatcatattcgatgcggaggacgacctcgcggcgtcactggccaagtacacgtctgagctgtcggcgaagttcgcggctgagaggggcgccttcaccgtcgtgctctccggcggctccctcgtcaaggccctcaggaaactagcggagccgccgtacctagaggcggtggattggagtaaatggcatgtgttctgggtggatgagagggtggtgcccaaggatcacgcggatagcaactacaggctcgcctcagatcagttcctctctaaggtgccgattcctgctgaccaagttcatgccatcaatgacgaactgtcatccgagggggctgcaggggactacgaaactcgtttaaagcagcttgttaagaacggtgtgatcgaactgtcgccggtgtccgggttccccaagtttgaccttatgcttatggggatggggcctgatggccacgttgcctcactcttccctggccaccctgttgtcaatgaataccagaagtgggtcacctttgtcaaggactccccgaagccgccgccggagagaataacgttcactttcccagtgatcaactcgtccgcacacatcgcacttgtggtcaccggtgctggcaaagctggtgctgtgcataaagcactttcagaagggcaaagtacatcagatttgctgcctgtcgagatggtttctcttcagaacggagagctcgtttggttcactgacaagccagcggtgtcaatgttgtcgagcatctgaagcccacgattgtataaatttgaagcttcaatttgatgggattcatacacgattgggtcttgttcggttgcatggtgattggaggggattagggatgattaaatctctttctattcaattttaaatggtaagagacttaatctcctctaattctcctcaatctagttttaaccgaacaagtccttgatggaaatctattcggttcgacatagaactccgagtgaatagattcggc

SEQ ID NO: 40769 - protein, 322 aa, Zea mays subsp. mays
  peptide (1)..(322): Ceres Seq. ID no. 12418945
  misc_feature (86)..(317): Pfam Name: Pfam Description:  Glucosamine-6-phosphate isomerases/ 6-phosphogluconolactonase
  misc_feature (59)..(319): NCBI GI NO: 28140256 NR Description: putative 6-phosphogluconolactonase
  misc_feature (55)..(319): NCBI GI NO: 21554291 NR Description: 6-phosphogluconolactonase-like protein
  misc_feature (55)..(319): NCBI GI NO: 18420789 NR Description: 6-phosphogluconolactonase-like protein
  misc_feature (70)..(319): NCBI GI NO: 10177901 NR Description: 6-phosphogluconolactonase-like protein
  misc_feature (62)..(321): NCBI GI NO: 34394567 NR Description: putative 6-phosphogluconolactonase
  misc_feature (69)..(319): NCBI GI NO: 21537412 NR Description: 6-phosphogluconolactonase-like protein
  misc_feature (75)..(319): NCBI GI NO: 15229127 NR Description: 6-phosphogluconolactonase - like protein
  misc_feature (69)..(319): NCBI GI NO: 15238526 NR Description: 6-phosphogluconolactonase-like protein
  misc_feature (75)..(319): NCBI GI NO: 21536675 NR Description: 6-phosphogluconolactonase-like protein
  misc_feature (70)..(319): NCBI GI NO: 15222922 NR Description: unknown protein; protein id: At1g13700.1
MTTSAAASATAALSTPSSVNPHRSSSALRLPASLRRSHPNRFLSSSPSRSPLVPVSAMASPAAAGETSSRKKLIIFDAEDDLAASLAKYTSELSAKFAAERGAFTVVLSGGSLVKALRKLAEPPYLEAVDWSKWHVFWVDERVVPKDHADSNYRLASDQFLSKVPIPADQVHAINDELSSEGAAGDYETRLKQLVKNGVIELSPVSGFPKFDLMLMGMGPDGHVASLFPGHPVVNEYQKWVTFVKDSPKPPPERITFTFPVINSSAHIALVVTGAGKAGAVHKALSEGQSTSDLLPVEMVSLQNGELVWFTDKPAVSMLSSI

SEQ ID NO: 40770 - protein, 265 aa, Zea mays subsp. mays
  peptide (1)..(265): Ceres Seq. ID no. 12418946
  misc_feature (29)..(260): Pfam Name: Pfam Description:  Glucosamine-6-phosphate isomerases/ 6-phosphogluconolactonase
  misc_feature (2)..(262): NCBI GI NO: 28140256 NR Description: putative 6-phosphogluconolactonase
  misc_feature (1)..(262): NCBI GI NO: 21554291 NR Description: 6-phosphogluconolactonase-like protein
  misc_feature (1)..(262): NCBI GI NO: 18420789 NR Description: 6-phosphogluconolactonase-like protein
  misc_feature (13)..(262): NCBI GI NO: 10177901 NR Description: 6-phosphogluconolactonase-like protein
  misc_feature (5)..(264): NCBI GI NO: 34394567 NR Description: putative 6-phosphogluconolactonase
  misc_feature (12)..(262): NCBI GI NO: 21537412 NR Description: 6-phosphogluconolactonase-like protein
  misc_feature (18)..(262): NCBI GI NO: 15229127 NR Description: 6-phosphogluconolactonase - like protein
  misc_feature (12)..(262): NCBI GI NO: 15238526 NR Description: 6-phosphogluconolactonase-like protein
  misc_feature (18)..(262): NCBI GI NO: 21536675 NR Description: 6-phosphogluconolactonase-like protein
  misc_feature (13)..(262): NCBI GI NO: 15222922 NR Description: unknown protein; protein id: At1g13700.1
MASPAAAGETSSRKKLIIFDAEDDLAASLAKYTSELSAKFAAERGAFTVVLSGGSLVKALRKLAEPPYLEAVDWSKWHVFWVDERVVPKDHADSNYRLASDQFLSKVPIPADQVHAINDELSSEGAAGDYETRLKQLVKNGVIELSPVSGFPKFDLMLMGMGPDGHVASLFPGHPVVNEYQKWVTFVKDSPKPPPERITFTFPVINSSAHIALVVTGAGKAGAVHKALSEGQSTSDLLPVEMVSLQNGELVWFTDKPAVSMLSSI

SEQ ID NO: 40771 - protein, 353 aa, Zea mays subsp. mays
  peptide (1)..(353): Ceres Seq. ID no. 12418947
  misc_feature (117)..(348): Pfam Name: Pfam Description:  Glucosamine-6-phosphate isomerases/ 6-phosphogluconolactonase
  misc_feature (90)..(350): NCBI GI NO: 28140256 NR Description: putative 6-phosphogluconolactonase
  misc_feature (86)..(350): NCBI GI NO: 21554291 NR Description: 6-phosphogluconolactonase-like protein
  misc_feature (86)..(350): NCBI GI NO: 18420789 NR Description: 6-phosphogluconolactonase-like protein
  misc_feature (101)..(350): NCBI GI NO: 10177901 NR Description: 6-phosphogluconolactonase-like protein
  misc_feature (93)..(352): NCBI GI NO: 34394567 NR Description: putative 6-phosphogluconolactonase
  misc_feature (100)..(350): NCBI GI NO: 21537412 NR Description: 6-phosphogluconolactonase-like protein
  misc_feature (106)..(350): NCBI GI NO: 15229127 NR Description: 6-phosphogluconolactonase - like protein
  misc_feature (100)..(350): NCBI GI NO: 15238526 NR Description: 6-phosphogluconolactonase-like protein
  misc_feature (106)..(350): NCBI GI NO: 21536675 NR Description: 6-phosphogluconolactonase-like protein
  misc_feature (101)..(350): NCBI GI NO: 15222922 NR Description: unknown protein; protein id: At1g13700.1
ARDHYLEHPNRLFPPTPPNLLSISNFHAAANMTTSAAASATAALSTPSSVNPHRSSSALRLPASLRRSHPNRFLSSSPSRSPLVPVSAMASPAAAGETSSRKKLIIFDAEDDLAASLAKYTSELSAKFAAERGAFTVVLSGGSLVKALRKLAEPPYLEAVDWSKWHVFWVDERVVPKDHADSNYRLASDQFLSKVPIPADQVHAINDELSSEGAAGDYETRLKQLVKNGVIELSPVSGFPKFDLMLMGMGPDGHVASLFPGHPVVNEYQKWVTFVKDSPKPPPERITFTFPVINSSAHIALVVTGAGKAGAVHKALSEGQSTSDLLPVEMVSLQNGELVWFTDKPAVSMLSSI

SEQ ID NO: 40772 - DNA, 503 bp, Zea mays subsp. mays
  misc_feature (1)..(503): Ceres Seq. ID no. 11414974
actgctcctttcttggaaaagctggttcagaaagatattgaggttctttacctcattgagccaattgatgaggttgccattcagaatttacagacatacaaagagaagaagtttgtagatattagcaaagaggatttggaattgggtgatgaagatgaggacaaggagaaagaaagcaagcaggagtatactcttctatgcgactggataaagcagcagcttggcgataaagtcgccaaggtccagatctcgaagcgactcagctcttctccatgtgttcttgtttctggtaaatttggctggtcagccaacatggaaaggctcatgaaggcacagacccttggtgacacatcaagcctggagttcatgagaggtagacgaatttttgagatcaaccctgaccatcctatcatcaaggacctgaacgctgcttgcaaaaacgagcctgaaagtactgaagccaagagggcggctgagtttgctatacgaggctgcgctgatct

SEQ ID NO: 40773 - protein, 167 aa, Zea mays subsp. mays
  peptide (1)..(167): Ceres Seq. ID no. 11414975
  misc_feature (1)..(159): Pfam Name: Pfam Description:  Hsp90 protein
  misc_feature (1)..(159): NCBI GI NO: 1076758 NR Description: heat-shock protein, 82K, precursor - rye
  misc_feature (1)..(159): NCBI GI NO: 1906830 NR Description: heat shock protein [Arabidopsis thaliana]
  misc_feature (1)..(159): NCBI GI NO: 15228059 NR Description: putative heat shock protein; protein id:At2g04030
  misc_feature (1)..(159): NCBI GI NO: 20453106 NR Description: At2g04030/F3C11.14 [Arabidopsis thaliana]
  misc_feature (1)..(159): NCBI GI NO: 30678090 NR Description: heat shock protein, putative
  misc_feature (2)..(159): NCBI GI NO: 15231505 NR Description: putative heat-shock protein; protein id:At3g07770
  misc_feature (1)..(152): NCBI GI NO: 28783995 NR Description: heat shock protein 90 [Streblomastix strix]
  misc_feature (2)..(159): NCBI GI NO: 2262098 NR Description: HSP90 isolog [Arabidopsis thaliana]
  misc_feature (2)..(155): NCBI GI NO: 13812107 NR Description: heat shock protein 82 [Guillardia theta]
  misc_feature (2)..(159): NCBI GI NO: 6863054 NR Description: heat shock protein 90 [Oryza sativa]
TAPFLEKLVQKDIEVLYLIEPIDEVAIQNLQTYKEKKFVDISKEDLELGDEDEDKEKESKQEYTLLCDWIKQQLGDKVAKVQISKRLSSSPCVLVSGKFGWSANMERLMKAQTLGDTSSLEFMRGRRIFEINPDHPIIKDLNAACKNEPESTEAKRAAEFAIRGCAD

SEQ ID NO: 40774 - DNA, 1298 bp, Zea mays subsp. mays
  misc_feature (1)..(1298): Ceres Seq. ID no. 12361214
aatagcgacggctcagcatagagacaagtccagcgctcaagagagagagagcaagcctttcggcctcgcgtgatgcagcagcagcagccgtccgtccgcgccgtcaccatccccttcgccgaccttaaggatcggggcaaggacctgggcggcttcatcgaggaaggcttcgggcctcaggggctcggcatcgtctccatcgccggcgtacccggttacccagagctcaggaaaaggctgctgcgcttggcgccaaggatcgtcagccttcctgatgatgtgaagaaacaactggaggacccagatagcagataccactttggttggagtcgtgtagaagagaaattcgagtctgaaagatgggacacagccaaaggctcctacttggccaacccagtttttgatgtcccaacaactgatgatgagcttgtaactagatacccatcatactgccgaccaaacatatggccaaaggatcatcttcctgagcttgaaatagcattcaaaggtcttggaaaactgatgttggaagttggcttgatgttggctcatcattgtgatcgctatgtaatacagcgaggggtgggacagtacattggtgaaagccttgagaagacacttgctaggtcaaggtgtcccaagggtcgtctgctgtactacttccccaaatcgtttagcaaacaggacgaagtttcgtcatggtgtggatggcatactgactatggatttttgacaggacttacatgtggcttgttcacgagaaaatcagaggaggtcccctgtcctgatattggaactgggctgtatgttcggactcgtgataatcaagtcgtcaaggtcacacttgtggatgatgagttggtctaccaaattggggagactgctgaaatactatcaagagggcatctatgtgcaaccccacactgtgtgaaggctcccagcagcgaagatgcttctgacgttggtcgctcaactttcgttctgtttattcagccaaactgggatgagccgctgaagcttcctagtgaaatacgctatcaccaggagtgcattccaccaaccaggacacttgcgtacggcgagtactccgaaagagtcttggcgagttttagcggcaagagcgtggaacaaaccttgatgccacagtaagaggctccagccagatgaatactccctctgtttctttttatttgtcgctggatagttcaattttatactatccagcgacaattaaaacgaaacggagggagtatatcatatgtatgataccataccattcaagctacagataagtggac

SEQ ID NO: 40775 - protein, 358 aa, Zea mays subsp. mays
  peptide (1)..(358): Ceres Seq. ID no. 12361215
  misc_feature (6)..(171): NCBI GI NO: 15235700 NR Description: putative protein; protein id: At4g13400.1
  misc_feature (206)..(346): NCBI GI NO: 15235700 NR Description: putative protein; protein id: At4g13400.1
  misc_feature (11)..(317): NCBI GI NO: 28829713 NR Description: similar to Arabidopsis thaliana (Mouse-ear cress)
  misc_feature (151)..(346): NCBI GI NO: 22531058 NR Description: putative protein [Arabidopsis thaliana]
  misc_feature (178)..(348): NCBI GI NO: 2982272 NR Description: hypothetical protein [Picea mariana]
  misc_feature (29)..(205): NCBI GI NO: 32422631 NR Description: hypothetical protein [Neurospora crassa]
  misc_feature (234)..(322): NCBI GI NO: 32422631 NR Description: hypothetical protein [Neurospora crassa]
  misc_feature (9)..(242): NCBI GI NO: 40747370 NR Description: hypothetical protein AN0427.2
  misc_feature (13)..(196): NCBI GI NO: 30695767 NR Description: expressed protein [Arabidopsis thaliana]
  misc_feature (210)..(328): NCBI GI NO: 30695767 NR Description: expressed protein [Arabidopsis thaliana]
MQQQQPSVRAVTIPFADLKDRGKDLGGFIEEGFGPQGLGIVSIAGVPGYPELRKRLLRLAPRIVSLPDDVKKQLEDPDSRYHFGWSRVEEKFESERWDTAKGSYLANPVFDVPTTDDELVTRYPSYCRPNIWPKDHLPELEIAFKGLGKLMLEVGLMLAHHCDRYVIQRGVGQYIGESLEKTLARSRCPKGRLLYYFPKSFSKQDEVSSWCGWHTDYGFLTGLTCGLFTRKSEEVPCPDIGTGLYVRTRDNQVVKVTLVDDELVYQIGETAEILSRGHLCATPHCVKAPSSEDASDVGRSTFVLFIQPNWDEPLKLPSEIRYHQECIPPTRTLAYGEYSERVLASFSGKSVEQTLMPQ

SEQ ID NO: 40776 - protein, 208 aa, Zea mays subsp. mays
  peptide (1)..(208): Ceres Seq. ID no. 12361216
  misc_feature (1)..(21): NCBI GI NO: 15235700 NR Description: putative protein; protein id: At4g13400.1
  misc_feature (56)..(196): NCBI GI NO: 15235700 NR Description: putative protein; protein id: At4g13400.1
  misc_feature (1)..(167): NCBI GI NO: 28829713 NR Description: similar to Arabidopsis thaliana (Mouse-ear cress)
  misc_feature (1)..(196): NCBI GI NO: 22531058 NR Description: putative protein [Arabidopsis thaliana]
  misc_feature (28)..(198): NCBI GI NO: 2982272 NR Description: hypothetical protein [Picea mariana]
  misc_feature (1)..(55): NCBI GI NO: 32422631 NR Description: hypothetical protein [Neurospora crassa]
  misc_feature (84)..(172): NCBI GI NO: 32422631 NR Description: hypothetical protein [Neurospora crassa]
  misc_feature (1)..(92): NCBI GI NO: 40747370 NR Description: hypothetical protein AN0427.2
  misc_feature (1)..(46): NCBI GI NO: 30695767 NR Description: expressed protein [Arabidopsis thaliana]
  misc_feature (60)..(178): NCBI GI NO: 30695767 NR Description: expressed protein [Arabidopsis thaliana]
MLEVGLMLAHHCDRYVIQRGVGQYIGESLEKTLARSRCPKGRLLYYFPKSFSKQDEVSSWCGWHTDYGFLTGLTCGLFTRKSEEVPCPDIGTGLYVRTRDNQVVKVTLVDDELVYQIGETAEILSRGHLCATPHCVKAPSSEDASDVGRSTFVLFIQPNWDEPLKLPSEIRYHQECIPPTRTLAYGEYSERVLASFSGKSVEQTLMPQ

SEQ ID NO: 40777 - protein, 202 aa, Zea mays subsp. mays
  peptide (1)..(202): Ceres Seq. ID no. 12361217
  misc_feature (1)..(15): NCBI GI NO: 15235700 NR Description: putative protein; protein id: At4g13400.1
  misc_feature (50)..(190): NCBI GI NO: 15235700 NR Description: putative protein; protein id: At4g13400.1
  misc_feature (1)..(161): NCBI GI NO: 28829713 NR Description: similar to Arabidopsis thaliana (Mouse-ear cress)
  misc_feature (1)..(190): NCBI GI NO: 22531058 NR Description: putative protein [Arabidopsis thaliana]
  misc_feature (22)..(192): NCBI GI NO: 2982272 NR Description: hypothetical protein [Picea mariana]
  misc_feature (1)..(49): NCBI GI NO: 32422631 NR Description: hypothetical protein [Neurospora crassa]
  misc_feature (78)..(166): NCBI GI NO: 32422631 NR Description: hypothetical protein [Neurospora crassa]
  misc_feature (1)..(86): NCBI GI NO: 40747370 NR Description: hypothetical protein AN0427.2
  misc_feature (1)..(40): NCBI GI NO: 30695767 NR Description: expressed protein [Arabidopsis thaliana]
  misc_feature (54)..(172): NCBI GI NO: 30695767 NR Description: expressed protein [Arabidopsis thaliana]
MLAHHCDRYVIQRGVGQYIGESLEKTLARSRCPKGRLLYYFPKSFSKQDEVSSWCGWHTDYGFLTGLTCGLFTRKSEEVPCPDIGTGLYVRTRDNQVVKVTLVDDELVYQIGETAEILSRGHLCATPHCVKAPSSEDASDVGRSTFVLFIQPNWDEPLKLPSEIRYHQECIPPTRTLAYGEYSERVLASFSGKSVEQTLMPQ

SEQ ID NO: 40778 - DNA, 920 bp, Zea mays subsp. mays; identical to SEQ ID NO: 30613
  misc_feature (1)..(920): Ceres Seq. ID no. 12436141

SEQ ID NO: 40779 - protein, 145 aa, Zea mays subsp. mays; identical to SEQ ID NO: 30614
  peptide (1)..(145): Ceres Seq. ID no. 12436142
  misc_feature (1)..(104): Pfam Name: Pfam Description:  Auxin responsive protein
  misc_feature (1)..(119): NCBI GI NO: 26452075 NR Description: putative auxin-induced protein
  misc_feature (1)..(119): NCBI GI NO: 15218924 NR Description: auxin-induced protein, putative
  misc_feature (1)..(119): NCBI GI NO: 21593671 NR Description: auxin-induced protein, putative
  misc_feature (1)..(119): NCBI GI NO: 21592571 NR Description: auxin-induced protein, putative
  misc_feature (1)..(119): NCBI GI NO: 18397123 NR Description: auxin-induced protein, putative
  misc_feature (1)..(143): NCBI GI NO: 20149052 NR Description: auxin-induced SAUR-like protein [Capsicum annuum]
  misc_feature (1)..(119): NCBI GI NO: 15241052 NR Description: putative protein; protein id: At5g27780.1
  misc_feature (1)..(119): NCBI GI NO: 18397101 NR Description: auxin-induced protein, putative
  misc_feature (1)..(119): NCBI GI NO: 38603942 NR Description: At1g29420 [Arabidopsis thaliana]
  misc_feature (1)..(119): NCBI GI NO: 26452170 NR Description: putative auxin-induced protein

SEQ ID NO: 40780 - protein, 132 aa, Zea mays subsp. mays; identical to SEQ ID NO: 30615
  peptide (1)..(132): Ceres Seq. ID no. 12436143
  misc_feature (1)..(91): Pfam Name: Pfam Description:  Auxin responsive protein
  misc_feature (1)..(106): NCBI GI NO: 26452075 NR Description: putative auxin-induced protein
  misc_feature (1)..(106): NCBI GI NO: 15218924 NR Description: auxin-induced protein, putative
  misc_feature (1)..(106): NCBI GI NO: 21593671 NR Description: auxin-induced protein, putative
  misc_feature (1)..(106): NCBI GI NO: 21592571 NR Description: auxin-induced protein, putative
  misc_feature (1)..(106): NCBI GI NO: 18397123 NR Description: auxin-induced protein, putative
  misc_feature (1)..(130): NCBI GI NO: 20149052 NR Description: auxin-induced SAUR-like protein [Capsicum annuum]
  misc_feature (1)..(106): NCBI GI NO: 15241052 NR Description: putative protein; protein id: At5g27780.1
  misc_feature (1)..(106): NCBI GI NO: 18397101 NR Description: auxin-induced protein, putative
  misc_feature (1)..(106): NCBI GI NO: 38603942 NR Description: At1g29420 [Arabidopsis thaliana]
  misc_feature (1)..(106): NCBI GI NO: 26452170 NR Description: putative auxin-induced protein

SEQ ID NO: 40781 - protein, 129 aa, Zea mays subsp. mays; identical to SEQ ID NO: 30616
  peptide (1)..(129): Ceres Seq. ID no. 12436144
  misc_feature (1)..(88): Pfam Name: Pfam Description:  Auxin responsive protein
  misc_feature (1)..(103): NCBI GI NO: 26452075 NR Description: putative auxin-induced protein
  misc_feature (1)..(103): NCBI GI NO: 15218924 NR Description: auxin-induced protein, putative
  misc_feature (1)..(103): NCBI GI NO: 21593671 NR Description: auxin-induced protein, putative
  misc_feature (1)..(103): NCBI GI NO: 21592571 NR Description: auxin-induced protein, putative
  misc_feature (1)..(103): NCBI GI NO: 18397123 NR Description: auxin-induced protein, putative
  misc_feature (1)..(127): NCBI GI NO: 20149052 NR Description: auxin-induced SAUR-like protein [Capsicum annuum]
  misc_feature (1)..(103): NCBI GI NO: 15241052 NR Description: putative protein; protein id: At5g27780.1
  misc_feature (1)..(103): NCBI GI NO: 18397101 NR Description: auxin-induced protein, putative
  misc_feature (1)..(103): NCBI GI NO: 38603942 NR Description: At1g29420 [Arabidopsis thaliana]
  misc_feature (1)..(103): NCBI GI NO: 26452170 NR Description: putative auxin-induced protein

SEQ ID NO: 40782 - DNA, 475 bp, Zea mays subsp. mays
  misc_feature (1)..(475): Ceres Seq. ID no. 1847866
  misc_feature (89)..(89): n is a, c, t, g, unknown, or other
aaactccatctcccgtctctctctctctctacgaactccacctcgcgaacagccgctgcttgcctgccgcgttggagagaacggaaganaagcgagcgagggagagggacagcaactccctcggtcgctttcgacggcctggatctccccgcacgcggtatcgtacgaccggcacgctgttgtcgctttccaccgcttgggcaagtggtgctctcgatccagaacggagctcatctgctgatcgtgtttcgtcagtcaagaggggtgtatttgcgatgattgctgtttttttggcttactcttttcttcaggcgccttcaactgtactcattagaccacatcctgccatttggaggctagttcatgggatggcagttgtttaccttgtcgccctcactttcttgcttttccagactcgtgatgatgctaggcaattcatgaagtatcttcatcctgatcttggtgtcgaatttac

SEQ ID NO: 40783 - protein, 92 aa, Zea mays subsp. mays
  peptide (1)..(92): Ceres Seq. ID no. 1847867
  misc_feature (30)..(30): Xaa is any aa, unknown or other
KLHLPSLSLSTNSTSRTAAACLPRWRERKXSERGRGTATPSVAFDGLDLPARGIVRPARCCRFPPLGQVVLSIQNGAHLLIVFRQSRGVYLR

SEQ ID NO: 40784 - protein, 79 aa, Zea mays subsp. mays
  peptide (1)..(79): Ceres Seq. ID no. 1847868
  misc_feature (30)..(30): Xaa is any aa, unknown or other
NSISRLSLSLRTPPREQPLLACRVGENGRXASEGEGQQLPRSLSTAWISPHAVSYDRHAVVAFHRLGKWCSRSRTELIC

SEQ ID NO: 40785 - protein, 157 aa, Zea mays subsp. mays
  peptide (1)..(157): Ceres Seq. ID no. 1847869
  misc_feature (54)..(156): NCBI GI NO: 25518032 NR Description: F9L1.4 protein - Arabidopsis thaliana
  misc_feature (66)..(154): NCBI GI NO: 34911216 NR Description: putative phosphatidylserine synthase
  misc_feature (66)..(137): NCBI GI NO: 34895332 NR Description: P0494A10.20
  misc_feature (56)..(155): NCBI GI NO: 12862079 NR Description: unnamed protein product [Mus musculus]
  misc_feature (56)..(155): NCBI GI NO: 26327711 NR Description: unnamed protein product [Mus musculus]
  misc_feature (56)..(155): NCBI GI NO: 26328497 NR Description: unnamed protein product [Mus musculus]
  misc_feature (56)..(155): NCBI GI NO: 4063700 NR Description: phosphatidylserine synthase-2 [Mus musculus]
  misc_feature (56)..(155): NCBI GI NO: 31560497 NR Description: phosphatidylserine synthase 2 [Mus musculus]
  misc_feature (56)..(155): NCBI GI NO: 2190007 NR Description: phosphatidylserine synthase II
  misc_feature (80)..(155): NCBI GI NO: 13540555 NR Description: phosphatidylserine synthase 2 [Homo sapiens]
  misc_feature (29)..(29): Xaa is any aa, unknown or other
TPSPVSLSLYELHLANSRCLPAALERTEXKRARERDSNSLGRFRRPGSPRTRYRTTGTLLSLSTAWASGALDPERSSSADRVSSVKRGVFAMIAVFLAYSFLQAPSTVLIRPHPAIWRLVHGMAVVYLVALTFLLFQTRDDARQFMKYLHPDLGVEF

SEQ ID NO: 40786 - protein, 66 aa, Zea mays subsp. mays
  peptide (1)..(66): Ceres Seq. ID no. 4902255
  misc_feature (1)..(65): NCBI GI NO: 25518032 NR Description: F9L1.4 protein - Arabidopsis thaliana
  misc_feature (1)..(63): NCBI GI NO: 34911216 NR Description: putative phosphatidylserine synthase
  misc_feature (1)..(46): NCBI GI NO: 34895332 NR Description: P0494A10.20
  misc_feature (1)..(64): NCBI GI NO: 12862079 NR Description: unnamed protein product [Mus musculus]
  misc_feature (1)..(64): NCBI GI NO: 26328497 NR Description: unnamed protein product [Mus musculus]
  misc_feature (1)..(64): NCBI GI NO: 26327711 NR Description: unnamed protein product [Mus musculus]
  misc_feature (1)..(64): NCBI GI NO: 4063700 NR Description: phosphatidylserine synthase-2 [Mus musculus]
  misc_feature (1)..(64): NCBI GI NO: 31560497 NR Description: phosphatidylserine synthase 2 [Mus musculus]
  misc_feature (1)..(64): NCBI GI NO: 2190007 NR Description: phosphatidylserine synthase II
  misc_feature (1)..(64): NCBI GI NO: 13540555 NR Description: phosphatidylserine synthase 2 [Homo sapiens]
MIAVFLAYSFLQAPSTVLIRPHPAIWRLVHGMAVVYLVALTFLLFQTRDDARQFMKYLHPDLGVEF

SEQ ID NO: 40787 - DNA, 562 bp, Zea mays subsp. mays
  misc_feature (1)..(562): Ceres Seq. ID no. 13503118
atcgtctgctggcatcgttccattctcctctaaaccctagccgcctagcgcctcgatctgagcagcctgtctcgcggaggtagttctggttgatttggtcctagatggcggaggaaaaagtggggcggatcttcgtcggcgggctgtcgtggaacaccacggagcgcacgctcgagcgcaccttcggtcagtacggcaaggtcatcgaggctcaggttgtagtggaaagggagacaggccgctctaggggatttggatttgtcacattttcagaacctcgggctgtggatgctgccattcggggaatgcataacggagaactggatggccgcaatatttctgtgaacaaagctgaacctaggaactctgatggctatggatatggtggtggtggtggtggtggttactcgtccggtggtagaggtggatatcgtagtggagctgatgtagttccagcagccagtgatgattgtttcaaatgtggccgtcctggacattgggctcgtgaatgcccttattcagatggaagtggtagaactggaaggtattctcccggttcaag

SEQ ID NO: 40788 - protein, 152 aa, Zea mays subsp. mays
  peptide (1)..(152): Ceres Seq. ID no. 13503119
  misc_feature (10)..(80): Pfam Name: a.k.a. RRM, RBD, or RNP domain Pfam Description: RNA recognition motif.
  misc_feature (1)..(151): NCBI GI NO: 33146923 NR Description: glycine-rich RNA-binding protein-like
  misc_feature (1)..(146): NCBI GI NO: 15237666 NR Description: glycine-rich RNA-binding protein
  misc_feature (8)..(149): NCBI GI NO: 12659074 NR Description: RNA-binding protein [Triticum aestivum]
  misc_feature (8)..(144): NCBI GI NO: 18406831 NR Description: glycine-rich RNA-binding protein, putative
  misc_feature (1)..(148): NCBI GI NO: 40714682 NR Description: putative RNA binding protein
  misc_feature (8)..(151): NCBI GI NO: 15226605 NR Description: glycine-rich RNA-binding protein (AtGRP7)
  misc_feature (1)..(149): NCBI GI NO: 15231557 NR Description: glycine-rich RNA-binding protein
  misc_feature (8)..(151): NCBI GI NO: 1346180 NR Description: Glycine-rich RNA-binding protein GRP1A
  misc_feature (8)..(112): NCBI GI NO: 21553354 NR Description: glycine-rich RNA binding protein 7
  misc_feature (8)..(151): NCBI GI NO: 2674201 NR Description: glycine-rich RNA-binding protein [Euphorbia esula]
MAEEKVGRIFVGGLSWNTTERTLERTFGQYGKVIEAQVVVERETGRSRGFGFVTFSEPRAVDAAIRGMHNGELDGRNISVNKAEPRNSDGYGYGGGGGGGYSSGGRGGYRSGADVVPAASDDCFKCGRPGHWARECPYSDGSGRTGRYSPGS

SEQ ID NO: 40789 - protein, 85 aa, Zea mays subsp. mays
  peptide (1)..(85): Ceres Seq. ID no. 13503120
  misc_feature (1)..(84): NCBI GI NO: 33146923 NR Description: glycine-rich RNA-binding protein-like
  misc_feature (1)..(79): NCBI GI NO: 15237666 NR Description: glycine-rich RNA-binding protein
  misc_feature (1)..(82): NCBI GI NO: 12659074 NR Description: RNA-binding protein [Triticum aestivum]
  misc_feature (1)..(77): NCBI GI NO: 18406831 NR Description: glycine-rich RNA-binding protein, putative
  misc_feature (1)..(81): NCBI GI NO: 40714682 NR Description: putative RNA binding protein
  misc_feature (1)..(84): NCBI GI NO: 15226605 NR Description: glycine-rich RNA-binding protein (AtGRP7)
  misc_feature (1)..(82): NCBI GI NO: 15231557 NR Description: glycine-rich RNA-binding protein
  misc_feature (1)..(84): NCBI GI NO: 1346180 NR Description: Glycine-rich RNA-binding protein GRP1A
  misc_feature (1)..(45): NCBI GI NO: 21553354 NR Description: glycine-rich RNA binding protein 7
  misc_feature (1)..(84): NCBI GI NO: 2674201 NR Description: glycine-rich RNA-binding protein [Euphorbia esula]
MHNGELDGRNISVNKAEPRNSDGYGYGGGGGGGYSSGGRGGYRSGADVVPAASDDCFKCGRPGHWARECPYSDGSGRTGRYSPGS

SEQ ID NO: 40790 - DNA, 1429 bp, Zea mays subsp. mays
  misc_feature (1)..(1429): Ceres Seq. ID no. 12368140
acaaggagtcgctggagttaggaggtgcagttatagcagacgcagagcaatggaggccgccgaggctcctaactatgacagtattgtcaacagggatgagatcaccgacgctgcagctgcagcgttcgccaacccggagcaggtcccggagaagtacgtccggacggaggaggtccttgacggcgtcgtcgtcggcgcggacgagagctacgagctgccggtcgtcgacatggccaggctcctcgacccggagctggcgccgtcggaggtcgccaagctcggcgacgcctgccgaaactggggtttctttcaggtcgtcccgtggcccgcccggattccttcagttctaaacttctagtagccagctgctagtatctgtttagaatcgattaattaatcacatttgtcccgtctgcatgcatgtctacagctgacaaaccatggagtggacgaagcggtggtgcagcggatgaaagacgccacggtgcagttcttcagctccccgctggacagcaaggccaaggtggcggtccgagggaacggcttcgaaggattcgggcaccactacagcagagcgtccagcggcaagctggactgggcagagagcatgattctcatcacgcagccagtcaaggacaggaacatggagatgtggcctacaaatccacccacgttcaggtctgcagtacgcatatcctggcctctctctgtctctactagtcaatcatctgacacgtacgtacgtctcccatgcacgcacgcacgcacggactctgtttgttaatcagggacgcgctcgacgtctactcggtagagatgatcggcctcgcaatgcggctcctggggttcatggcggccgacctcggggtggagccggaggcgctgcaggacgccttcacggggaagcggcagagcatggcggtccaccactacccgccctgccgccagcgggagaaggtgatgggcatcacgccgcacacggacgggctgggcctcacgctgctgctgcacgtggacgacacgcccggcctgcagatccgcaggggcggcaggtggttccccgtgcgcccgctgccgggcgccttcgtcgtcaacgtcgccgacatcctggacgtgctcaccaacggcgcctacgccagcgtcgagcaccgagtgctcccggacgccgagagggctcggaccaccgtcgtcgtgttccaggaggcgtccgtcgggggcctggtggcgccgctgccggggctcctcgaccagcagggcgcgcgcgcgcgctacaggtccattgagatcgaggagtacatcaagggcaacttcaacgcgctggagcaagggacacggttcatccagagcctcaggatatagctatctagttgctccttccatcaaaaaataattacccaacatatcgataaatcaatcaatctcaatcttc

SEQ ID NO: 40791 - protein, 202 aa, Zea mays subsp. mays
  peptide (1)..(202): Ceres Seq. ID no. 12368141
  misc_feature (54)..(150): Pfam Name: II Pfam Description: 2OG-Fe
  misc_feature (13)..(202): NCBI GI NO: 40736992 NR Description: putative oxidoreductase
  misc_feature (13)..(202): NCBI GI NO: 37536820 NR Description: putative ethylene-forming enzyme
  misc_feature (13)..(202): NCBI GI NO: 37536792 NR Description: putative dioxygenase
  misc_feature (13)..(202): NCBI GI NO: 37536796 NR Description: putative dioxygenase
  misc_feature (28)..(202): NCBI GI NO: 37536816 NR Description: putative ethylene-forming enzyme
  misc_feature (8)..(202): NCBI GI NO: 15219988 NR Description: SRG1-like protein; protein id: At1g17020
  misc_feature (13)..(202): NCBI GI NO: 37536802 NR Description: putative ethylene-forming enzyme
  misc_feature (8)..(202): NCBI GI NO: 15219986 NR Description: SRG1-like protein; protein id: At1g17010.1
  misc_feature (8)..(202): NCBI GI NO: 15235014 NR Description: SRG1-like protein; protein id: At4g25300.1
  misc_feature (8)..(202): NCBI GI NO: 26451337 NR Description: SRG1 like protein [Arabidopsis thaliana]
MHARTHGLCLLIRDALDVYSVEMIGLAMRLLGFMAADLGVEPEALQDAFTGKRQSMAVHHYPPCRQREKVMGITPHTDGLGLTLLLHVDDTPGLQIRRGGRWFPVRPLPGAFVVNVADILDVLTNGAYASVEHRVLPDAERARTTVVVFQEASVGGLVAPLPGLLDQQGARARYRSIEIEEYIKGNFNALEQGTRFIQSLRI

SEQ ID NO: 40792 - protein, 180 aa, Zea mays subsp. mays
  peptide (1)..(180): Ceres Seq. ID no. 12368142
  misc_feature (32)..(128): Pfam Name: II Pfam Description: 2OG-Fe
  misc_feature (1)..(180): NCBI GI NO: 40736992 NR Description: putative oxidoreductase
  misc_feature (1)..(180): NCBI GI NO: 37536820 NR Description: putative ethylene-forming enzyme
  misc_feature (1)..(180): NCBI GI NO: 37536792 NR Description: putative dioxygenase
  misc_feature (1)..(180): NCBI GI NO: 37536796 NR Description: putative dioxygenase
  misc_feature (6)..(180): NCBI GI NO: 37536816 NR Description: putative ethylene-forming enzyme
  misc_feature (1)..(180): NCBI GI NO: 15219988 NR Description: SRG1-like protein; protein id: At1g17020
  misc_feature (1)..(180): NCBI GI NO: 37536802 NR Description: putative ethylene-forming enzyme
  misc_feature (1)..(180): NCBI GI NO: 15219986 NR Description: SRG1-like protein; protein id: At1g17010.1
  misc_feature (1)..(180): NCBI GI NO: 15235014 NR Description: SRG1-like protein; protein id: At4g25300.1
  misc_feature (1)..(180): NCBI GI NO: 26451337 NR Description: SRG1 like protein [Arabidopsis thaliana]
MIGLAMRLLGFMAADLGVEPEALQDAFTGKRQSMAVHHYPPCRQREKVMGITPHTDGLGLTLLLHVDDTPGLQIRRGGRWFPVRPLPGAFVVNVADILDVLTNGAYASVEHRVLPDAERARTTVVVFQEASVGGLVAPLPGLLDQQGARARYRSIEIEEYIKGNFNALEQGTRFIQSLRI

SEQ ID NO: 40793 - protein, 175 aa, Zea mays subsp. mays
  peptide (1)..(175): Ceres Seq. ID no. 12368143
  misc_feature (27)..(123): Pfam Name: II Pfam Description: 2OG-Fe
  misc_feature (1)..(175): NCBI GI NO: 40736992 NR Description: putative oxidoreductase
  misc_feature (1)..(175): NCBI GI NO: 37536820 NR Description: putative ethylene-forming enzyme
  misc_feature (1)..(175): NCBI GI NO: 37536792 NR Description: putative dioxygenase
  misc_feature (1)..(175): NCBI GI NO: 37536796 NR Description: putative dioxygenase
  misc_feature (1)..(175): NCBI GI NO: 37536816 NR Description: putative ethylene-forming enzyme
  misc_feature (1)..(175): NCBI GI NO: 15219988 NR Description: SRG1-like protein; protein id: At1g17020
  misc_feature (1)..(175): NCBI GI NO: 37536802 NR Description: putative ethylene-forming enzyme
  misc_feature (1)..(175): NCBI GI NO: 15219986 NR Description: SRG1-like protein; protein id: At1g17010.1
  misc_feature (1)..(175): NCBI GI NO: 15235014 NR Description: SRG1-like protein; protein id: At4g25300.1
  misc_feature (1)..(175): NCBI GI NO: 26451337 NR Description: SRG1 like protein [Arabidopsis thaliana]
MRLLGFMAADLGVEPEALQDAFTGKRQSMAVHHYPPCRQREKVMGITPHTDGLGLTLLLHVDDTPGLQIRRGGRWFPVRPLPGAFVVNVADILDVLTNGAYASVEHRVLPDAERARTTVVVFQEASVGGLVAPLPGLLDQQGARARYRSIEIEEYIKGNFNALEQGTRFIQSLRI

SEQ ID NO: 40794 - DNA, 1221 bp, Zea mays subsp. mays
  misc_feature (1)..(1221): Ceres Seq. ID no. 12420021
  misc_feature (271)..(271): n is a, c, t, g, unknown, or other
  misc_feature (955)..(955): n is a, c, t, g, unknown, or other
  misc_feature (263)..(263): n is a, c, t, g, unknown, or other
  misc_feature (1045)..(1045): n is a, c, t, g, unknown, or other
  misc_feature (937)..(937): n is a, c, t, g, unknown, or other
  misc_feature (912)..(912): n is a, c, t, g, unknown, or other
  misc_feature (344)..(344): n is a, c, t, g, unknown, or other
  misc_feature (325)..(325): n is a, c, t, g, unknown, or other
  misc_feature (235)..(235): n is a, c, t, g, unknown, or other
  misc_feature (553)..(553): n is a, c, t, g, unknown, or other
  misc_feature (197)..(197): n is a, c, t, g, unknown, or other
  misc_feature (951)..(951): n is a, c, t, g, unknown, or other
  misc_feature (194)..(194): n is a, c, t, g, unknown, or other
  misc_feature (326)..(326): n is a, c, t, g, unknown, or other
  misc_feature (933)..(933): n is a, c, t, g, unknown, or other
  misc_feature (1001)..(1001): n is a, c, t, g, unknown, or other
  misc_feature (345)..(345): n is a, c, t, g, unknown, or other
  misc_feature (938)..(938): n is a, c, t, g, unknown, or other
  misc_feature (411)..(411): n is a, c, t, g, unknown, or other
ccaagcagaagagaagagaggcagacaggctcactagtgggagatggtgactactacgatcgaggacctccacggcgacgtgctgggctgcgcgctgcggcggctggacgggcggtcgcttgcggcggccagctgcgccacggtcgcgctccgggcgctggccacggacccggagacgtggcgcgcgctctgcntcnccgagtggccgtcgctggcgctggcgctggcggcgcancgccggctgctcgcggcggtcccgccgnagcggctnttcgccgacgcgcacccgttcccgtccgcggacaccgggggagccggaggtccnnaccccgaccccgtccccnncggggagctggtctccgcggtggacgtcctactacaggggcgcgcccctgctgtcccgcgtggtgnagacgcccgcgtcctcgccgtggttcctcggctcgccgttccgcgtggaggccgtggagcggaagaggccggcctccgccgccgcggtgccctcgccggcggagctcgagctgagctgggtggtcgtggacccggcccgcgnccgcgcggtcaacgtctccagccggcgccccgtggcggtggcccggcactggtacacgggcgagacgctggcgcggttcgccgtggtgctgggagggtgcaagttcgaggccaccgtcgcctgctccgaaggggcggatgggcacgtcagcgaggtcagcctggccgtggaggacgccgacggcgccgccgtcagcggcgagggcacgctgcggctcctcgccgcggcgatggaggccccccggaagggaggggcgcgggagccggaggaggcccggaggcggtacctcgacttcgtgaagcgcaagaaggggaggaaggagagcaaggcgcgccgcgaggcgctcgtggacctgtgcntgctccgctgccagcgccgtngtcnngctcacctgcctngccnctgtcgcgctccggtgaccggcgcctgctgcctgctgcccggacgnacgagcgcgtgtagtgggcactaggcaaggcagctgcacacagnacgtgtcgtaacatctcgggtagcacttgagtattagcgtacaacgtcgggtggcgatcttttctccaacgctctttttctctctctcttcttcttcccggtaacagttaggaacagcacatcatcatgtcctgcactggtgtgcatcgttttcctatcctataacaaacgacgtg

SEQ ID NO: 40795 - protein, 323 aa, Zea mays subsp. mays
  peptide (1)..(323): Ceres Seq. ID no. 12420022
  misc_feature (1)..(121): NCBI GI NO: 32479726 NR Description: OJ991214_12.2
  misc_feature (2)..(115): NCBI GI NO: 15227574 NR Description: hypothetical protein; protein id: At2g36090.1
  misc_feature (5)..(114): NCBI GI NO: 15225867 NR Description: unknown protein; protein id: At2g27310
  misc_feature (139)..(293): NCBI GI NO: 9625624 NR Description: nuclear antigen EBNA1 [Human herpesvirus 4]
  misc_feature (138)..(314): NCBI GI NO: 37535678 NR Description: hypothetical protein
  misc_feature (134)..(323): NCBI GI NO: 34897034 NR Description: hypothetical protein
  misc_feature (139)..(304): NCBI GI NO: 71608 NR Description: myosin heavy chain IB - Acanthamoeba castellanii
  misc_feature (139)..(304): NCBI GI NO: 1171093 NR Description: Myosin heavy chain IB (Myosin heavy chain IL)
  misc_feature (139)..(287): NCBI GI NO: 9625624 NR Description: nuclear antigen EBNA1 [Human herpesvirus 4]
  misc_feature (163)..(308): NCBI GI NO: 35215072 NR Description: hypothetical protein
  misc_feature (51)..(51): Xaa is any aa, unknown or other
  misc_feature (52)..(52): Xaa is any aa, unknown or other
  misc_feature (64)..(64): Xaa is any aa, unknown or other
  misc_feature (74)..(74): Xaa is any aa, unknown or other
  misc_feature (76)..(76): Xaa is any aa, unknown or other
  misc_feature (94)..(94): Xaa is any aa, unknown or other
  misc_feature (95)..(95): Xaa is any aa, unknown or other
  misc_feature (101)..(101): Xaa is any aa, unknown or other
  misc_feature (123)..(123): Xaa is any aa, unknown or other
  misc_feature (170)..(170): Xaa is any aa, unknown or other
  misc_feature (290)..(290): Xaa is any aa, unknown or other
  misc_feature (297)..(297): Xaa is any aa, unknown or other
  misc_feature (298)..(298): Xaa is any aa, unknown or other
  misc_feature (299)..(299): Xaa is any aa, unknown or other
  misc_feature (303)..(303): Xaa is any aa, unknown or other
  misc_feature (304)..(304): Xaa is any aa, unknown or other
  misc_feature (320)..(320): Xaa is any aa, unknown or other
MVTTTIEDLHGDVLGCALRRLDGRSLAAASCATVALRALATDPETWRALCXXEWPSLALALAAXRRLLAAVPPXRXFADAHPFPSADTGGAGGXXPDPVPXGELVSAVDVLLQGRAPAVPRGXDARVLAVVPRLAVPRGGRGAEEAGLRRRGALAGGARAELGGRGPGPXPRGQRLQPAPRGGGPALVHGRDAGAVRRGAGRVQVRGHRRLLRRGGWARQRGQPGRGGRRRRRRQRRGHAAAPRRGDGGPPEGRGAGAGGGPEAVPRLREAQEGEEGEQGAPRGARGPVXAPLPAPXXXSPAXXLSRSGDRRLLPAARTXERV

SEQ ID NO: 40796 - protein, 174 aa, Zea mays subsp. mays
  peptide (1)..(174): Ceres Seq. ID no. 12420023
  misc_feature (22)..(174): NCBI GI NO: 22959992 NR Description: hypothetical protein [Rhodobacter sphaeroides]
  misc_feature (28)..(129): NCBI GI NO: 9625624 NR Description: nuclear antigen EBNA1 [Human herpesvirus 4]
  misc_feature (21)..(174): NCBI GI NO: 23018055 NR Description: hypothetical protein [Thermobifida fusca]
  misc_feature (32)..(129): NCBI GI NO: 9625624 NR Description: nuclear antigen EBNA1 [Human herpesvirus 4]
  misc_feature (28)..(90): NCBI GI NO: 9625624 NR Description: nuclear antigen EBNA1 [Human herpesvirus 4]
  misc_feature (1)..(174): NCBI GI NO: 29247944 NR Description: GLP_26_54603_52153 [Giardia lamblia ATCC 50803]
  misc_feature (65)..(65): Xaa is any aa, unknown or other
  misc_feature (66)..(66): Xaa is any aa, unknown or other
  misc_feature (79)..(79): Xaa is any aa, unknown or other
  misc_feature (88)..(88): Xaa is any aa, unknown or other
  misc_feature (91)..(91): Xaa is any aa, unknown or other
  misc_feature (109)..(109): Xaa is any aa, unknown or other
  misc_feature (115)..(115): Xaa is any aa, unknown or other
  misc_feature (137)..(137): Xaa is any aa, unknown or other
PSRREERQTGSLVGDGDYYDRGPPRRRAGLRAAAAGRAVACGGQLRHGRAPGAGHGPGDVARALXXRVAVAGAGAGGAXPAARGGPAXAAXRRRAPVPVRGHRGSRRSXPRPRPXRGAGLRGGRPTTGARPCCPAWXRRPRPRRGSSARRSAWRPWSGRGRPPPPRCPRRRSSS

SEQ ID NO: 40797 - DNA, 1619 bp, Zea mays subsp. mays
  misc_feature (1)..(1619): Ceres Seq. ID no. 13499381
gcacgagaccattacctagaacatcctaatcgaaaaagtcctcacccattcattcgtccatcccacctaccatggccaccgcctccggcactgacgccggtgcccagccgcgcgacgaccccagcctcctccccttcgcgtccttctcgctcggcctctccatccgcgcgccggccacccccacactcgcctccgtcccctccaccctccacctccccactcaaatctctacactcgccgtctgcctccacccctccgccgcgcagccctcctcccgccgcaccacccgcctcaattccgccacctcctccgtcatcgccccgctgccctcctcaacgcccggcctctcccgctccttcccttcgggcgcgcccgccgcagcagggcgccgccgcacgctcgtctggttccgcgccgacctccgcctccacgaccatgagccgtttcacgccgcagcgggggcgtcgtcctccctcctccccgttttcgtcttcgatccgcgggacttcggcaagtccccctcggggttcgaccggacgggcccgtaccgcgccaacttcctgctcgattcggtcgccgacctgcgccggagcctccgcgcccgcggtggggacctggtggtgcgcgtgggtatgcccgaagtggtcattcccgagctcgcgcgggcggcgggcgcggaggccgtgtacgctcacggggaggtatcgcgggacgaggtccgcgccgaggagagggtgcaaaaggctgtggagaaggagggtatcaacgtgaagtacttctggggtagcacgctataccacgtggaagaccttcccttccgcctcgaggacatgccgtccaactatggcggcttcagggaggccgtgaaggggttggaggtcagaaaggtgctggaggctcccgaggaggtcaagtgcgtgcccatgaagaatgtgctcgagcccggtgacatccccacgcttgctgagctcgggctcactgcgccaccagccatgtcacaggactcaaaacctgctgttggctctactctcattggtggtgagacagaagctctggagaggttgaagaagtttgctgcagaatgctctatgcagccaaacaaagtagacaaaagcaatacccaagatagcatatatggtgctaatttctcttgcaaaatttctccatggcttgctacaggttgcctctctccacggttcatgtatgaggagttgaagaagcatgctactaaagcaattccttttgggtcaacacccaagaataatgatggcacatctgatgctggaacaaattggttaatgtttgagttgctgtggagagatttcttcaggttcatcacaaagaagtacagctctgtacagaagacatctgaagttgccactggctgcactcccgccccagcgcttgcatgaacttacttagacaagctgattgccagctgcttttttggggtgataaacttatgtgcattttcaatggagtcttttttgccgccaataatgttggtagtcaaagtgaacgccgaatgcgcattcctgcgttttggtttggtcgatgtatttaatgctgtcgacatccctccaaatgactgttgaatgcaaatgatactgtgagcaacc

SEQ ID NO: 40798 - protein, 446 aa, Zea mays subsp. mays
  peptide (1)..(446): Ceres Seq. ID no. 13499382
  misc_feature (107)..(284): Pfam Name: Pfam Description:  DNA photolyase
  misc_feature (18)..(442): NCBI GI NO: 21592984 NR Description: photolyase/blue-light receptor PHR2
  misc_feature (18)..(442): NCBI GI NO: 15226633 NR Description: photolyase/blue-light receptor (PHR2)
  misc_feature (107)..(394): NCBI GI NO: 37520404 NR Description: probable bacterial cryptochrome
  misc_feature (110)..(394): NCBI GI NO: 23040111 NR Description: hypothetical protein
  misc_feature (110)..(394): NCBI GI NO: 28374085 NR Description: Chain A
  misc_feature (107)..(387): NCBI GI NO: 23135973 NR Description: hypothetical protein [Cytophaga hutchinsonii]
  misc_feature (95)..(394): NCBI GI NO: 22327046 NR Description: DNA photolyase - like protein
  misc_feature (95)..(394): NCBI GI NO: 28971609 NR Description: cryptochrome dash [Arabidopsis thaliana]
  misc_feature (138)..(394): NCBI GI NO: 16330358 NR Description: DNA photolyase [Synechocystis sp. PCC 6803]
  misc_feature (237)..(295): NCBI GI NO: 11991490 NR Description: putative lectin [Hordeum vulgare subsp. vulgare]
MATASGTDAGAQPRDDPSLLPFASFSLGLSIRAPATPTLASVPSTLHLPTQISTLAVCLHPSAAQPSSRRTTRLNSATSSVIAPLPSSTPGLSRSFPSGAPAAAGRRRTLVWFRADLRLHDHEPFHAAAGASSSLLPVFVFDPRDFGKSPSGFDRTGPYRANFLLDSVADLRRSLRARGGDLVVRVGMPEVVIPELARAAGAEAVYAHGEVSRDEVRAEERVQKAVEKEGINVKYFWGSTLYHVEDLPFRLEDMPSNYGGFREAVKGLEVRKVLEAPEEVKCVPMKNVLEPGDIPTLAELGLTAPPAMSQDSKPAVGSTLIGGETEALERLKKFAAECSMQPNKVDKSNTQDSIYGANFSCKISPWLATGCLSPRFMYEELKKHATKAIPFGSTPKNNDGTSDAGTNWLMFELLWRDFFRFITKKYSSVQKTSEVATGCTPAPALA

SEQ ID NO: 40799 - protein, 259 aa, Zea mays subsp. mays
  peptide (1)..(259): Ceres Seq. ID no. 13499383
  misc_feature (1)..(97): Pfam Name: Pfam Description:  DNA photolyase
  misc_feature (1)..(255): NCBI GI NO: 21592984 NR Description: photolyase/blue-light receptor PHR2
  misc_feature (1)..(255): NCBI GI NO: 15226633 NR Description: photolyase/blue-light receptor (PHR2)
  misc_feature (1)..(207): NCBI GI NO: 37520404 NR Description: probable bacterial cryptochrome
  misc_feature (1)..(207): NCBI GI NO: 23040111 NR Description: hypothetical protein
  misc_feature (1)..(207): NCBI GI NO: 28374085 NR Description: Chain A
  misc_feature (1)..(200): NCBI GI NO: 23135973 NR Description: hypothetical protein [Cytophaga hutchinsonii]
  misc_feature (1)..(207): NCBI GI NO: 22327046 NR Description: DNA photolyase - like protein
  misc_feature (1)..(207): NCBI GI NO: 28971609 NR Description: cryptochrome dash [Arabidopsis thaliana]
  misc_feature (1)..(207): NCBI GI NO: 16330358 NR Description: DNA photolyase [Synechocystis sp. PCC 6803]
  misc_feature (50)..(108): NCBI GI NO: 11991490 NR Description: putative lectin [Hordeum vulgare subsp. vulgare]
MPEVVIPELARAAGAEAVYAHGEVSRDEVRAEERVQKAVEKEGINVKYFWGSTLYHVEDLPFRLEDMPSNYGGFREAVKGLEVRKVLEAPEEVKCVPMKNVLEPGDIPTLAELGLTAPPAMSQDSKPAVGSTLIGGETEALERLKKFAAECSMQPNKVDKSNTQDSIYGANFSCKISPWLATGCLSPRFMYEELKKHATKAIPFGSTPKNNDGTSDAGTNWLMFELLWRDFFRFITKKYSSVQKTSEVATGCTPAPALA

SEQ ID NO: 40800 - protein, 256 aa, Zea mays subsp. mays
  peptide (1)..(256): Ceres Seq. ID no. 13499384
  misc_feature (9)..(184): Pfam Name: Pfam Description:  Formin Homology 2 Domain
  misc_feature (11)..(201): NCBI GI NO: 2429362 NR Description: proline rich protein [Santalum album]
  misc_feature (14)..(161): NCBI GI NO: 81286 NR Description: extensin - Volvox carteri (fragment)
  misc_feature (9)..(202): NCBI GI NO: 20138131 NR Description: Vegetative cell wall protein gp1 precursor
  misc_feature (9)..(204): NCBI GI NO: 27375632 NR Description: blr0521 [Bradyrhizobium japonicum]
  misc_feature (9)..(177): NCBI GI NO: 81286 NR Description: extensin - Volvox carteri (fragment)
  misc_feature (13)..(204): NCBI GI NO: 27375632 NR Description: blr0521 [Bradyrhizobium japonicum]
  misc_feature (9)..(221): NCBI GI NO: 23017082 NR Description: hypothetical protein [Thermobifida fusca]
  misc_feature (9)..(202): NCBI GI NO: 15230108 NR Description: protein kinase -related [Arabidopsis thaliana]
  misc_feature (11)..(174): NCBI GI NO: 14253159 NR Description: VMP3 protein [Volvox carteri f. nagariensis]
  misc_feature (9)..(230): NCBI GI NO: 10438473 NR Description: unnamed protein product [Homo sapiens]
ARDHYLEHPNRKSPHPFIRPSHLPWPPPPALTPVPSRATTPASSPSRPSRSASPSARRPPPHSPPSPPPSTSPLKSLHSPSASTPPPRSPPPAAPPASIPPPPPSSPRCPPQRPASPAPSLRARPPQQGAAARSSGSAPTSASTTMSRFTPQRGRRPPSSPFSSSIRGTSASPPRGSTGRARTAPTSCSIRSPTCAGASAPAVGTWWCAWVCPKWSFPSSRGRRARRPCTLTGRYRGTRSAPRRGCKRLWRRRVST

SEQ ID NO: 40801 - DNA, 1061 bp, Zea mays subsp. mays
  misc_feature (1)..(1061): Ceres Seq. ID no. 12363664
gcacgagaccattacctagaacatcctaatcgaaaaaatcatccatcgctgcgacctcggaaccaacctttccgccactctctctcgcgacaccgaccgacgcgacgacgtcgcactcgcacagccaccaccaccccaccatggcggcaccgaggctggagcgcggcgggttccagctcccgaacaccgagcaggagaactccctcttcctccgcgcgctcatctccgtcgtgtccggggacaccgccgcgttgctcccggaagcggcggccgtagaggctcccgcggcccccgtggcgtgcgccaggtgcggcgcggacgggtgcgcggcggccggctgctgcgagctcgtcgccgggtcgagcagcgacagcgacggcggcctagggctagccgcgggcaagcggagagggagggggaggaaggtgatccagtacaggggcgtgcggcggcggccgtggggcaagtgggcggcggagatccgcgacccgcgccgcgccgcgcgcaagtggctcggcacgttcgacaccgccgaggacgccgcgcgcgcctacgacgtcgccgcggtcgagctccggggccagcgagccaagctcaacttcccagcgcagcctccgcaccaccgtccattgcccgatcagcagagcctccgcgagaacagcggatccaacgccgcgtcgccggtgcacgtggcgctggcgccgaccacgcagcaggacatctgggagggtttgaacgagatcatgatgatggaggaggaacgcagcttctggtctatgcgatgatcctgcctgcaccttcgcccatgcatccatctccgtatcttctcttgtttaatgcttttattctatcctactctatttcatgattattagagtccattgattgccttttagggaagggattccatacgatctccatctgaaaagagaacacttattagcttcacaagattgcttggcatgcagacgtacgtaaagtgagtttaggaagcaatggtgccaccagccgactgtactgtaaatcactgtttctgtaactcgttagtcaccatcgctttc

SEQ ID NO: 40802 - protein, 214 aa, Zea mays subsp. mays
  peptide (1)..(214): Ceres Seq. ID no. 12363665
  misc_feature (98)..(157): Pfam Name: Pfam Description:  AP2 domain
  misc_feature (36)..(155): NCBI GI NO: 38347164 NR Description: OSJNBa0039C07.10
  misc_feature (87)..(171): NCBI GI NO: 2467088 NR Description: putative Ckc2 [Arabidopsis thaliana]
  misc_feature (47)..(191): NCBI GI NO: 14140155 NR Description: putative AP2 domain transcription factor
  misc_feature (87)..(206): NCBI GI NO: 15235365 NR Description: putative protein; protein id: At4g34410
  misc_feature (85)..(199): NCBI GI NO: 34897546 NR Description: OSJNBa0042L16.10
  misc_feature (87)..(166): NCBI GI NO: 15228312 NR Description: AP2 domain protein RAP2
  misc_feature (81)..(207): NCBI GI NO: 2281649 NR Description: AP2 domain containing protein RAP2.12
  misc_feature (81)..(207): NCBI GI NO: 21593779 NR Description: AP2 domain containing protein, putative
  misc_feature (81)..(207): NCBI GI NO: 15220971 NR Description: AP2 domain protein RAP2
  misc_feature (87)..(166): NCBI GI NO: 629508 NR Description: cadmium-induced protein - Arabidopsis thaliana
MAAPRLERGGFQLPNTEQENSLFLRALISVVSGDTAALLPEAAAVEAPAAPVACARCGADGCAAAGCCELVAGSSSDSDGGLGLAAGKRRGRGRKVIQYRGVRRRPWGKWAAEIRDPRRAARKWLGTFDTAEDAARAYDVAAVELRGQRAKLNFPAQPPHHRPLPDQQSLRENSGSNAASPVHVALAPTTQQDIWEGLNEIMMMEEERSFWSMR

SEQ ID NO: 40803 - DNA, 1567 bp, Zea mays subsp. mays
  misc_feature (1)..(1567): Ceres Seq. ID no. 12383380
gcacgagaccattacctagaacatcctaatcgaaaaaccattcgattgggcaactcgtcaccgtaccaaccaaaccatcattccagccgcggcgggacacaccgcctcctccgaactaacgcgacgacgacgcacggcggcctcgtccggcaccggcaggagcgcgatggggcagaagcgcgccttgctggtgggcatcaactacctgggcacggacggggagctgaagggatgcctcaacgacgtggcccgcatgcgccgctgcctggtgggccgcttcgggttcgacgaggccgacatccgtgtcctggccgacgccgacccgtccacgccgccgcccactggggccaacatccggctggagctcgagcggctcgtggcgggcgcgcgccccggggacgcgctcttcttccactacagcggccacggcctgcagctccccgccgagactggggaggacgacgacaccgggtacgacgagtgcatcgtgccatgcgacctcaacttgatcaaagaccaagatttcacggatctcgtggccaaggtccctgacggctgccgcttcaccatggtctcggactcgtgccacagcggcggcctgatcgacaagaccaaggagcaaatcgggaacagcaccaagcagaacagaacccagcagcgccgagagcgcgaaatgaagcctcctcctcccgctcccggttccgcactccgcgtctccctcgcgcgaatcgtccgtggcgtgctggagtctctggggtgcatccactgcagtcgttgccgtgtccagcagcagggcaacagcaatagcagcagcatcagcaaccggtcgctgccgctgtcgacgttcatccagatgctcagggacaagaccggaaggcacgacgtcggcgtgggctccatccgcacgacgctgttccaccacttcggcgacgaggcgagccccaaggtcaagaggttcatgaaggccatgctgttaggcaagctccggcacgacggcaaggaagcggaggagcagtcgcgcgttcccagggaggcagaggtggaggagaccctggcgcaggacgcgcacagcgtcgaggaagtgtacgcggggccggctgcggcggcggcggcggccagggtgccgccgcgcaacggcgtcctgatcagcgggtgccagacggacgagacctcggcggacgcgaccacggccgacggcatgtcctacggcgcgctgagcaacgtgatccagaccatcctcgccggggacggcaagaagcgcggcgtggcgctggcggtgacgaaccgagagctggtggtccgggcgcgggagctgctgtccaggcaggggtacacgcagcagcccgggctctactgcagcgacgagcacgccacgctgcccttcatctgctgaagacgaaataaactccgtgtacagtgaatttcaggcttcattagttcattttacgggatgctacgttgtgttgtgtgtgtaacagaattgacactttgtgttgactcgtggtgtgccgcagcctgcgtatgttatggtgttactgttacgttgttacctgatgacgttgacctt

SEQ ID NO: 40804 - protein, 408 aa, Zea mays subsp. mays
  peptide (1)..(408): Ceres Seq. ID no. 12383381
  misc_feature (4)..(408): Pfam Name: Pfam Description:  Caspase domain
  misc_feature (1)..(408): NCBI GI NO: 34908928 NR Description: putative latex-abundant protein
  misc_feature (2)..(408): NCBI GI NO: 29367583 NR Description: latex-abundant protein-like protein
  misc_feature (4)..(408): NCBI GI NO: 4235430 NR Description: latex-abundant protein [Hevea brasiliensis]
  misc_feature (4)..(408): NCBI GI NO: 40644374 NR Description: metacaspase type II [Picea abies]
  misc_feature (9)..(408): NCBI GI NO: 23343885 NR Description: metacaspase 1 [Lycopersicon esculentum]
  misc_feature (206)..(408): NCBI GI NO: 15219340 NR Description: hypothetical protein common family
  misc_feature (4)..(161): NCBI GI NO: 15219340 NR Description: hypothetical protein common family
  misc_feature (4)..(408): NCBI GI NO: 32482818 NR Description: metacaspase 4 [Arabidopsis thaliana]
  misc_feature (4)..(408): NCBI GI NO: 37788557 NR Description: metacaspase 7 [Arabidopsis thaliana]
  misc_feature (4)..(408): NCBI GI NO: 15219342 NR Description: hypothetical protein common family
MGQKRALLVGINYLGTDGELKGCLNDVARMRRCLVGRFGFDEADIRVLADADPSTPPPTGANIRLELERLVAGARPGDALFFHYSGHGLQLPAETGEDDDTGYDECIVPCDLNLIKDQDFTDLVAKVPDGCRFTMVSDSCHSGGLIDKTKEQIGNSTKQNRTQQRREREMKPPPPAPGSALRVSLARIVRGVLESLGCIHCSRCRVQQQGNSNSSSISNRSLPLSTFIQMLRDKTGRHDVGVGSIRTTLFHHFGDEASPKVKRFMKAMLLGKLRHDGKEAEEQSRVPREAEVEETLAQDAHSVEEVYAGPAAAAAAARVPPRNGVLISGCQTDETSADATTADGMSYGALSNVIQTILAGDGKKRGVALAVTNRELVVRARELLSRQGYTQQPGLYCSDEHATLPFIC

SEQ ID NO: 40805 - protein, 379 aa, Zea mays subsp. mays
  peptide (1)..(379): Ceres Seq. ID no. 12383382
  misc_feature (1)..(379): Pfam Name: Pfam Description:  Caspase domain
  misc_feature (1)..(379): NCBI GI NO: 34908928 NR Description: putative latex-abundant protein
  misc_feature (1)..(379): NCBI GI NO: 29367583 NR Description: latex-abundant protein-like protein
  misc_feature (1)..(379): NCBI GI NO: 4235430 NR Description: latex-abundant protein [Hevea brasiliensis]
  misc_feature (1)..(379): NCBI GI NO: 40644374 NR Description: metacaspase type II [Picea abies]
  misc_feature (1)..(379): NCBI GI NO: 23343885 NR Description: metacaspase 1 [Lycopersicon esculentum]
  misc_feature (177)..(379): NCBI GI NO: 15219340 NR Description: hypothetical protein common family
  misc_feature (1)..(132): NCBI GI NO: 15219340 NR Description: hypothetical protein common family
  misc_feature (1)..(379): NCBI GI NO: 32482818 NR Description: metacaspase 4 [Arabidopsis thaliana]
  misc_feature (1)..(379): NCBI GI NO: 37788557 NR Description: metacaspase 7 [Arabidopsis thaliana]
  misc_feature (1)..(379): NCBI GI NO: 15219342 NR Description: hypothetical protein common family
MRRCLVGRFGFDEADIRVLADADPSTPPPTGANIRLELERLVAGARPGDALFFHYSGHGLQLPAETGEDDDTGYDECIVPCDLNLIKDQDFTDLVAKVPDGCRFTMVSDSCHSGGLIDKTKEQIGNSTKQNRTQQRREREMKPPPPAPGSALRVSLARIVRGVLESLGCIHCSRCRVQQQGNSNSSSISNRSLPLSTFIQMLRDKTGRHDVGVGSIRTTLFHHFGDEASPKVKRFMKAMLLGKLRHDGKEAEEQSRVPREAEVEETLAQDAHSVEEVYAGPAAAAAAARVPPRNGVLISGCQTDETSADATTADGMSYGALSNVIQTILAGDGKKRGVALAVTNRELVVRARELLSRQGYTQQPGLYCSDEHATLPFIC

SEQ ID NO: 40806 - protein, 274 aa, Zea mays subsp. mays
  peptide (1)..(274): Ceres Seq. ID no. 12383383
  misc_feature (1)..(274): Pfam Name: Pfam Description:  Caspase domain
  misc_feature (1)..(274): NCBI GI NO: 34908928 NR Description: putative latex-abundant protein
  misc_feature (1)..(274): NCBI GI NO: 29367583 NR Description: latex-abundant protein-like protein
  misc_feature (1)..(274): NCBI GI NO: 4235430 NR Description: latex-abundant protein [Hevea brasiliensis]
  misc_feature (1)..(274): NCBI GI NO: 40644374 NR Description: metacaspase type II [Picea abies]
  misc_feature (1)..(274): NCBI GI NO: 23343885 NR Description: metacaspase 1 [Lycopersicon esculentum]
  misc_feature (72)..(274): NCBI GI NO: 15219340 NR Description: hypothetical protein common family
  misc_feature (1)..(27): NCBI GI NO: 15219340 NR Description: hypothetical protein common family
  misc_feature (1)..(274): NCBI GI NO: 32482818 NR Description: metacaspase 4 [Arabidopsis thaliana]
  misc_feature (1)..(274): NCBI GI NO: 37788557 NR Description: metacaspase 7 [Arabidopsis thaliana]
  misc_feature (1)..(274): NCBI GI NO: 15219342 NR Description: hypothetical protein common family
MVSDSCHSGGLIDKTKEQIGNSTKQNRTQQRREREMKPPPPAPGSALRVSLARIVRGVLESLGCIHCSRCRVQQQGNSNSSSISNRSLPLSTFIQMLRDKTGRHDVGVGSIRTTLFHHFGDEASPKVKRFMKAMLLGKLRHDGKEAEEQSRVPREAEVEETLAQDAHSVEEVYAGPAAAAAAARVPPRNGVLISGCQTDETSADATTADGMSYGALSNVIQTILAGDGKKRGVALAVTNRELVVRARELLSRQGYTQQPGLYCSDEHATLPFIC

SEQ ID NO: 40807 - DNA, 842 bp, Zea mays subsp. mays
  misc_feature (1)..(842): Ceres Seq. ID no. 12378544
  misc_feature (586)..(586): n is a, c, t, g, unknown, or other
tacactagatataggaggcggtgcagagtccttaagatggcttgtttggccaatgatagatgataagtcaaaggtgactctagctgtcgaatgccctcgtgttactgtcaacccacagccatcgctgttcgacctctccggatattccaaagtcccaatagaagcattgtcaagcgtaccactggaccattctgtggttgaggacattgatcccaaaacatgggctgtttctgctgctcctccaagagctgttgctccagcgaatccaaatgttccaagtgctccgcctgaaataccgatggcagaaaggttcaggctggcctatgtggagagggaagcgaggctggcacccaagagggccaagcgggaaaggcagcggcgtcggcgcgctgagagggactacatgatggttgacatcgacgcaaggtcggtcgcacttgctgctcaagcaagcaggaacctgcgcaagagctgattgtttcttgtctacgctatttgtggagactcgagagtagagaatcatgaggcaagaaatgctgttcaatccttctactttcaaggcaaagatagcatacatatatggacncagtattgtatagttgtattggcagtagcggtagcgtttacactgccatgtactagtaatagaaaaaaatctgagtgggaataacagggaaggcgtgccttatcaaatcacaaatgggttgccacgaggatttgtgaacatgctcgtccagatttctttgaatctggatggtgcgattatgtgaggttcctcacgcaatttgttaaatctgaacaagattcgtgtgaactgttgtatacataattttttttcttgc

SEQ ID NO: 40808 - protein, 157 aa, Zea mays subsp. mays
  peptide (1)..(157): Ceres Seq. ID no. 12378545
  misc_feature (1)..(157): NCBI GI NO: 7485340 NR Description: hypothetical protein F10M23
  misc_feature (1)..(157): NCBI GI NO: 30687441 NR Description: expressed protein [Arabidopsis thaliana]
TLDIGGGAESLRWLVWPMIDDKSKVTLAVECPRVTVNPQPSLFDLSGYSKVPIEALSSVPLDHSVVEDIDPKTWAVSAAPPRAVAPANPNVPSAPPEIPMAERFRLAYVEREARLAPKRAKRERQRRRRAERDYMMVDIDARSVALAAQASRNLRKS

SEQ ID NO: 40809 - protein, 140 aa, Zea mays subsp. mays
  peptide (1)..(140): Ceres Seq. ID no. 12378546
  misc_feature (1)..(140): NCBI GI NO: 7485340 NR Description: hypothetical protein F10M23
  misc_feature (1)..(140): NCBI GI NO: 30687441 NR Description: expressed protein [Arabidopsis thaliana]
MIDDKSKVTLAVECPRVTVNPQPSLFDLSGYSKVPIEALSSVPLDHSVVEDIDPKTWAVSAAPPRAVAPANPNVPSAPPEIPMAERFRLAYVEREARLAPKRAKRERQRRRRAERDYMMVDIDARSVALAAQASRNLRKS

SEQ ID NO: 40810 - DNA, 1883 bp, Zea mays subsp. mays
  misc_feature (1)..(1883): Ceres Seq. ID no. 12359147
aaaaaggagctagcactagccaggaaacacacagagagacgaaataagcagcgaggcaatgggcaacctgcttcaccaggaaatacgacgagcacgagcacgagataccaatcaccacggacccgccgcggcggacgtcgatgccggtgtaccggccgccccggccccgcgatgacaaggcgcaggaggtgccgctatactcgggctcggaccgccggccgtcctaccgtccgccgcggcttccggtcttcccgtcgggcccgggatcgacgggccggcggcggccgcccaccggccagacgggcacggtcctggaccggcacacggtggacgtgcggacgctgttccacctggagcggaagctggggagcgggcagttcggcaccacgtacctgtgcacggagcgcgcgacggggaagaagtacgcgtgcaagtcggtgtccaagcgcaagctggtgcggcgcgccgacatcgcggacatgcgccgggagatcaccatcctgcagcacctcagcggccagcccaacgtggcggagttcaagggcgcgttcgaggaccgcgacgacgtgcacgtcgtcatggagctctgctccggcggcgagctcttcgaccgcatcaccgccaaggggagctactccgagcgccaggccgccgccgtgtgccgcgacgtcctcaccgtcgtcaacgtctgccacttcatgggggtcatgcaccgcgacctcaagcccgagaacttcctgctcgccagccccgccgacgacgcgccgctcaaggccatcgacttcggcctgtccgtcttcatcgaagaaggcaaagtttacaaggacgtggtggggagcgcgtactacgtggcgcccgaggtgttgcgccggaactacggcagggagatcgacgtctggagtgctggcgtgatcctatacatccttctatgcgggtcgccgcctttctgggaagaaacgcagaaaggcatatttgacgcaatattggccgacgagctcgatctggtctcctccccgtggccctccatatctgaaagcgcgaaggatctcattagaaaaatgctgaacaaggaccctcagaggcgcattacggcttcacaggccctagaacatccatggctcaaaggtggtgcacctgacaggcctatcgacagcgcggtcctgtcaagaatgaagcagttcaaggcgatgaacaagctaaagcaacttgcactgaaggtaatcgcagagaacctaacagaggacgagatcaaggggctgaagcagatgttcaacaacatggatacagacaggagcggcacgatcacggtcgaggaactcaaggacgggctggcgaagctcgggtccaagattagcgaagcggaggttcagaagcttatggaagcagttgacgtggacaagagtggcagcattgactacaccgagttcctcactgccatgatgaacaggcataaactggagaaggaggaggatttgttccttgcttttcaacacttcgacaaagacgatagcgggtacataacaagagacgaactggaacaagccatggcggagtatggggtgggtgatgaagcaagcattaaggaagtgctggacgaagttgataaagacaaggatgggagaatcgactacgaagagtttgtagaaatgatgaggaagggaagttatacctgaggaagctctgttctcatggtgggagaggttgtgtatatatgtttcagcaaatgtgtcaagtacaagcaacgaagcaagtttaacttagaacaagttgcttctgcagctatggtccgaggcaagcatgtacagctatttatttattgaccgaatatgcaacgagagagaaaatgtccagtttacttgaaagaaaagttcagagttcgtgct

SEQ ID NO: 40811 - protein, 510 aa, Zea mays subsp. mays
  peptide (1)..(510): Ceres Seq. ID no. 12359148
  misc_feature (69)..(327): Pfam Name: Pfam Description:  Protein kinase domain
  misc_feature (13)..(507): NCBI GI NO: 7428011 NR Description: calcium-dependent protein kinase (EC 2
  misc_feature (14)..(507): NCBI GI NO: 23616997 NR Description: CDP2_ORYSA Calcium-dependent protein kinase
  misc_feature (14)..(507): NCBI GI NO: 1705734 NR Description: Calcium-dependent protein kinase, isoform 2
  misc_feature (1)..(508): NCBI GI NO: 19171502 NR Description: calcium-dependent protein kinase
  misc_feature (49)..(507): NCBI GI NO: 1345719 NR Description: Calcium-dependent protein kinase 2 (CDPK 2)
  misc_feature (7)..(508): NCBI GI NO: 15231140 NR Description: calmodulin-domain protein kinase CDPK isoform 9
  misc_feature (2)..(508): NCBI GI NO: 7428009 NR Description: calcium-dependent protein kinase (EC 2
  misc_feature (50)..(508): NCBI GI NO: 10568116 NR Description: calcium-dependent protein kinase
  misc_feature (31)..(508): NCBI GI NO: 7434371 NR Description: calcium-dependent protein kinase (EC 2
  misc_feature (43)..(508): NCBI GI NO: 15223629 NR Description: calcium-dependent protein kinase
MPVYRPPRPRDDKAQEVPLYSGSDRRPSYRPPRLPVFPSGPGSTGRRRPPTGQTGTVLDRHTVDVRTLFHLERKLGSGQFGTTYLCTERATGKKYACKSVSKRKLVRRADIADMRREITILQHLSGQPNVAEFKGAFEDRDDVHVVMELCSGGELFDRITAKGSYSERQAAAVCRDVLTVVNVCHFMGVMHRDLKPENFLLASPADDAPLKAIDFGLSVFIEEGKVYKDVVGSAYYVAPEVLRRNYGREIDVWSAGVILYILLCGSPPFWEETQKGIFDAILADELDLVSSPWPSISESAKDLIRKMLNKDPQRRITASQALEHPWLKGGAPDRPIDSAVLSRMKQFKAMNKLKQLALKVIAENLTEDEIKGLKQMFNNMDTDRSGTITVEELKDGLAKLGSKISEAEVQKLMEAVDVDKSGSIDYTEFLTAMMNRHKLEKEEDLFLAFQHFDKDDSGYITRDELEQAMAEYGVGDEASIKEVLDEVDKDKDGRIDYEEFVEMMRKGSYT

SEQ ID NO: 40812 - protein, 397 aa, Zea mays subsp. mays
  peptide (1)..(397): Ceres Seq. ID no. 12359149
  misc_feature (1)..(214): Pfam Name: Pfam Description:  Protein kinase domain
  misc_feature (1)..(394): NCBI GI NO: 7428011 NR Description: calcium-dependent protein kinase (EC 2
  misc_feature (1)..(394): NCBI GI NO: 23616997 NR Description: CDP2_ORYSA Calcium-dependent protein kinase
  misc_feature (1)..(394): NCBI GI NO: 1705734 NR Description: Calcium-dependent protein kinase, isoform 2
  misc_feature (1)..(395): NCBI GI NO: 19171502 NR Description: calcium-dependent protein kinase
  misc_feature (1)..(394): NCBI GI NO: 1345719 NR Description: Calcium-dependent protein kinase 2 (CDPK 2)
  misc_feature (1)..(395): NCBI GI NO: 15231140 NR Description: calmodulin-domain protein kinase CDPK isoform 9
  misc_feature (1)..(395): NCBI GI NO: 7428009 NR Description: calcium-dependent protein kinase (EC 2
  misc_feature (1)..(395): NCBI GI NO: 10568116 NR Description: calcium-dependent protein kinase
  misc_feature (1)..(395): NCBI GI NO: 7434371 NR Description: calcium-dependent protein kinase (EC 2
  misc_feature (1)..(395): NCBI GI NO: 15223629 NR Description: calcium-dependent protein kinase
MRREITILQHLSGQPNVAEFKGAFEDRDDVHVVMELCSGGELFDRITAKGSYSERQAAAVCRDVLTVVNVCHFMGVMHRDLKPENFLLASPADDAPLKAIDFGLSVFIEEGKVYKDVVGSAYYVAPEVLRRNYGREIDVWSAGVILYILLCGSPPFWEETQKGIFDAILADELDLVSSPWPSISESAKDLIRKMLNKDPQRRITASQALEHPWLKGGAPDRPIDSAVLSRMKQFKAMNKLKQLALKVIAENLTEDEIKGLKQMFNNMDTDRSGTITVEELKDGLAKLGSKISEAEVQKLMEAVDVDKSGSIDYTEFLTAMMNRHKLEKEEDLFLAFQHFDKDDSGYITRDELEQAMAEYGVGDEASIKEVLDEVDKDKDGRIDYEEFVEMMRKGSYT

SEQ ID NO: 40813 - protein, 364 aa, Zea mays subsp. mays
  peptide (1)..(364): Ceres Seq. ID no. 12359150
  misc_feature (1)..(181): Pfam Name: Pfam Description:  Protein kinase domain
  misc_feature (1)..(361): NCBI GI NO: 7428011 NR Description: calcium-dependent protein kinase (EC 2
  misc_feature (1)..(361): NCBI GI NO: 23616997 NR Description: CDP2_ORYSA Calcium-dependent protein kinase
  misc_feature (1)..(361): NCBI GI NO: 1705734 NR Description: Calcium-dependent protein kinase, isoform 2
  misc_feature (1)..(362): NCBI GI NO: 19171502 NR Description: calcium-dependent protein kinase
  misc_feature (1)..(361): NCBI GI NO: 1345719 NR Description: Calcium-dependent protein kinase 2 (CDPK 2)
  misc_feature (1)..(362): NCBI GI NO: 15231140 NR Description: calmodulin-domain protein kinase CDPK isoform 9
  misc_feature (1)..(362): NCBI GI NO: 7428009 NR Description: calcium-dependent protein kinase (EC 2
  misc_feature (1)..(362): NCBI GI NO: 10568116 NR Description: calcium-dependent protein kinase
  misc_feature (1)..(362): NCBI GI NO: 7434371 NR Description: calcium-dependent protein kinase (EC 2
  misc_feature (1)..(362): NCBI GI NO: 15223629 NR Description: calcium-dependent protein kinase
MELCSGGELFDRITAKGSYSERQAAAVCRDVLTVVNVCHFMGVMHRDLKPENFLLASPADDAPLKAIDFGLSVFIEEGKVYKDVVGSAYYVAPEVLRRNYGREIDVWSAGVILYILLCGSPPFWEETQKGIFDAILADELDLVSSPWPSISESAKDLIRKMLNKDPQRRITASQALEHPWLKGGAPDRPIDSAVLSRMKQFKAMNKLKQLALKVIAENLTEDEIKGLKQMFNNMDTDRSGTITVEELKDGLAKLGSKISEAEVQKLMEAVDVDKSGSIDYTEFLTAMMNRHKLEKEEDLFLAFQHFDKDDSGYITRDELEQAMAEYGVGDEASIKEVLDEVDKDKDGRIDYEEFVEMMRKGSYT

SEQ ID NO: 40814 - DNA, 474 bp, Zea mays subsp. mays
  misc_feature (1)..(474): Ceres Seq. ID no. 4615167
  misc_feature (277)..(277): n is a, c, t, g, unknown, or other
agcagagtccaggtgcgtcmgcaggagtcaggactctcaactccggcgaagggagcagaaccgtttgtggcagttgggcggcgtcggcatggacgaggctacgaagaaggtggaggctacggtgctggagatcccgcgaggtctgatatggagtccgtaacggagaacaaggaggaggcgaaggcggcggaggagggcgacgctggcagggagagcaaggacaaggaacggaaggaagatgaggaggaggatgaaggtaagggtggcgggaagaganaktacggcgaccaaggggaccttatcctgtgccgcctgtcgagcaagaggagggtgactctgtcggagttcaagggcaggtcgctggtgtccatccgagagttctacgtgaaggacggcaaggagatgccctccgccaaaggtattagtatgacaatggagcagtgggaagcattttcaatgctgcacctgcgatag

SEQ ID NO: 40815 - protein, 157 aa, Zea mays subsp. mays
  peptide (1)..(157): Ceres Seq. ID no. 4615168
  misc_feature (74)..(151): Pfam Name: PC4 Pfam Description: Transcriptional Coactivator p15
  misc_feature (50)..(151): NCBI GI NO: 34910378 NR Description: P0684B02.23
  misc_feature (70)..(151): NCBI GI NO: 13699910 NR Description: putative transcriptional coactivator
  misc_feature (67)..(151): NCBI GI NO: 15236980 NR Description: putative protein; protein id: At4g10920
  misc_feature (73)..(148): NCBI GI NO: 15242365 NR Description: putative transcriptional co-activator
  misc_feature (92)..(154): NCBI GI NO: 40739125 NR Description: hypothetical protein AN5806.2
  misc_feature (48)..(151): NCBI GI NO: 16610191 NR Description: PBF68 protein [Nicotiana tabacum]
  misc_feature (55)..(148): NCBI GI NO: 17542398 NR Description: Transcriptional Coactivator p15 (PC4) (14.4 kD)
  misc_feature (62)..(149): NCBI GI NO: 17137156 NR Description: Single stranded-binding protein c31A CG8396-PA
  misc_feature (70)..(148): NCBI GI NO: 15242363 NR Description: transcriptional co-activator-like protein
  misc_feature (106)..(154): NCBI GI NO: 19114954 NR Description: putative transcriptional activator.
  misc_feature (7)..(7): Xaa is any aa, unknown or other
  misc_feature (93)..(93): Xaa is any aa, unknown or other
SRVQVRXQESGLSTPAKGAEPFVAVGRRRHGRGYEEGGGYGAGDPARSDMESVTENKEEAKAAEEGDAGRESKDKERKEDEEEDEGKGGGKRXYGDQGDLILCRLSSKRRVTLSEFKGRSLVSIREFYVKDGKEMPSAKGISMTMEQWEAFSMLHLR

SEQ ID NO: 40816 - protein, 108 aa, Zea mays subsp. mays
  peptide (1)..(108): Ceres Seq. ID no. 4615169
  misc_feature (25)..(102): Pfam Name: PC4 Pfam Description: Transcriptional Coactivator p15
  misc_feature (1)..(102): NCBI GI NO: 34910378 NR Description: P0684B02.23
  misc_feature (21)..(102): NCBI GI NO: 13699910 NR Description: putative transcriptional coactivator
  misc_feature (18)..(102): NCBI GI NO: 15236980 NR Description: putative protein; protein id: At4g10920
  misc_feature (24)..(99): NCBI GI NO: 15242365 NR Description: putative transcriptional co-activator
  misc_feature (43)..(105): NCBI GI NO: 40739125 NR Description: hypothetical protein AN5806.2
  misc_feature (1)..(102): NCBI GI NO: 16610191 NR Description: PBF68 protein [Nicotiana tabacum]
  misc_feature (6)..(99): NCBI GI NO: 17542398 NR Description: Transcriptional Coactivator p15 (PC4) (14.4 kD)
  misc_feature (13)..(100): NCBI GI NO: 17137156 NR Description: Single stranded-binding protein c31A CG8396-PA
  misc_feature (21)..(99): NCBI GI NO: 15242363 NR Description: transcriptional co-activator-like protein
  misc_feature (57)..(105): NCBI GI NO: 19114954 NR Description: putative transcriptional activator.
  misc_feature (44)..(44): Xaa is any aa, unknown or other
MESVTENKEEAKAAEEGDAGRESKDKERKEDEEEDEGKGGGKRXYGDQGDLILCRLSSKRRVTLSEFKGRSLVSIREFYVKDGKEMPSAKGISMTMEQWEAFSMLHLR

SEQ ID NO: 40817 - DNA, 2200 bp, Zea mays subsp. mays; identical to SEQ ID NO: 40105
  misc_feature (1)..(2200): Ceres Seq. ID no. 12362570

SEQ ID NO: 40818 - protein, 580 aa, Zea mays subsp. mays; identical to SEQ ID NO: 40106
  peptide (1)..(580): Ceres Seq. ID no. 12362571
  misc_feature (21)..(540): Pfam Name: eIF-3 Pfam Description: Eukaryotic translation initiation factor 3 subunit 7
  misc_feature (21)..(563): NCBI GI NO: 15233469 NR Description: translation initiation factor eIF3 - like protein
  misc_feature (21)..(563): NCBI GI NO: 17528988 NR Description: putative translation initiation factor eIF3
  misc_feature (3)..(554): NCBI GI NO: 15241470 NR Description: eukaryotic translation initiation factor 3 subunit7
  misc_feature (157)..(563): NCBI GI NO: 12407755 NR Description: initiation factor 3d [Arabidopsis thaliana]
  misc_feature (3)..(548): NCBI GI NO: 31418925 NR Description: Unknown (protein for MGC:64097) [Danio rerio]
  misc_feature (1)..(574): NCBI GI NO: 31207329 NR Description: ENSANGP00000015368 [Anopheles gambiae]
  misc_feature (3)..(541): NCBI GI NO: 4503523 NR Description: eukaryotic translation initiation factor 3 subunit7
  misc_feature (3)..(541): NCBI GI NO: 34866902 NR Description: similar to eukaryotic translation initiation factor3 subunit 7
  misc_feature (3)..(542): NCBI GI NO: 27882463 NR Description: Similar to eukaryotic translation initiation factor3
  misc_feature (3)..(541): NCBI GI NO: 26337171 NR Description: unnamed protein product [Mus musculus]

SEQ ID NO: 40819 - protein, 321 aa, Zea mays subsp. mays; identical to SEQ ID NO: 40107
  peptide (1)..(321): Ceres Seq. ID no. 12362572
  misc_feature (1)..(281): Pfam Name: eIF-3 Pfam Description: Eukaryotic translation initiation factor 3 subunit 7
  misc_feature (1)..(304): NCBI GI NO: 15233469 NR Description: translation initiation factor eIF3 - like protein
  misc_feature (1)..(304): NCBI GI NO: 17528988 NR Description: putative translation initiation factor eIF3
  misc_feature (1)..(295): NCBI GI NO: 15241470 NR Description: eukaryotic translation initiation factor 3 subunit7
  misc_feature (1)..(304): NCBI GI NO: 12407755 NR Description: initiation factor 3d [Arabidopsis thaliana]
  misc_feature (1)..(289): NCBI GI NO: 31418925 NR Description: Unknown (protein for MGC:64097) [Danio rerio]
  misc_feature (1)..(315): NCBI GI NO: 31207329 NR Description: ENSANGP00000015368 [Anopheles gambiae]
  misc_feature (1)..(282): NCBI GI NO: 4503523 NR Description: eukaryotic translation initiation factor 3 subunit7
  misc_feature (1)..(282): NCBI GI NO: 34866902 NR Description: similar to eukaryotic translation initiation factor3 subunit 7
  misc_feature (1)..(283): NCBI GI NO: 27882463 NR Description: Similar to eukaryotic translation initiation factor3
  misc_feature (1)..(282): NCBI GI NO: 26337171 NR Description: unnamed protein product [Mus musculus]

SEQ ID NO: 40820 - DNA, 1073 bp, Zea mays subsp. mays; identical to SEQ ID NO: 38160
  misc_feature (1)..(1073): Ceres Seq. ID no. 12405278
  misc_feature (1051)..(1051): n is a, c, t, g, unknown, or other

SEQ ID NO: 40821 - protein, 312 aa, Zea mays subsp. mays; identical to SEQ ID NO: 38161
  peptide (1)..(312): Ceres Seq. ID no. 12405279
  misc_feature (57)..(218): NCBI GI NO: 9279600 NR Description: gene_id:MPE11.12~unknown protein
  misc_feature (57)..(218): NCBI GI NO: 15230950 NR Description: hypothetical protein; protein id: At3g25950.1
  misc_feature (58)..(207): NCBI GI NO: 15241364 NR Description: putative protein; protein id: At5g14280.1
  misc_feature (58)..(207): NCBI GI NO: 26450181 NR Description: unknown protein [Arabidopsis thaliana]
  misc_feature (58)..(214): NCBI GI NO: 15232128 NR Description: unknown protein; protein id: At3g27270.1

SEQ ID NO: 40822 - protein, 270 aa, Zea mays subsp. mays; identical to SEQ ID NO: 38162
  peptide (1)..(270): Ceres Seq. ID no. 12405280
  misc_feature (15)..(176): NCBI GI NO: 9279600 NR Description: gene_id:MPE11.12~unknown protein
  misc_feature (15)..(176): NCBI GI NO: 15230950 NR Description: hypothetical protein; protein id: At3g25950.1
  misc_feature (16)..(165): NCBI GI NO: 15241364 NR Description: putative protein; protein id: At5g14280.1
  misc_feature (16)..(165): NCBI GI NO: 26450181 NR Description: unknown protein [Arabidopsis thaliana]
  misc_feature (16)..(172): NCBI GI NO: 15232128 NR Description: unknown protein; protein id: At3g27270.1

SEQ ID NO: 40823 - protein, 265 aa, Zea mays subsp. mays; identical to SEQ ID NO: 38163
  peptide (1)..(265): Ceres Seq. ID no. 12405281
  misc_feature (13)..(252): NCBI GI NO: 29247944 NR Description: GLP_26_54603_52153 [Giardia lamblia ATCC 50803]
  misc_feature (4)..(265): NCBI GI NO: 23018055 NR Description: hypothetical protein [Thermobifida fusca]
  misc_feature (62)..(265): NCBI GI NO: 25143299 NR Description: pre-mRNA splicing SR protein related RSR-1 (68
  misc_feature (72)..(248): NCBI GI NO: 15219287 NR Description: arginine/serine-rich protein, putative

SEQ ID NO: 40824 - DNA, 1868 bp, Zea mays subsp. mays
  misc_feature (1)..(1868): Ceres Seq. ID no. 12366477
gcacgagaccattacctagaacatcctaatcaaaaaatgacactacctgacaaccacaaacgtcgtctccctccatggcactccgccacggcaataattgaagcaacgctgatctgttgcatctccggcgaggcagagcgcagcagctcgtgcatatatctagctaagccaattgcgcaccaccgcgcgcgccaccccaagatccccgtgccttttcagagcatctctccgtcgccgtgacaatgaagcagcagcagaccgtcatcctgtacccgagccctggcgtcggccacatcgtccccatggtgcagctcgccaaggtgtttctgaggcacggctgcgacgtgaccatggtgatcgccgagccagccgccagctcgcccgacttccgcatcgtcgacctcgaccgcgtggctgcctccaaccccgccatcaccttccacgtcctccctccggtcccgtacgccgacctcgccgtccccggcaagcaccatttcctcctcacgctgcaagtgctgcgacggtacaacggcgagctggagaggttcctccgctccgtcccgcgcgagcgcctgcactccctggtggtcggcatgttctgcaccgacgcggtcgacgtcggcgcaaagctgggcgtccccgtgtacacgttcttcgcctcggccgccgctactctggccgtcgtggcccagctgccggcgttgctctccggcaggcgagcgggcctcaaggagctcggggacacgccactccagttcctcggcgtcccgccgttcccagcgtcccatctcgtcagggagctgctggagcacccggacgacgacgagctgtgcaagaccatggtggacgtctggaagcgctgcacggacggcagcggcgtcttggtcaacacgttcgagtcgctggagagcccggccgtgcaggcgctgagggatccccggtgcgtgcccggccgcgtgctgcccccggtctactgcgtggggccgctgatcggtggcgacggcggcacaagagcagcagcggagcaagagcgcgcggcggagacgcggcacgagtgccttgcgtggctcgacgagcagcccgagaacagcgtcgtgttcctctgcttcggaagcagatgcgcgcactcggctgagcagctaaggggcatcgccgtcggccttgagaggtccgggcagcgcttcttgtggtctgtgcggacgccggccggcaccgacggcggttcggagaatctcggcgcgctctttccagaggggttcttgcagcggaccaaggaccggggcctcgtcgtgcggtcatgggcaccgcaggttgaggtgctacggcatccatcgacgggcgcgttcatgacgcactgcggatggaactcgacgctggaagccatcacagcaggggtgccgatgctatgctggccgttctacgcggagcagctgatgaacaaggtgttcgtgaccgagggcatgggcgtcggggtggagatggaggggtacacgacgggcttcatcaaatccgaggaggtggaagccaaggtgaggctggtgatggaatctgaggagggcaggcacctcaggggtcgagcggtagcactcaagaatgaagcacaagcagcgctgcgggatgacggcccatcggagacctcgttcgccaggttcctctttgatgcgaagaatcttcagggacacctcggtcacggatcggagtgaattttctttaattttctattgaggccttgttcgaaatttatattaggaataagatgcaggaagggttcttgaacttggcagtcatttgagtctcagggtcgacaatgtatcaaatacatatgtgttggagacttgttctcaaatgctataagttaagaacaaggc

SEQ ID NO: 40825 - protein, 486 aa, Zea mays subsp. mays
  peptide (1)..(486): Ceres Seq. ID no. 12366478
  misc_feature (6)..(477): Pfam Name: Pfam Description:  UDP-glucoronosyl and UDP-glucosyl transferase
  misc_feature (4)..(477): NCBI GI NO: 34910206 NR Description: putative flavonol glucosyltransferase
  misc_feature (4)..(473): NCBI GI NO: 34910204 NR Description: putative flavonol glucosyltransferase
  misc_feature (2)..(471): NCBI GI NO: 34910228 NR Description: putative flavonol glucosyltransferase
  misc_feature (5)..(473): NCBI GI NO: 34908644 NR Description: putative flavonol 3-O-glucosyltransferase
  misc_feature (1)..(471): NCBI GI NO: 22535568 NR Description: putative glucosyltransferase
  misc_feature (7)..(471): NCBI GI NO: 34910218 NR Description: putative flavonol glucosyltransferase
  misc_feature (4)..(471): NCBI GI NO: 18401158 NR Description: putative glucosyltransferase
  misc_feature (4)..(471): NCBI GI NO: 21593785 NR Description: putative glucosyltransferase
  misc_feature (7)..(478): NCBI GI NO: 15223392 NR Description: flavonol 3-o-glucosyltransferase, putative
  misc_feature (9)..(485): NCBI GI NO: 15240305 NR Description: UTP-glucose glucosyltransferase - like protein
MKQQQTVILYPSPGVGHIVPMVQLAKVFLRHGCDVTMVIAEPAASSPDFRIVDLDRVAASNPAITFHVLPPVPYADLAVPGKHHFLLTLQVLRRYNGELERFLRSVPRERLHSLVVGMFCTDAVDVGAKLGVPVYTFFASAAATLAVVAQLPALLSGRRAGLKELGDTPLQFLGVPPFPASHLVRELLEHPDDDELCKTMVDVWKRCTDGSGVLVNTFESLESPAVQALRDPRCVPGRVLPPVYCVGPLIGGDGGTRAAAEQERAAETRHECLAWLDEQPENSVVFLCFGSRCAHSAEQLRGIAVGLERSGQRFLWSVRTPAGTDGGSENLGALFPEGFLQRTKDRGLVVRSWAPQVEVLRHPSTGAFMTHCGWNSTLEAITAGVPMLCWPFYAEQLMNKVFVTEGMGVGVEMEGYTTGFIKSEEVEAKVRLVMESEEGRHLRGRAVALKNEAQAALRDDGPSETSFARFLFDAKNLQGHLGHGSE

SEQ ID NO: 40826 - protein, 466 aa, Zea mays subsp. mays
  peptide (1)..(466): Ceres Seq. ID no. 12366479
  misc_feature (1)..(457): Pfam Name: Pfam Description:  UDP-glucoronosyl and UDP-glucosyl transferase
  misc_feature (1)..(457): NCBI GI NO: 34910206 NR Description: putative flavonol glucosyltransferase
  misc_feature (1)..(453): NCBI GI NO: 34910204 NR Description: putative flavonol glucosyltransferase
  misc_feature (1)..(451): NCBI GI NO: 34910228 NR Description: putative flavonol glucosyltransferase
  misc_feature (1)..(453): NCBI GI NO: 34908644 NR Description: putative flavonol 3-O-glucosyltransferase
  misc_feature (1)..(451): NCBI GI NO: 22535568 NR Description: putative glucosyltransferase
  misc_feature (1)..(451): NCBI GI NO: 34910218 NR Description: putative flavonol glucosyltransferase
  misc_feature (1)..(451): NCBI GI NO: 18401158 NR Description: putative glucosyltransferase
  misc_feature (1)..(451): NCBI GI NO: 21593785 NR Description: putative glucosyltransferase
  misc_feature (1)..(458): NCBI GI NO: 15223392 NR Description: flavonol 3-o-glucosyltransferase, putative
  misc_feature (1)..(465): NCBI GI NO: 15240305 NR Description: UTP-glucose glucosyltransferase - like protein
MVQLAKVFLRHGCDVTMVIAEPAASSPDFRIVDLDRVAASNPAITFHVLPPVPYADLAVPGKHHFLLTLQVLRRYNGELERFLRSVPRERLHSLVVGMFCTDAVDVGAKLGVPVYTFFASAAATLAVVAQLPALLSGRRAGLKELGDTPLQFLGVPPFPASHLVRELLEHPDDDELCKTMVDVWKRCTDGSGVLVNTFESLESPAVQALRDPRCVPGRVLPPVYCVGPLIGGDGGTRAAAEQERAAETRHECLAWLDEQPENSVVFLCFGSRCAHSAEQLRGIAVGLERSGQRFLWSVRTPAGTDGGSENLGALFPEGFLQRTKDRGLVVRSWAPQVEVLRHPSTGAFMTHCGWNSTLEAITAGVPMLCWPFYAEQLMNKVFVTEGMGVGVEMEGYTTGFIKSEEVEAKVRLVMESEEGRHLRGRAVALKNEAQAALRDDGPSETSFARFLFDAKNLQGHLGHGSE

SEQ ID NO: 40827 - protein, 450 aa, Zea mays subsp. mays
  peptide (1)..(450): Ceres Seq. ID no. 12366480
  misc_feature (1)..(441): Pfam Name: Pfam Description:  UDP-glucoronosyl and UDP-glucosyl transferase
  misc_feature (1)..(441): NCBI GI NO: 34910206 NR Description: putative flavonol glucosyltransferase
  misc_feature (1)..(437): NCBI GI NO: 34910204 NR Description: putative flavonol glucosyltransferase
  misc_feature (1)..(435): NCBI GI NO: 34910228 NR Description: putative flavonol glucosyltransferase
  misc_feature (1)..(437): NCBI GI NO: 34908644 NR Description: putative flavonol 3-O-glucosyltransferase
  misc_feature (1)..(435): NCBI GI NO: 22535568 NR Description: putative glucosyltransferase
  misc_feature (1)..(435): NCBI GI NO: 34910218 NR Description: putative flavonol glucosyltransferase
  misc_feature (1)..(435): NCBI GI NO: 18401158 NR Description: putative glucosyltransferase
  misc_feature (1)..(435): NCBI GI NO: 21593785 NR Description: putative glucosyltransferase
  misc_feature (1)..(442): NCBI GI NO: 15223392 NR Description: flavonol 3-o-glucosyltransferase, putative
  misc_feature (1)..(449): NCBI GI NO: 15240305 NR Description: UTP-glucose glucosyltransferase - like protein
MVIAEPAASSPDFRIVDLDRVAASNPAITFHVLPPVPYADLAVPGKHHFLLTLQVLRRYNGELERFLRSVPRERLHSLVVGMFCTDAVDVGAKLGVPVYTFFASAAATLAVVAQLPALLSGRRAGLKELGDTPLQFLGVPPFPASHLVRELLEHPDDDELCKTMVDVWKRCTDGSGVLVNTFESLESPAVQALRDPRCVPGRVLPPVYCVGPLIGGDGGTRAAAEQERAAETRHECLAWLDEQPENSVVFLCFGSRCAHSAEQLRGIAVGLERSGQRFLWSVRTPAGTDGGSENLGALFPEGFLQRTKDRGLVVRSWAPQVEVLRHPSTGAFMTHCGWNSTLEAITAGVPMLCWPFYAEQLMNKVFVTEGMGVGVEMEGYTTGFIKSEEVEAKVRLVMESEEGRHLRGRAVALKNEAQAALRDDGPSETSFARFLFDAKNLQGHLGHGSE

SEQ ID NO: 40828 - DNA, 1092 bp, Zea mays subsp. mays
  misc_feature (1)..(1092): Ceres Seq. ID no. 12376878
gcacgagaccatttacctagaacatcctaatcaaaaaaatccatcttcagagagagagagagagatagagagagagagagagttggtttgcatggggtgtgtgtcctccaaggagtccagacgacgacctccgggatacgaggatcccaacaccttagctagagagaccacgttttctgtcaacgaagtggaggccctctacgagctgtacaagaggataagctattccataaccaaagacggcctaatccacaaggaggagttccagctcgctctcttccggaacagtaacaagaggaaccttttcgccgatcggatatttgacctgttcgacctgaagcgcaacggagtgattgagttcggggagttcgttcgctccctcgacgttttccacccagctacgcccgtggaagaaaagatcgcctttgcgtttcggctgtacgatctgagaggcactggattcattggacgcgaagagctgaaggaaatggtgctggccattctgaacgaatcagaattacttctttccgacgacgccgtcgaagaaatcgtggatcagactttcaggcaagcggacatgaacggcgacgggaagatagatcctgatgaatggaaggtgttcgcgagcaaaaacccggcacttctaaagaacatgacgctcccatacctcaagtaaaaacccggtacttctaaagaacattaattacccgcaccgcacatgactgggcggcttgatctgacgacgacgtgttgcattttgttgttgttgttgttgttgttgttgttgttgttgttgttgttgttgtgcatcgtcatcttgtacacgtacagggacataaccatggcgttccccagctttgttctcaactctggagccagtgacgacgagttgtagtagctgcgagcatgcatggccaagctgcgagcgaggaaggaacgctgacctcactcctcagttcactaagtttcagacggagcagcagcaggaggacccctcctgaaaggtgatttggaagctggtggttcactcaagctgctaggatcatctgtggaagaacacacatgctccatacttgcccagcccacagcaac

SEQ ID NO: 40829 - protein, 224 aa, Zea mays subsp. mays
  peptide (1)..(224): Ceres Seq. ID no. 12376879
  misc_feature (102)..(130): Pfam Name: Pfam Description:  EF hand
  misc_feature (31)..(224): NCBI GI NO: 15237928 NR Description: calcium sensor homolog (gb|AAC26110
  misc_feature (28)..(223): NCBI GI NO: 25295757 NR Description: protein F1N19.5 [imported] - Arabidopsis thaliana
  misc_feature (28)..(224): NCBI GI NO: 15217657 NR Description: calcineurin B-like protein; protein id:At1g64480
  misc_feature (31)..(224): NCBI GI NO: 15238015 NR Description: calcineurin B 1; protein id: At5g47100
  misc_feature (31)..(224): NCBI GI NO: 18414931 NR Description: calcineurin B-like protein 1; protein id:At4g17615
  misc_feature (41)..(224): NCBI GI NO: 16924116 NR Description: putative calcineurin B-like protein [Oryza sativa]
  misc_feature (42)..(224): NCBI GI NO: 22137326 NR Description: calcineurin B [Pisum sativum]
  misc_feature (33)..(224): NCBI GI NO: 7486208 NR Description: hypothetical protein F26P21
  misc_feature (33)..(224): NCBI GI NO: 15234011 NR Description: putative protein (fragment); protein id:At4g33000
  misc_feature (33)..(224): NCBI GI NO: 30689575 NR Description: calcineurin B-like protein (fragment)
HETIYLEHPNQKNPSSEREREIERERELVCMGCVSSKESRRRPPGYEDPNTLARETTFSVNEVEALYELYKRISYSITKDGLIHKEEFQLALFRNSNKRNLFADRIFDLFDLKRNGVIEFGEFVRSLDVFHPATPVEEKIAFAFRLYDLRGTGFIGREELKEMVLAILNESELLLSDDAVEEIVDQTFRQADMNGDGKIDPDEWKVFASKNPALLKNMTLPYLK

SEQ ID NO: 40830 - protein, 194 aa, Zea mays subsp. mays
  peptide (1)..(194): Ceres Seq. ID no. 12376880
  misc_feature (72)..(100): Pfam Name: Pfam Description:  EF hand
  misc_feature (1)..(194): NCBI GI NO: 15237928 NR Description: calcium sensor homolog (gb|AAC26110
  misc_feature (1)..(193): NCBI GI NO: 25295757 NR Description: protein F1N19.5 [imported] - Arabidopsis thaliana
  misc_feature (1)..(194): NCBI GI NO: 15217657 NR Description: calcineurin B-like protein; protein id:At1g64480
  misc_feature (1)..(194): NCBI GI NO: 15238015 NR Description: calcineurin B 1; protein id: At5g47100
  misc_feature (1)..(194): NCBI GI NO: 18414931 NR Description: calcineurin B-like protein 1; protein id:At4g17615
  misc_feature (11)..(194): NCBI GI NO: 16924116 NR Description: putative calcineurin B-like protein [Oryza sativa]
  misc_feature (12)..(194): NCBI GI NO: 22137326 NR Description: calcineurin B [Pisum sativum]
  misc_feature (3)..(194): NCBI GI NO: 7486208 NR Description: hypothetical protein F26P21
  misc_feature (3)..(194): NCBI GI NO: 30689575 NR Description: calcineurin B-like protein (fragment)
  misc_feature (3)..(194): NCBI GI NO: 15234011 NR Description: putative protein (fragment); protein id:At4g33000
MGCVSSKESRRRPPGYEDPNTLARETTFSVNEVEALYELYKRISYSITKDGLIHKEEFQLALFRNSNKRNLFADRIFDLFDLKRNGVIEFGEFVRSLDVFHPATPVEEKIAFAFRLYDLRGTGFIGREELKEMVLAILNESELLLSDDAVEEIVDQTFRQADMNGDGKIDPDEWKVFASKNPALLKNMTLPYLK

SEQ ID NO: 40831 - DNA, 871 bp, Zea mays subsp. mays
  misc_feature (1)..(871): Ceres Seq. ID no. 12364438
gcacgagaccattacctagaacatcctaatccaaaaactagcaggcatccacttctcacaggcaaagagaagtctcctagcatcaaagcagatttgcagatagaccttctccaagcgatggagactttcacccaggaacatgtcattggaattccattgacttcgtttgcatatgccgatgaggaaagacaaggaaaatcttcctgttctgccatggttcataaaaaaaataagaagagttccttcattcatcggatgaacaaactgagccataaaacagatagctacatgcaaggattcaaagaacacttaaccatgggaccaaaaatttcagaaactataaaagggaaactaagcttcggtgcaaaggttctccaagctggcggtattgataaagtcttcagagaatactttgcagttgagaaagatgagaaactacggaaggctttccagtgctatctttcaaccacagctggtccaatagctggaatgcttttcatctcaactaagaagattgctttccatagtgataggcctttgagtttcacgtctcctaaaggaagcagtacaagggtgccttacaaggtgttgatccccacagagaggatgaaaagtgcttcagtgcgggaaaatttatacaatccagatgagaagtatattgatgtagtcactgttgatggctttgatttttggttcatgggctttgtcagctatgagaagtcattcaaatatctccaacaagtaattatggagctgagatgatgcacacagttttgtaacgtgaaacatcatagataccatgttgatatggtatatgtacattgaagagatagaattgatctatcacattgattgtgaagcaaagtttttc

SEQ ID NO: 40832 - protein, 253 aa, Zea mays subsp. mays
  peptide (1)..(253): Ceres Seq. ID no. 12364439
  misc_feature (132)..(210): Pfam Name: Pfam Description:  GRAM domain
  misc_feature (40)..(253): NCBI GI NO: 37535572 NR Description: putative ABA-responsive protein
  misc_feature (46)..(251): NCBI GI NO: 38344446 NR Description: OSJNBa0038O10.18
  misc_feature (74)..(253): NCBI GI NO: 38344445 NR Description: OSJNBa0038O10.17
  misc_feature (92)..(249): NCBI GI NO: 15237301 NR Description: ABA-responsive protein, putative
  misc_feature (92)..(249): NCBI GI NO: 15237287 NR Description: ABA-responsive protein, putative
  misc_feature (92)..(249): NCBI GI NO: 26452902 NR Description: unknown protein [Arabidopsis thaliana]
  misc_feature (80)..(251): NCBI GI NO: 15237288 NR Description: ABA-responsive protein, putative
  misc_feature (75)..(249): NCBI GI NO: 15241598 NR Description: putative protein; protein id: At5g08350
  misc_feature (65)..(253): NCBI GI NO: 34906818 NR Description: contains EST C91668
  misc_feature (90)..(245): NCBI GI NO: 15240044 NR Description: ABA-responsive protein - like
ARDHYLEHPNPKTSRHPLLTGKEKSPSIKADLQIDLLQAMETFTQEHVIGIPLTSFAYADEERQGKSSCSAMVHKKNKKSSFIHRMNKLSHKTDSYMQGFKEHLTMGPKISETIKGKLSFGAKVLQAGGIDKVFREYFAVEKDEKLRKAFQCYLSTTAGPIAGMLFISTKKIAFHSDRPLSFTSPKGSSTRVPYKVLIPTERMKSASVRENLYNPDEKYIDVVTVDGFDFWFMGFVSYEKSFKYLQQVIMELR

SEQ ID NO: 40833 - protein, 214 aa, Zea mays subsp. mays
  peptide (1)..(214): Ceres Seq. ID no. 12364440
  misc_feature (93)..(171): Pfam Name: Pfam Description:  GRAM domain
  misc_feature (1)..(214): NCBI GI NO: 37535572 NR Description: putative ABA-responsive protein
  misc_feature (7)..(212): NCBI GI NO: 38344446 NR Description: OSJNBa0038O10.18
  misc_feature (35)..(214): NCBI GI NO: 38344445 NR Description: OSJNBa0038O10.17
  misc_feature (53)..(210): NCBI GI NO: 15237301 NR Description: ABA-responsive protein, putative
  misc_feature (53)..(210): NCBI GI NO: 15237287 NR Description: ABA-responsive protein, putative
  misc_feature (53)..(210): NCBI GI NO: 26452902 NR Description: unknown protein [Arabidopsis thaliana]
  misc_feature (41)..(212): NCBI GI NO: 15237288 NR Description: ABA-responsive protein, putative
  misc_feature (36)..(210): NCBI GI NO: 15241598 NR Description: putative protein; protein id: At5g08350
  misc_feature (26)..(214): NCBI GI NO: 34906818 NR Description: contains EST C91668
  misc_feature (51)..(206): NCBI GI NO: 15240044 NR Description: ABA-responsive protein - like
METFTQEHVIGIPLTSFAYADEERQGKSSCSAMVHKKNKKSSFIHRMNKLSHKTDSYMQGFKEHLTMGPKISETIKGKLSFGAKVLQAGGIDKVFREYFAVEKDEKLRKAFQCYLSTTAGPIAGMLFISTKKIAFHSDRPLSFTSPKGSSTRVPYKVLIPTERMKSASVRENLYNPDEKYIDVVTVDGFDFWFMGFVSYEKSFKYLQQVIMELR

SEQ ID NO: 40834 - protein, 182 aa, Zea mays subsp. mays
  peptide (1)..(182): Ceres Seq. ID no. 12364441
  misc_feature (61)..(139): Pfam Name: Pfam Description:  GRAM domain
  misc_feature (1)..(182): NCBI GI NO: 37535572 NR Description: putative ABA-responsive protein
  misc_feature (1)..(180): NCBI GI NO: 38344446 NR Description: OSJNBa0038O10.18
  misc_feature (3)..(182): NCBI GI NO: 38344445 NR Description: OSJNBa0038O10.17
  misc_feature (21)..(178): NCBI GI NO: 15237301 NR Description: ABA-responsive protein, putative
  misc_feature (21)..(178): NCBI GI NO: 15237287 NR Description: ABA-responsive protein, putative
  misc_feature (21)..(178): NCBI GI NO: 26452902 NR Description: unknown protein [Arabidopsis thaliana]
  misc_feature (9)..(180): NCBI GI NO: 15237288 NR Description: ABA-responsive protein, putative
  misc_feature (4)..(178): NCBI GI NO: 15241598 NR Description: putative protein; protein id: At5g08350
  misc_feature (1)..(182): NCBI GI NO: 34906818 NR Description: contains EST C91668
  misc_feature (19)..(174): NCBI GI NO: 15240044 NR Description: ABA-responsive protein - like
MVHKKNKKSSFIHRMNKLSHKTDSYMQGFKEHLTMGPKISETIKGKLSFGAKVLQAGGIDKVFREYFAVEKDEKLRKAFQCYLSTTAGPIAGMLFISTKKIAFHSDRPLSFTSPKGSSTRVPYKVLIPTERMKSASVRENLYNPDEKYIDVVTVDGFDFWFMGFVSYEKSFKYLQQVIMELR

SEQ ID NO: 40835 - DNA, 472 bp, Zea mays subsp. mays
  misc_feature (1)..(472): Ceres Seq. ID no. 1848109
catatctggtgttcctggtgcatatgttttgtggtatcgtcctctgtataatgcaatgaggactgatagtgcattgaagtttggattgttcttcttgctttacttgttccatattcttttctgcgtgtttgctgctgtggctcctcctgctgtatttgagggaaaatcattggcaggaattttgccagcaattgatcttatcagcgtaaatgctttggttgggatattctactttgttggatttggattgttttgtctggaatcgttgctcagcatctgggtcatccagcaagtgtacatgtacttccgtggaagtggaaaggctgcagagatgaagcgtgatgcgacaaggggtgcaatgagagccgcattttaagtggtatttttgtgatgatagtccaaagtcccaatcgcatacttccggtggataggttgtgccaacaaacagaggctggcatatgtttcttccttg

SEQ ID NO: 40836 - protein, 124 aa, Zea mays subsp. mays
  peptide (1)..(124): Ceres Seq. ID no. 1848110
  misc_feature (1)..(106): Pfam Name: Pfam Description:  SCAMP family
  misc_feature (1)..(124): NCBI GI NO: 34899754 NR Description: putative secretory carrier membrane protein
  misc_feature (1)..(124): NCBI GI NO: 7109232 NR Description: secretory carrier membrane protein [Oryza sativa]
  misc_feature (1)..(123): NCBI GI NO: 15226410 NR Description: putative secretory carrier-associated membraneprotein
  misc_feature (1)..(123): NCBI GI NO: 15220305 NR Description: secretory carrier membrane protein, putative
  misc_feature (1)..(123): NCBI GI NO: 15219893 NR Description: secretory carrier membrane protein
  misc_feature (1)..(122): NCBI GI NO: 7485909 NR Description: hypothetical protein F21B7
  misc_feature (1)..(122): NCBI GI NO: 18379111 NR Description: expressed protein; protein id: At1g03550
  misc_feature (1)..(123): NCBI GI NO: 3941289 NR Description: similarity to SCAMP37 [Pisum sativum]
  misc_feature (3)..(105): NCBI GI NO: 15222550 NR Description: secretory carrier membrane protein, putative
  misc_feature (3)..(105): NCBI GI NO: 38347080 NR Description: OSJNBa0006A01.21
ISGVPGAYVLWYRPLYNAMRTDSALKFGLFFLLYLFHILFCVFAAVAPPAVFEGKSLAGILPAIDLISVNALVGIFYFVGFGLFCLESLLSIWVIQQVYMYFRGSGKAAEMKRDATRGAMRAAF

SEQ ID NO: 40837 - protein, 106 aa, Zea mays subsp. mays
  peptide (1)..(106): Ceres Seq. ID no. 1848111
  misc_feature (1)..(88): Pfam Name: Pfam Description:  SCAMP family
  misc_feature (1)..(106): NCBI GI NO: 34899754 NR Description: putative secretory carrier membrane protein
  misc_feature (1)..(106): NCBI GI NO: 7109232 NR Description: secretory carrier membrane protein [Oryza sativa]
  misc_feature (1)..(105): NCBI GI NO: 15226410 NR Description: putative secretory carrier-associated membraneprotein
  misc_feature (1)..(105): NCBI GI NO: 15220305 NR Description: secretory carrier membrane protein, putative
  misc_feature (1)..(105): NCBI GI NO: 15219893 NR Description: secretory carrier membrane protein
  misc_feature (1)..(104): NCBI GI NO: 7485909 NR Description: hypothetical protein F21B7
  misc_feature (1)..(104): NCBI GI NO: 18379111 NR Description: expressed protein; protein id: At1g03550
  misc_feature (1)..(105): NCBI GI NO: 3941289 NR Description: similarity to SCAMP37 [Pisum sativum]
  misc_feature (1)..(87): NCBI GI NO: 15222550 NR Description: secretory carrier membrane protein, putative
  misc_feature (1)..(87): NCBI GI NO: 38347080 NR Description: OSJNBa0006A01.21
MRTDSALKFGLFFLLYLFHILFCVFAAVAPPAVFEGKSLAGILPAIDLISVNALVGIFYFVGFGLFCLESLLSIWVIQQVYMYFRGSGKAAEMKRDATRGAMRAAF

SEQ ID NO: 40838 - DNA, 1999 bp, Zea mays subsp. mays
  misc_feature (1)..(1999): Ceres Seq. ID no. 12375111
gcggcgcggcgagactgctgagcccgaggaaacgggaagagaggagaaaagcaaaacgaagctcggaaccacgagacgacggagaggatgggcttcagcgtcctgctctcaccgccgccccttccgctcccgagcgccaccgctgcggccgacttgtacctaatattcggcggccacgatcgccgccgccgccgcccgctggaacacggctgccgctgcggccgccccccggagacggcgctcggcggcagctcaggccgccgcggctcgtacgatgacgacgggacggctccaggctccctcggcctcgacggcagcagcacgtcctcctcggtccgtcggacggggagtgcaaaaccaagatatcaagtaacttcgaaagaagaggacacacaaaatgcagaccgcgaggggtggcaatatagtacagaaggcctttcaaagagcatgtccaagtcaaggtacatcaaagtatttggggttgatttgtcccctgataatgtggctgttgctattgtttacttcgtgcaaggagttttaggcctttcgaggcttgctgtcagcttctacttaaaagataatcttcatcttgagccagcagagactgcagttatatctgggttctcagccttgccatggttggtcaagcccctctacggttttatcagtgattccatccctctctttggatatcgaagaaggtcgtacctatttctatcaggcatccttggagcactttcatggagtttgatggccgctgttgtggatgataaatatagtgcagcactctctattattcttggatctcttgcagttgccatatctgatgttgtggttgattctatggtggttgagagagctcgaggtgaatcacagagtacatctggatctctccagtcgctatgttggggatcctcagccttcggaggagtcgtgagtgcatacttcagtggttctttagtggatacttatggtgtaagatttgtttttggtgttacagcacttctgccactgatgacatctgctgttgcagttcttgtaaatgaagaacgcttacctttggggaaaagttcagtctcactttcagtttcaggttcagaattaattgagagctctaagcaacgtatcatgcagatttgggattcagtaaagcaacccagcatactcctacccaccttgttcatattcctttggcaagcaacaccgcaatcagactctgccatgtttttcttcataacaaataagctcgggtttactccagaatttctaggacgcgttacgcttgtcacatctgttgcatccttactggaatcggagtgtataatttgtttctgaaggaagttccattgaggaaaatctttcttgtgacaacagtcttaggttctgctctcggaatgacacaggttcttcttgtcactgggctcaaccggaagcttggcataagcgacgaatggttctccattggggattctttgattatcacagtccttggccaggcttcctttatgcctgtcctggtgttggctgcaaagttgtgccctgtgggagcggaagcaactttatttgccactttgatgtccatctctaacgccggaggtgttgccggaggtctggtgggcgcgggtctgacgcagttactgggagtcagcagagacaacttcgaaaaccttgctctgctgatcgcgatttgcaatctcagttccctgctacctctgcctcttctgggtctcctgccagatgaatcccgtaatgcagatggtgcacagaccaaaaatgactgatgcttgtatatctccacgcgtctttacaagacgaaagggcatacacatacactcatcggcacaaagcagcgcagctgatgacgtgaacaaaacatggaagctgatgtataggatgtattatctatgatgtatagtaagtaacgttagattaattatgaaacatatttgtaataaatttaattgaaagtataaatactccttttcataaaacgaggttt

SEQ ID NO: 40839 - protein, 415 aa, Zea mays subsp. mays
  peptide (1)..(415): Ceres Seq. ID no. 12375112
  misc_feature (148)..(407): Pfam Name: Pfam Description:  BT1 family
  misc_feature (91)..(407): NCBI GI NO: 34394451 NR Description: putative integral membrane protein
  misc_feature (94)..(407): NCBI GI NO: 18402856 NR Description: expressed protein; protein id: At2g32040
  misc_feature (112)..(406): NCBI GI NO: 23130611 NR Description: hypothetical protein [Nostoc punctiforme]
  misc_feature (139)..(407): NCBI GI NO: 16331564 NR Description: integral membrane protein
  misc_feature (113)..(406): NCBI GI NO: 23041501 NR Description: hypothetical protein
  misc_feature (129)..(407): NCBI GI NO: 22297560 NR Description: ORF_ID:tll0016~hypothetical protein
  misc_feature (129)..(407): NCBI GI NO: 3033544 NR Description: hypothetical protein [Synechococcus sp. PCC 7942]
  misc_feature (143)..(407): NCBI GI NO: 25408206 NR Description: hypothetical protein At2g32040
  misc_feature (114)..(407): NCBI GI NO: 17231777 NR Description: hypothetical protein [Nostoc sp. PCC 7120]
  misc_feature (131)..(407): NCBI GI NO: 23489460 NR Description: hypothetical protein [Plasmodium yoelii yoelii]
MGFSVLLSPPPLPLPSATAAADLYLIFGGHDRRRRRPLEHGCRCGRPPETALGGSSGRRGSYDDDGTAPGSLGLDGSSTSSSVRRTGSAKPRYQVTSKEEDTQNADREGWQYSTEGLSKSMSKSRYIKVFGVDLSPDNVAVAIVYFVQGVLGLSRLAVSFYLKDNLHLEPAETAVISGFSALPWLVKPLYGFISDSIPLFGYRRRSYLFLSGILGALSWSLMAAVVDDKYSAALSIILGSLAVAISDVVVDSMVVERARGESQSTSGSLQSLCWGSSAFGGVVSAYFSGSLVDTYGVRFVFGVTALLPLMTSAVAVLVNEERLPLGKSSVSLSVSGSELIESSKQRIMQIWDSVKQPSILLPTLFIFLWQATPQSDSAMFFFITNKLGFTPEFLGRVTLVTSVASLLESECIICF

SEQ ID NO: 40840 - protein, 295 aa, Zea mays subsp. mays
  peptide (1)..(295): Ceres Seq. ID no. 12375113
  misc_feature (28)..(287): Pfam Name: Pfam Description:  BT1 family
  misc_feature (1)..(287): NCBI GI NO: 34394451 NR Description: putative integral membrane protein
  misc_feature (1)..(287): NCBI GI NO: 18402856 NR Description: expressed protein; protein id: At2g32040
  misc_feature (1)..(286): NCBI GI NO: 23130611 NR Description: hypothetical protein [Nostoc punctiforme]
  misc_feature (19)..(287): NCBI GI NO: 16331564 NR Description: integral membrane protein
  misc_feature (1)..(286): NCBI GI NO: 23041501 NR Description: hypothetical protein
  misc_feature (9)..(287): NCBI GI NO: 22297560 NR Description: ORF_ID:tll0016~hypothetical protein
  misc_feature (9)..(287): NCBI GI NO: 3033544 NR Description: hypothetical protein [Synechococcus sp. PCC 7942]
  misc_feature (23)..(287): NCBI GI NO: 25408206 NR Description: hypothetical protein At2g32040
  misc_feature (1)..(287): NCBI GI NO: 17231777 NR Description: hypothetical protein [Nostoc sp. PCC 7120]
  misc_feature (11)..(287): NCBI GI NO: 23489460 NR Description: hypothetical protein [Plasmodium yoelii yoelii]
MSKSRYIKVFGVDLSPDNVAVAIVYFVQGVLGLSRLAVSFYLKDNLHLEPAETAVISGFSALPWLVKPLYGFISDSIPLFGYRRRSYLFLSGILGALSWSLMAAVVDDKYSAALSIILGSLAVAISDVVVDSMVVERARGESQSTSGSLQSLCWGSSAFGGVVSAYFSGSLVDTYGVRFVFGVTALLPLMTSAVAVLVNEERLPLGKSSVSLSVSGSELIESSKQRIMQIWDSVKQPSILLPTLFIFLWQATPQSDSAMFFFITNKLGFTPEFLGRVTLVTSVASLLESECIICF

SEQ ID NO: 40841 - DNA, 1721 bp, Zea mays subsp. mays
  misc_feature (1)..(1721): Ceres Seq. ID no. 12435567
gcacgagaccattacctagaacatcctaatcgaaaaagtgccatggctgaagcagcgccccacttcgtgctcgtgccgatgctggcgcagggccacttgctccccatgctggacctggcgcgcgtcctcgccagccacggcgcccgtgccacggtggtgctgacgcccgtcaacgccgcgcgcaacagggccttcctggagcaggccgcgggggcggggctcaccatcaacttcgccgagctcgcgttcccggggccagcgctcggcctcgccgcgggctgcgagagggtcgacatgctgcaagacctctccctcatcgtcccgttctacgatgccgtgtggctgctcgccgagccgctcgaggcgtacctcctctcgctgccccggatgccggactgcctcgtctccgactcgttcatggcgtggactgccagcgtcgcgcggcggcacggcatccttcggttcgtggtccacttctcgcccgcgtcctacgtcctcgccgcgcacatcctcgaaacgcgcggcgtctacgaccgcgccgccgacgacttcgaaccgttcgaggtgccggagttccccgtacgcgccgtggtgagcagggctacggcgcaaggggtcttccagtggcctgcaggcatggagaggttccggcgcgacacgctcgatgccgaggccaccgccgacgggatactgttcaacacgtgtgctgccctggaggacgcgttcgtggagcgcttcgcttcggaggtcggcaagaagatttgggcggtcgggccgctgttcctcctcggttccggttccgacgccggcgggatggccgggagaggcaaccgcgcggcggtggacgccgaccaaatcgtgtcctggcttgacgcgcgtccggcggcgtccgtgctctacatcagcttcggcagcatcggccgtctgttcccggctcaggccgccgagctcgccgccggactggaggcgtcgcgcctgccgttcatctggtcggccaaggagacggcgcccggcctcgacgcgggaattcgaggagcgcgtgaaggaccggggcctcgtcgtccacgggtgggcgccccagatgaccatcctgtcgcaccctgccgtgggcggcttcctgacgcactgcggctggaactccatcctggagagcctctgctacggcgtgccgctcatgacctggccgctgttcgtcgaccagttcctgaacgaggcgttggtcgtggacgtgctcggcgccggcgtccgctccggcgccaaggtgccggtgacgcacgtgacggtcgtgaagccaggggaggtgctggaagtgcaggtctggagggacggcgtcgagagggcggtcaccgacctcatggacgagggccccgcgggcgcggcgaggcgggcgagggccaaggagctcgggcaacagatgagggccgcaatggcgaagggtgggtcgtcggacaccgatgtgaggaacttggttcgccacgtcgttgaggtcgcgcggaaaaaggaggagcacgaggacacggctcttgctggaggtgaccaagtgatcacgagcaaggaaaagacgatgaacggcgccggtggaaaacactactgatgaaattcgtgtggtacggtcgtttttggctgaaagaatctctcgagttaagctagctactagccacgcaacccaacttgcatgtaccagcagcaatgacatattatgttatcgtgctttttgtgcg

SEQ ID NO: 40842 - protein, 494 aa, Zea mays subsp. mays
  peptide (1)..(494): Ceres Seq. ID no. 12435568
  misc_feature (21)..(345): Pfam Name: Pfam Description:  UDP-glucoronosyl and UDP-glucosyl transferase
  misc_feature (14)..(345): NCBI GI NO: 37531692 NR Description: putative glucosyltransferase
  misc_feature (11)..(333): NCBI GI NO: 34910296 NR Description: putative glucosyl transferase
  misc_feature (16)..(334): NCBI GI NO: 32816174 NR Description: flavonoid glucosyl-transferase [Allium cepa]
  misc_feature (16)..(334): NCBI GI NO: 32816176 NR Description: flavonoid glucosyl-transferase [Allium cepa]
  misc_feature (13)..(330): NCBI GI NO: 15228037 NR Description: putative glucosyl transferase
  misc_feature (18)..(333): NCBI GI NO: 34910292 NR Description: putative glucosyl transferase
  misc_feature (21)..(330): NCBI GI NO: 15228035 NR Description: putative glucosyl transferase
  misc_feature (21)..(333): NCBI GI NO: 34910294 NR Description: putative glucosyl transferase
  misc_feature (21)..(330): NCBI GI NO: 26450153 NR Description: putative glucosyl transferase
  misc_feature (21)..(330): NCBI GI NO: 15228032 NR Description: putative glucosyl transferase
ARDHYLEHPNRKSAMAEAAPHFVLVPMLAQGHLLPMLDLARVLASHGARATVVLTPVNAARNRAFLEQAAGAGLTINFAELAFPGPALGLAAGCERVDMLQDLSLIVPFYDAVWLLAEPLEAYLLSLPRMPDCLVSDSFMAWTASVARRHGILRFVVHFSPASYVLAAHILETRGVYDRAADDFEPFEVPEFPVRAVVSRATAQGVFQWPAGMERFRRDTLDAEATADGILFNTCAALEDAFVERFASEVGKKIWAVGPLFLLGSGSDAGGMAGRGNRAAVDADQIVSWLDARPAASVLYISFGSIGRLFPAQAAELAAGLEASRLPFIWSAKETAPGLDAGIRGAREGPGPRRPRVGAPDDHPVAPCRGRLPDALRLELHPGEPLLRRAAHDLAAVRRPVPERGVGRGRARRRRPLRRQGAGDARDGREARGGAGSAGLEGRRREGGHRPHGRGPRGRGEAGEGQGARATDEGRNGEGWVVGHRCEELGSPRR

SEQ ID NO: 40843 - protein, 480 aa, Zea mays subsp. mays
  peptide (1)..(480): Ceres Seq. ID no. 12435569
  misc_feature (7)..(331): Pfam Name: Pfam Description:  UDP-glucoronosyl and UDP-glucosyl transferase
  misc_feature (1)..(331): NCBI GI NO: 37531692 NR Description: putative glucosyltransferase
  misc_feature (1)..(319): NCBI GI NO: 34910296 NR Description: putative glucosyl transferase
  misc_feature (2)..(320): NCBI GI NO: 32816174 NR Description: flavonoid glucosyl-transferase [Allium cepa]
  misc_feature (2)..(320): NCBI GI NO: 32816176 NR Description: flavonoid glucosyl-transferase [Allium cepa]
  misc_feature (1)..(316): NCBI GI NO: 15228037 NR Description: putative glucosyl transferase
  misc_feature (4)..(319): NCBI GI NO: 34910292 NR Description: putative glucosyl transferase
  misc_feature (7)..(316): NCBI GI NO: 15228035 NR Description: putative glucosyl transferase
  misc_feature (7)..(319): NCBI GI NO: 34910294 NR Description: putative glucosyl transferase
  misc_feature (7)..(316): NCBI GI NO: 26450153 NR Description: putative glucosyl transferase
  misc_feature (7)..(316): NCBI GI NO: 15228032 NR Description: putative glucosyl transferase
MAEAAPHFVLVPMLAQGHLLPMLDLARVLASHGARATVVLTPVNAARNRAFLEQAAGAGLTINFAELAFPGPALGLAAGCERVDMLQDLSLIVPFYDAVWLLAEPLEAYLLSLPRMPDCLVSDSFMAWTASVARRHGILRFVVHFSPASYVLAAHILETRGVYDRAADDFEPFEVPEFPVRAVVSRATAQGVFQWPAGMERFRRDTLDAEATADGILFNTCAALEDAFVERFASEVGKKIWAVGPLFLLGSGSDAGGMAGRGNRAAVDADQIVSWLDARPAASVLYISFGSIGRLFPAQAAELAAGLEASRLPFIWSAKETAPGLDAGIRGAREGPGPRRPRVGAPDDHPVAPCRGRLPDALRLELHPGEPLLRRAAHDLAAVRRPVPERGVGRGRARRRRPLRRQGAGDARDGREARGGAGSAGLEGRRREGGHRPHGRGPRGRGEAGEGQGARATDEGRNGEGWVVGHRCEELGSPRR

SEQ ID NO: 40844 - protein, 468 aa, Zea mays subsp. mays
  peptide (1)..(468): Ceres Seq. ID no. 12435570
  misc_feature (1)..(319): Pfam Name: Pfam Description:  UDP-glucoronosyl and UDP-glucosyl transferase
  misc_feature (1)..(319): NCBI GI NO: 37531692 NR Description: putative glucosyltransferase
  misc_feature (1)..(307): NCBI GI NO: 34910296 NR Description: putative glucosyl transferase
  misc_feature (1)..(308): NCBI GI NO: 32816174 NR Description: flavonoid glucosyl-transferase [Allium cepa]
  misc_feature (1)..(308): NCBI GI NO: 32816176 NR Description: flavonoid glucosyl-transferase [Allium cepa]
  misc_feature (1)..(304): NCBI GI NO: 15228037 NR Description: putative glucosyl transferase
  misc_feature (1)..(307): NCBI GI NO: 34910292 NR Description: putative glucosyl transferase
  misc_feature (1)..(304): NCBI GI NO: 15228035 NR Description: putative glucosyl transferase
  misc_feature (1)..(307): NCBI GI NO: 34910294 NR Description: putative glucosyl transferase
  misc_feature (1)..(304): NCBI GI NO: 26450153 NR Description: putative glucosyl transferase
  misc_feature (1)..(304): NCBI GI NO: 15228032 NR Description: putative glucosyl transferase
MLAQGHLLPMLDLARVLASHGARATVVLTPVNAARNRAFLEQAAGAGLTINFAELAFPGPALGLAAGCERVDMLQDLSLIVPFYDAVWLLAEPLEAYLLSLPRMPDCLVSDSFMAWTASVARRHGILRFVVHFSPASYVLAAHILETRGVYDRAADDFEPFEVPEFPVRAVVSRATAQGVFQWPAGMERFRRDTLDAEATADGILFNTCAALEDAFVERFASEVGKKIWAVGPLFLLGSGSDAGGMAGRGNRAAVDADQIVSWLDARPAASVLYISFGSIGRLFPAQAAELAAGLEASRLPFIWSAKETAPGLDAGIRGAREGPGPRRPRVGAPDDHPVAPCRGRLPDALRLELHPGEPLLRRAAHDLAAVRRPVPERGVGRGRARRRRPLRRQGAGDARDGREARGGAGSAGLEGRRREGGHRPHGRGPRGRGEAGEGQGARATDEGRNGEGWVVGHRCEELGSPRR

SEQ ID NO: 40845 - DNA, 1330 bp, Zea mays subsp. mays
  misc_feature (1)..(1330): Ceres Seq. ID no. 12383496
  misc_feature (974)..(974): n is a, c, t, g, unknown, or other
gaattttcgatagtataaacttccactccaaatttaagttcaactgacaccgtttgcagcttctttgaccgcgcggcgatcgtcaccgacggcgacctggtcacgctgacggacgcggactccggcaagccgtcgacggcccccgtcccggacctgtggcgcctgagcaccgtgcaccgcgtggaggagctcaagtcggtgatccgcatgggtcctatctgggcggcgggcatcctggtgatcacggggtcgtcgacgcagaacaccttctctctgcagcaggcgagcaccatggaccgccgcctcgcgccgggcctctccacgttcgagatccccgcggggtccatgaccgtcttcgggctgctggccatgctcttcaccctcttcgtctacgaccgcgcgctcatccgcgtggcgcgccgcttcacggggctggaccgcggcatctccttcctgcaccgcatgggcgtcggcttcgccatcagcgtgctcgccaccctggtcgccggcttcgtggagcggcaccgcagggacgcggcggcggcggccggcgccacggacgccggcacgtccccgctgtcggcctactggctggtgccgcagtacgcgctgcatggcgtggccgaggcgttcacctccgtggggcacctcgagttcatgtacgaccaggcgcccgagagcatgcgcagcacggcgacggcgctcttctggctgtccatctcgctgggaagctacgcgagcacctgctggtggacgctgtgcaccgctggagcgcggggcccggcggcgccaactggctgccggacaacatcaatcacggcaggctggattacttttactgggtcgtcacggtactgcaggtcatgaacctggtgtactacgccatttgcgccaagcggttcacgttcaagccagtgcagctcaacaagaaagaggaggaagaaggcggcaaggtacttgtggagttgcaaganaaggtttaatttgagcagcatgcactttcagctatgtgcaggtacatgtctaatagaaaggaagtactcatcagtgctaggaagatcctcagaaaaactcccaaggtattactatataaatctatgtgagcatctgtattagtcaagtagatcaagaatgcaggaaggttgttcaggcaagcaacctcagaaattgtcaaggatcacatgacagctttgtggatggcagaagctatctggtctggtcctgagacttggcacaggtgcaaaacacaactcgactatatttgtaattagaaagcaggcacgaggcacatgtctgaactctgaaacttgacgttaatgcatagtactgt

SEQ ID NO: 40846 - protein, 219 aa, Zea mays subsp. mays
  peptide (1)..(219): Ceres Seq. ID no. 12383497
  misc_feature (1)..(171): Pfam Name: Pfam Description:  POT family
  misc_feature (1)..(184): NCBI GI NO: 15221439 NR Description: peptide transporter, putative
  misc_feature (1)..(179): NCBI GI NO: 7484755 NR Description: nitrite transport protein, chloroplast - cucumber
  misc_feature (1)..(179): NCBI GI NO: 15391731 NR Description: nitrite transporter [Cucumis sativus]
  misc_feature (1)..(179): NCBI GI NO: 18409391 NR Description: putative peptide transporter; protein id:At1g69870
  misc_feature (1)..(179): NCBI GI NO: 25404847 NR Description: probable peptide transporter T17F3.10
  misc_feature (1)..(191): NCBI GI NO: 34394155 NR Description: putative peptide transport protein
  misc_feature (1)..(186): NCBI GI NO: 34895718 NR Description: putative peptide transport protein
  misc_feature (1)..(179): NCBI GI NO: 7489404 NR Description: peptide transport protein - barley
  misc_feature (1)..(191): NCBI GI NO: 34907736 NR Description: putative peptide transport protein
  misc_feature (1)..(187): NCBI GI NO: 4102839 NR Description: LeOPT1 [Lycopersicon esculentum]
MGPIWAAGILVITGSSTQNTFSLQQASTMDRRLAPGLSTFEIPAGSMTVFGLLAMLFTLFVYDRALIRVARRFTGLDRGISFLHRMGVGFAISVLATLVAGFVERHRRDAAAAAGATDAGTSPLSAYWLVPQYALHGVAEAFTSVGHLEFMYDQAPESMRSTATALFWLSISLGSYASTCWWTLCTAGARGPAAPTGCRTTSITAGWITFTGSSRYCRS

SEQ ID NO: 40847 - protein, 191 aa, Zea mays subsp. mays
  peptide (1)..(191): Ceres Seq. ID no. 12383498
  misc_feature (1)..(143): Pfam Name: Pfam Description:  POT family
  misc_feature (1)..(156): NCBI GI NO: 15221439 NR Description: peptide transporter, putative
  misc_feature (1)..(151): NCBI GI NO: 7484755 NR Description: nitrite transport protein, chloroplast - cucumber
  misc_feature (1)..(151): NCBI GI NO: 15391731 NR Description: nitrite transporter [Cucumis sativus]
  misc_feature (1)..(151): NCBI GI NO: 18409391 NR Description: putative peptide transporter; protein id:At1g69870
  misc_feature (1)..(151): NCBI GI NO: 25404847 NR Description: probable peptide transporter T17F3.10
  misc_feature (1)..(163): NCBI GI NO: 34394155 NR Description: putative peptide transport protein
  misc_feature (1)..(158): NCBI GI NO: 34895718 NR Description: putative peptide transport protein
  misc_feature (1)..(151): NCBI GI NO: 7489404 NR Description: peptide transport protein - barley
  misc_feature (1)..(163): NCBI GI NO: 34907736 NR Description: putative peptide transport protein
  misc_feature (1)..(159): NCBI GI NO: 4102839 NR Description: LeOPT1 [Lycopersicon esculentum]
MDRRLAPGLSTFEIPAGSMTVFGLLAMLFTLFVYDRALIRVARRFTGLDRGISFLHRMGVGFAISVLATLVAGFVERHRRDAAAAAGATDAGTSPLSAYWLVPQYALHGVAEAFTSVGHLEFMYDQAPESMRSTATALFWLSISLGSYASTCWWTLCTAGARGPAAPTGCRTTSITAGWITFTGSSRYCRS

SEQ ID NO: 40848 - protein, 173 aa, Zea mays subsp. mays
  peptide (1)..(173): Ceres Seq. ID no. 12383499
  misc_feature (1)..(125): Pfam Name: Pfam Description:  POT family
  misc_feature (1)..(138): NCBI GI NO: 15221439 NR Description: peptide transporter, putative
  misc_feature (1)..(133): NCBI GI NO: 7484755 NR Description: nitrite transport protein, chloroplast - cucumber
  misc_feature (1)..(133): NCBI GI NO: 15391731 NR Description: nitrite transporter [Cucumis sativus]
  misc_feature (1)..(133): NCBI GI NO: 18409391 NR Description: putative peptide transporter; protein id:At1g69870
  misc_feature (1)..(133): NCBI GI NO: 25404847 NR Description: probable peptide transporter T17F3.10
  misc_feature (1)..(145): NCBI GI NO: 34394155 NR Description: putative peptide transport protein
  misc_feature (1)..(140): NCBI GI NO: 34895718 NR Description: putative peptide transport protein
  misc_feature (1)..(133): NCBI GI NO: 7489404 NR Description: peptide transport protein - barley
  misc_feature (1)..(145): NCBI GI NO: 34907736 NR Description: putative peptide transport protein
  misc_feature (1)..(141): NCBI GI NO: 4102839 NR Description: LeOPT1 [Lycopersicon esculentum]
MTVFGLLAMLFTLFVYDRALIRVARRFTGLDRGISFLHRMGVGFAISVLATLVAGFVERHRRDAAAAAGATDAGTSPLSAYWLVPQYALHGVAEAFTSVGHLEFMYDQAPESMRSTATALFWLSISLGSYASTCWWTLCTAGARGPAAPTGCRTTSITAGWITFTGSSRYCRS

SEQ ID NO: 40849 - DNA, 2345 bp, Zea mays subsp. mays
  misc_feature (1)..(2345): Ceres Seq. ID no. 13637382
atcagacagacgcagactctctcacccgactcgtcagacgtcagccagcagttcgaaaccaaggatcgatccaggagcttccggaaggcgaggcgcgcgcgcagcgtcgaggtgctggtgccggtgccgcccatggatcgggctcgcggatccgcgttcctgctcggcgtcctgctcgcaggatccttgttcgcgttttcagttgccatagaggagaccaagaagctcgggaccgtgatcggtatcgatctcggtaccacctactcctgtgtcggtgtgtacaagaacggtcatgtcgagatcatcgccaatgaccagggtaaccgtatcacaccctcatgggttgccttcaccgatagcgagaggctcatcgggtgaggctgccaagaaccaggcagccgtcaaccctgagaggaccatctttgacgtcaagcgtctcatcggaagaaagttcgcggacaaggaagtccagagggacatgaaacttgttccctacaagattattaacaaggatggcaagccctacattcaggtcaagatcaaggatggggagaacaaggtcttcagccctgaggagatcagtgccatgattcttggcaagatgaaggatactgctgaggcataccttggcaagaagatcaatgatgctgtcgtcactgtccctgcgtacttcaatgatgcgcagaggcaggcaaccaaggatgctggtgtcattgctggcctcaatgttgctaggatcatcaatgagccaactgctgctgctattgcctatggtttggacaagaagggtggcgagaagaacatccttgtctttgaccttggtggtggcacttttgatgtcagtatcttgaccattgacaacggtgtgtttgaggtgctggccaccaatggtgacactcatcttggaggtgaggactttgaccagaggatcatggagtacttcatcaagttgatcaagaagaagtacagcaaggacatcagcaaggacaaccgtgctcttggaaagctgaggagggaagccgagcgcgccaagagagccctcagcaaccagcaccaggtccgtgttgagatcgagtccctctttgacgggaccgatttctcggagccgctgacccgtgccaggtttgaggagctgaacaacgacctcttccgcaagaccatgggccctgtcaagaaggccatggaggatgctggccttgagaagagccagatccacgagatcgtcctggttggtggaagcaccaggattcccaaggtccagcagctcctgcgggactacttcgacggcaaggagcccaacaagggtgtcaaccctgatgaggctgttgcctttggtgccgctgtgcagggaagcatcttgagcggcgagggtggtgacgagaccaaagatatcctcctccttgatgtggctcccctcaccctgggtatcgagaccgtcggtggagtcatgaccaagttgatcccgaggaacactgtcatcccgaccaagaagtcgcaggtgttcaccacctaccaggaccagcagaccactgtctccatccaggtctttgagggtgagcgcagtatgaccaaggactgccgtcttctcggcaagttcgacctcaacggcattgcgccagctccaaggggcacaccccagatcgaggtgaccttcgaggtggacgccaacggtatcctgaacgtgaaggcggaggacaagggcacgggcaagtcggagaagatcacgatcacgaacgagaaggggcggctgagccaggaggagatcgaccgcatggtgcgggaggcggaggagttcgcggaggaggacaagaaggtgaaggagcggatcgacgcccgcaaccagctggagacgtacgtgtacaacatgaagaacacggtgggcgacaaggacaagctcgcggacaagctggaggcggaggagaaggagaaggtggaggaggccctcaaggaggcgctggagtggctggacgacaaccagtcggccgagaaggaggactacgaggagaagctcaaggaggtggaggccgtgtgcaaccccatcgtgtcggccgtgtaccagcggtcgggcggcgcccctggcggtgacgctgacggcggtgttgacgacgaccacgacgagctgtagatggttgtagatggtggtggtgacgtggagtgccgggagccgagccaaattttgtaacggtgtttagcggcggacaatacttattactaatcttggtgctgctctgccaatagccgtgctgagcgtagaaactgtttgtttgtaatttttttttcttctacttccttggttgttcaggattcggattcgaattttatgtgaaaaaagaagtcgcgctttt

SEQ ID NO: 40850 - protein, 610 aa, Zea mays subsp. mays
  peptide (1)..(610): Ceres Seq. ID no. 13637383
  misc_feature (28)..(610): NCBI GI NO: 729623 NR Description: Luminal binding protein 5 precursor
  misc_feature (28)..(610): NCBI GI NO: 11277127 NR Description: dnaK-type molecular chaperone BiP precursor
  misc_feature (28)..(610): NCBI GI NO: 1346172 NR Description: Luminal binding protein precursor
  misc_feature (28)..(610): NCBI GI NO: 10944737 NR Description: putative luminal binding protein
  misc_feature (28)..(610): NCBI GI NO: 15241844 NR Description: luminal binding protein 1 precursor
  misc_feature (28)..(610): NCBI GI NO: 24496493 NR Description: BiP chaperone BIP-L [Arabidopsis thaliana]
  misc_feature (144)..(610): NCBI GI NO: 168424 NR Description: polypeptide chain-binding protein
  misc_feature (28)..(610): NCBI GI NO: 1037176 NR Description: immunoglobulin heavy chain binding protein
  misc_feature (28)..(608): NCBI GI NO: 29539338 NR Description: Heat shock 70 kDa protein
  misc_feature (28)..(606): NCBI GI NO: 23480384 NR Description: heat shock protein [Plasmodium yoelii yoelii]
MSRSSPMTRVTVSHPHGLPSPIARGSSGEAAKNQAAVNPERTIFDVKRLIGRKFADKEVQRDMKLVPYKIINKDGKPYIQVKIKDGENKVFSPEEISAMILGKMKDTAEAYLGKKINDAVVTVPAYFNDAQRQATKDAGVIAGLNVARIINEPTAAAIAYGLDKKGGEKNILVFDLGGGTFDVSILTIDNGVFEVLATNGDTHLGGEDFDQRIMEYFIKLIKKKYSKDISKDNRALGKLRREAERAKRALSNQHQVRVEIESLFDGTDFSEPLTRARFEELNNDLFRKTMGPVKKAMEDAGLEKSQIHEIVLVGGSTRIPKVQQLLRDYFDGKEPNKGVNPDEAVAFGAAVQGSILSGEGGDETKDILLLDVAPLTLGIETVGGVMTKLIPRNTVIPTKKSQVFTTYQDQQTTVSIQVFEGERSMTKDCRLLGKFDLNGIAPAPRGTPQIEVTFEVDANGILNVKAEDKGTGKSEKITITNEKGRLSQEEIDRMVREAEEFAEEDKKVKERIDARNQLETYVYNMKNTVGDKDKLADKLEAEEKEKVEEALKEALEWLDDNQSAEKEDYEEKLKEVEAVCNPIVSAVYQRSGGAPGGDADGGVDDDHDEL

SEQ ID NO: 40851 - protein, 604 aa, Zea mays subsp. mays
  peptide (1)..(604): Ceres Seq. ID no. 13637384
  misc_feature (22)..(604): NCBI GI NO: 729623 NR Description: Luminal binding protein 5 precursor
  misc_feature (22)..(604): NCBI GI NO: 11277127 NR Description: dnaK-type molecular chaperone BiP precursor
  misc_feature (22)..(604): NCBI GI NO: 1346172 NR Description: Luminal binding protein precursor
  misc_feature (22)..(604): NCBI GI NO: 10944737 NR Description: putative luminal binding protein
  misc_feature (22)..(604): NCBI GI NO: 15241844 NR Description: luminal binding protein 1 precursor
  misc_feature (22)..(604): NCBI GI NO: 24496493 NR Description: BiP chaperone BIP-L [Arabidopsis thaliana]
  misc_feature (138)..(604): NCBI GI NO: 168424 NR Description: polypeptide chain-binding protein
  misc_feature (22)..(604): NCBI GI NO: 1037176 NR Description: immunoglobulin heavy chain binding protein
  misc_feature (22)..(602): NCBI GI NO: 29539338 NR Description: Heat shock 70 kDa protein
  misc_feature (22)..(600): NCBI GI NO: 23480384 NR Description: heat shock protein [Plasmodium yoelii yoelii]
MTRVTVSHPHGLPSPIARGSSGEAAKNQAAVNPERTIFDVKRLIGRKFADKEVQRDMKLVPYKIINKDGKPYIQVKIKDGENKVFSPEEISAMILGKMKDTAEAYLGKKINDAVVTVPAYFNDAQRQATKDAGVIAGLNVARIINEPTAAAIAYGLDKKGGEKNILVFDLGGGTFDVSILTIDNGVFEVLATNGDTHLGGEDFDQRIMEYFIKLIKKKYSKDISKDNRALGKLRREAERAKRALSNQHQVRVEIESLFDGTDFSEPLTRARFEELNNDLFRKTMGPVKKAMEDAGLEKSQIHEIVLVGGSTRIPKVQQLLRDYFDGKEPNKGVNPDEAVAFGAAVQGSILSGEGGDETKDILLLDVAPLTLGIETVGGVMTKLIPRNTVIPTKKSQVFTTYQDQQTTVSIQVFEGERSMTKDCRLLGKFDLNGIAPAPRGTPQIEVTFEVDANGILNVKAEDKGTGKSEKITITNEKGRLSQEEIDRMVREAEEFAEEDKKVKERIDARNQLETYVYNMKNTVGDKDKLADKLEAEEKEKVEEALKEALEWLDDNQSAEKEDYEEKLKEVEAVCNPIVSAVYQRSGGAPGGDADGGVDDDHDEL

SEQ ID NO: 40852 - protein, 548 aa, Zea mays subsp. mays
  peptide (1)..(548): Ceres Seq. ID no. 13637385
  misc_feature (1)..(548): NCBI GI NO: 729623 NR Description: Luminal binding protein 5 precursor
  misc_feature (1)..(548): NCBI GI NO: 11277127 NR Description: dnaK-type molecular chaperone BiP precursor
  misc_feature (1)..(548): NCBI GI NO: 1346172 NR Description: Luminal binding protein precursor
  misc_feature (1)..(548): NCBI GI NO: 10944737 NR Description: putative luminal binding protein
  misc_feature (1)..(548): NCBI GI NO: 15241844 NR Description: luminal binding protein 1 precursor
  misc_feature (1)..(548): NCBI GI NO: 24496493 NR Description: BiP chaperone BIP-L [Arabidopsis thaliana]
  misc_feature (82)..(548): NCBI GI NO: 168424 NR Description: polypeptide chain-binding protein
  misc_feature (1)..(548): NCBI GI NO: 1037176 NR Description: immunoglobulin heavy chain binding protein
  misc_feature (1)..(546): NCBI GI NO: 29539338 NR Description: Heat shock 70 kDa protein
  misc_feature (1)..(544): NCBI GI NO: 23480384 NR Description: heat shock protein [Plasmodium yoelii yoelii]
MKLVPYKIINKDGKPYIQVKIKDGENKVFSPEEISAMILGKMKDTAEAYLGKKINDAVVTVPAYFNDAQRQATKDAGVIAGLNVARIINEPTAAAIAYGLDKKGGEKNILVFDLGGGTFDVSILTIDNGVFEVLATNGDTHLGGEDFDQRIMEYFIKLIKKKYSKDISKDNRALGKLRREAERAKRALSNQHQVRVEIESLFDGTDFSEPLTRARFEELNNDLFRKTMGPVKKAMEDAGLEKSQIHEIVLVGGSTRIPKVQQLLRDYFDGKEPNKGVNPDEAVAFGAAVQGSILSGEGGDETKDILLLDVAPLTLGIETVGGVMTKLIPRNTVIPTKKSQVFTTYQDQQTTVSIQVFEGERSMTKDCRLLGKFDLNGIAPAPRGTPQIEVTFEVDANGILNVKAEDKGTGKSEKITITNEKGRLSQEEIDRMVREAEEFAEEDKKVKERIDARNQLETYVYNMKNTVGDKDKLADKLEAEEKEKVEEALKEALEWLDDNQSAEKEDYEEKLKEVEAVCNPIVSAVYQRSGGAPGGDADGGVDDDHDEL

SEQ ID NO: 40853 - DNA, 1674 bp, Zea mays subsp. mays; identical to SEQ ID NO: 31736
  misc_feature (1)..(1674): Ceres Seq. ID no. 12405979
  misc_feature (1669)..(1669): n is a, c, t, g, unknown, or other
  misc_feature (1667)..(1667): n is a, c, t, g, unknown, or other
  misc_feature (1175)..(1175): n is a, c, t, g, unknown, or other

SEQ ID NO: 40854 - protein, 264 aa, Zea mays subsp. mays; identical to SEQ ID NO: 31737
  peptide (1)..(264): Ceres Seq. ID no. 12405980
  misc_feature (1)..(253): Pfam Name: Pfam Description:  Protein phosphatase 2C
  misc_feature (1)..(264): NCBI GI NO: 34908256 NR Description: putative protein phosphatase 2C
  misc_feature (1)..(262): NCBI GI NO: 7768151 NR Description: protein phpsphatase 2C (PP2C) [Fagus sylvatica]
  misc_feature (1)..(264): NCBI GI NO: 10432446 NR Description: protein phosphatase 2C [Nicotiana tabacum]
  misc_feature (1)..(198): NCBI GI NO: 15227078 NR Description: protein phosphatase 2C
  misc_feature (229)..(262): NCBI GI NO: 15227078 NR Description: protein phosphatase 2C
  misc_feature (1)..(262): NCBI GI NO: 15237839 NR Description: protein phosphatase 2C
  misc_feature (1)..(262): NCBI GI NO: 16226419 NR Description: AT5g59220/mnc17_110 [Arabidopsis thaliana]
  misc_feature (1)..(262): NCBI GI NO: 33309516 NR Description: protein phosphatase 2C [Prunus avium]
  misc_feature (1)..(214): NCBI GI NO: 15229745 NR Description: protein phosphatase 2C
  misc_feature (227)..(262): NCBI GI NO: 15229745 NR Description: protein phosphatase 2C
  misc_feature (149)..(149): Xaa is any aa, unknown or other

SEQ ID NO: 40855 - protein, 260 aa, Zea mays subsp. mays; identical to SEQ ID NO: 31738
  peptide (1)..(260): Ceres Seq. ID no. 12405981
  misc_feature (1)..(249): Pfam Name: Pfam Description:  Protein phosphatase 2C
  misc_feature (1)..(260): NCBI GI NO: 34908256 NR Description: putative protein phosphatase 2C
  misc_feature (1)..(258): NCBI GI NO: 7768151 NR Description: protein phpsphatase 2C (PP2C) [Fagus sylvatica]
  misc_feature (1)..(260): NCBI GI NO: 10432446 NR Description: protein phosphatase 2C [Nicotiana tabacum]
  misc_feature (1)..(194): NCBI GI NO: 15227078 NR Description: protein phosphatase 2C
  misc_feature (225)..(258): NCBI GI NO: 15227078 NR Description: protein phosphatase 2C
  misc_feature (1)..(258): NCBI GI NO: 15237839 NR Description: protein phosphatase 2C
  misc_feature (1)..(258): NCBI GI NO: 16226419 NR Description: AT5g59220/mnc17_110 [Arabidopsis thaliana]
  misc_feature (1)..(258): NCBI GI NO: 33309516 NR Description: protein phosphatase 2C [Prunus avium]
  misc_feature (1)..(210): NCBI GI NO: 15229745 NR Description: protein phosphatase 2C
  misc_feature (223)..(258): NCBI GI NO: 15229745 NR Description: protein phosphatase 2C
  misc_feature (145)..(145): Xaa is any aa, unknown or other

SEQ ID NO: 40856 - protein, 259 aa, Zea mays subsp. mays; identical to SEQ ID NO: 31739
  peptide (1)..(259): Ceres Seq. ID no. 12405982
  misc_feature (1)..(248): Pfam Name: Pfam Description:  Protein phosphatase 2C
  misc_feature (1)..(259): NCBI GI NO: 34908256 NR Description: putative protein phosphatase 2C
  misc_feature (1)..(257): NCBI GI NO: 7768151 NR Description: protein phpsphatase 2C (PP2C) [Fagus sylvatica]
  misc_feature (1)..(259): NCBI GI NO: 10432446 NR Description: protein phosphatase 2C [Nicotiana tabacum]
  misc_feature (1)..(193): NCBI GI NO: 15227078 NR Description: protein phosphatase 2C
  misc_feature (224)..(257): NCBI GI NO: 15227078 NR Description: protein phosphatase 2C
  misc_feature (1)..(257): NCBI GI NO: 15237839 NR Description: protein phosphatase 2C
  misc_feature (1)..(257): NCBI GI NO: 16226419 NR Description: AT5g59220/mnc17_110 [Arabidopsis thaliana]
  misc_feature (1)..(257): NCBI GI NO: 33309516 NR Description: protein phosphatase 2C [Prunus avium]
  misc_feature (1)..(209): NCBI GI NO: 15229745 NR Description: protein phosphatase 2C
  misc_feature (222)..(257): NCBI GI NO: 15229745 NR Description: protein phosphatase 2C
  misc_feature (144)..(144): Xaa is any aa, unknown or other

SEQ ID NO: 40857 - DNA, 1914 bp, Zea mays subsp. mays
  misc_feature (1)..(1914): Ceres Seq. ID no. 12419897
gcacgagaccattacctagaacatcctaatcaaaaaagttcttctgatctctgacttctgagcgaggagtggacgagtggtgtgccgtcgtccggttcccgttggtttggcgatgaggcgcgctcgcggtcgccgcgggctgctgcttctcctcggcgtggcgctctcggcggctgcgctgctccgtggctgcgcggggcagcaaggggaggacggctcggacgcccctgcggcggcggcggcggagacggcccccatggaggagaaggagcgcagggcgctgtacgccgccatcgagagcttcgtcggcaaggggtggaacggctccggggctctaccccagacccctgcggctggtctccccatccagggggtgtcatgtgatctcttcaatggcctgtggtacccaacagtgatgagcattggcccagtccttgacaactcgctgcagtgcggccccgacgccaagttcagcgcccagctgttcgacctgaggcgcctccggacgctgtctttctacagctgcttcccggcgagcaaccccacggccatcccgaccggcagctgggagaagctggcggggacgctggagacgctggagttccgcaccaacccgggcctgaacggcgccatcccggcgtccctcggccgcctggccagcctgcagtcgctggtgctcgtggagaacaacctgacggggcccgtgcccgcggagctgggcgcgctgtcgaggctgagacggctggtgctgtccgggaacgggctgtcggggccgatcccggtgacactcggtggcctcacggggctcctgaagatggacctgagcagcaacctgctgcagggcagcatcccgccggagctcgcggggctcaggagcctcacgctgctggacctcaggaacaacagcctcaccggcgggctgcccccagttcgtgcagggcatggcgtcgctgcaggacctgctgctctcgaacaacccgctgggcggcggcctgccgcagtccggctggggggcgctggcgggcctggccacgctggacctgtccaacgtcggcctcgtgggcgccataccggggtccatggcggccctgacggggctccggttcctggcgctggaccacaaccgcctgacgggggccgtgccgcccgagctcgcccggctgcccagcatcggcgcgctgtacctgaacggcaacaacctgacggggacgctggagttctcggccgggttctaccagcgcatggggcggcggttcgcgtcgtgggacaaccccgggctgtgctacaacgtcgcggccgtggacgcggcccacgcgccgtcgggcgtggtggtgtgcaaggacctgcaggagcccagcgtgggcggcggcgcgcgggacggggacggggacggggacgcggaggaggacgggacgaagcccgaggcgggctccatcctcgtggcctcctcgtcgtccggcatgccggttggcagtgtcggtgggctcgggtacctggtggtggttcggggaatggcggctgcggttcttgggttggtgtccctcctacaatagcaagcaagcaggttcagaagaagaacacggagaaacttgaagtaatgctaggtaggttagcacgaagtagtttctgcgcgttctctgtgatcttttggcatttgtttttggctgctggtggcttaccatcgtcagatggtgacggaggaaggagggaacatggatctggatggtgtgagccacagattacattacagtagtagagtaaactatgagagttcttgtggactgaaggtgtgtagtggtggatagggtagcttctccggggttcttttgtgtgtaattagcctgtgtcgccctgtggtgtcatgttacaacagcaagtggaaatctaagctggttcgtccgttgttggagaatc

SEQ ID NO: 40858 - protein, 546 aa, Zea mays subsp. mays
  peptide (1)..(546): Ceres Seq. ID no. 12419898
  misc_feature (283)..(438): Pfam Name: Pfam Description:  High molecular weight glutenin subunit
  misc_feature (1)..(278): NCBI GI NO: 34894182 NR Description: P0439B06.12
  misc_feature (130)..(276): NCBI GI NO: 34894182 NR Description: P0439B06.12
  misc_feature (44)..(271): NCBI GI NO: 18409119 NR Description: leucine rich repeat protein family
  misc_feature (49)..(271): NCBI GI NO: 15222215 NR Description: leucine rich repeat protein family
  misc_feature (47)..(271): NCBI GI NO: 15230865 NR Description: leucine rich repeat protein family
  misc_feature (49)..(271): NCBI GI NO: 11994758 NR Description: contains similarity to elicitor-inducible receptorEIR~gene_id:T5M7
  misc_feature (159)..(270): NCBI GI NO: 18409119 NR Description: leucine rich repeat protein family
  misc_feature (142)..(270): NCBI GI NO: 15222215 NR Description: leucine rich repeat protein family
  misc_feature (142)..(270): NCBI GI NO: 11994758 NR Description: contains similarity to elicitor-inducible receptorEIR~gene_id:T5M7
  misc_feature (142)..(270): NCBI GI NO: 15230865 NR Description: leucine rich repeat protein family
MRRARGRRGLLLLLGVALSAAALLRGCAGQQGEDGSDAPAAAAAETAPMEEKERRALYAAIESFVGKGWNGSGALPQTPAAGLPIQGVSCDLFNGLWYPTVMSIGPVLDNSLQCGPDAKFSAQLFDLRRLRTLSFYSCFPASNPTAIPTGSWEKLAGTLETLEFRTNPGLNGAIPASLGRLASLQSLVLVENNLTGPVPAELGALSRLRRLVLSGNGLSGPIPVTLGGLTGLLKMDLSSNLLQGSIPPELAGLRSLTLLDLRNNSLTGGLPPVRAGHGVAAGPAALEQPAGRRPAAVRLGGAGGPGHAGPVQRRPRGRHTGVHGGPDGAPVPGAGPQPPDGGRAARARPAAQHRRAVPERQQPDGDAGVLGRVLPAHGAAVRVVGQPRAVLQRRGRGRGPRAVGRGGVQGPAGAQRGRRRAGRGRGRGRGGGRDEARGGLHPRGLLVVRHAGWQCRWARVPGGGSGNGGCGSWVGVPPTIASKQVQKKNTEKLEVMLGRLARSSFCAFSVIFWHLFLAAGGLPSSDGDGGRREHGSGWCEPQITLQ

SEQ ID NO: 40859 - protein, 498 aa, Zea mays subsp. mays
  peptide (1)..(498): Ceres Seq. ID no. 12419899
  misc_feature (235)..(390): Pfam Name: Pfam Description:  High molecular weight glutenin subunit
  misc_feature (1)..(230): NCBI GI NO: 34894182 NR Description: P0439B06.12
  misc_feature (82)..(228): NCBI GI NO: 34894182 NR Description: P0439B06.12
  misc_feature (1)..(223): NCBI GI NO: 18409119 NR Description: leucine rich repeat protein family
  misc_feature (1)..(223): NCBI GI NO: 15222215 NR Description: leucine rich repeat protein family
  misc_feature (1)..(223): NCBI GI NO: 15230865 NR Description: leucine rich repeat protein family
  misc_feature (1)..(223): NCBI GI NO: 11994758 NR Description: contains similarity to elicitor-inducible receptorEIR~gene_id:T5M7
  misc_feature (111)..(222): NCBI GI NO: 18409119 NR Description: leucine rich repeat protein family
  misc_feature (94)..(222): NCBI GI NO: 15222215 NR Description: leucine rich repeat protein family
  misc_feature (94)..(222): NCBI GI NO: 11994758 NR Description: contains similarity to elicitor-inducible receptorEIR~gene_id:T5M7
  misc_feature (94)..(222): NCBI GI NO: 15230865 NR Description: leucine rich repeat protein family
MEEKERRALYAAIESFVGKGWNGSGALPQTPAAGLPIQGVSCDLFNGLWYPTVMSIGPVLDNSLQCGPDAKFSAQLFDLRRLRTLSFYSCFPASNPTAIPTGSWEKLAGTLETLEFRTNPGLNGAIPASLGRLASLQSLVLVENNLTGPVPAELGALSRLRRLVLSGNGLSGPIPVTLGGLTGLLKMDLSSNLLQGSIPPELAGLRSLTLLDLRNNSLTGGLPPVRAGHGVAAGPAALEQPAGRRPAAVRLGGAGGPGHAGPVQRRPRGRHTGVHGGPDGAPVPGAGPQPPDGGRAARARPAAQHRRAVPERQQPDGDAGVLGRVLPAHGAAVRVVGQPRAVLQRRGRGRGPRAVGRGGVQGPAGAQRGRRRAGRGRGRGRGGGRDEARGGLHPRGLLVVRHAGWQCRWARVPGGGSGNGGCGSWVGVPPTIASKQVQKKNTEKLEVMLGRLARSSFCAFSVIFWHLFLAAGGLPSSDGDGGRREHGSGWCEPQITLQ

SEQ ID NO: 40860 - protein, 445 aa, Zea mays subsp. mays
  peptide (1)..(445): Ceres Seq. ID no. 12419900
  misc_feature (182)..(337): Pfam Name: Pfam Description:  High molecular weight glutenin subunit
  misc_feature (1)..(177): NCBI GI NO: 34894182 NR Description: P0439B06.12
  misc_feature (29)..(175): NCBI GI NO: 34894182 NR Description: P0439B06.12
  misc_feature (1)..(170): NCBI GI NO: 18409119 NR Description: leucine rich repeat protein family
  misc_feature (1)..(170): NCBI GI NO: 15222215 NR Description: leucine rich repeat protein family
  misc_feature (1)..(170): NCBI GI NO: 15230865 NR Description: leucine rich repeat protein family
  misc_feature (1)..(170): NCBI GI NO: 11994758 NR Description: contains similarity to elicitor-inducible receptorEIR~gene_id:T5M7
  misc_feature (58)..(169): NCBI GI NO: 18409119 NR Description: leucine rich repeat protein family
  misc_feature (41)..(169): NCBI GI NO: 15222215 NR Description: leucine rich repeat protein family
  misc_feature (41)..(169): NCBI GI NO: 11994758 NR Description: contains similarity to elicitor-inducible receptorEIR~gene_id:T5M7
  misc_feature (41)..(169): NCBI GI NO: 15230865 NR Description: leucine rich repeat protein family
MSIGPVLDNSLQCGPDAKFSAQLFDLRRLRTLSFYSCFPASNPTAIPTGSWEKLAGTLETLEFRTNPGLNGAIPASLGRLASLQSLVLVENNLTGPVPAELGALSRLRRLVLSGNGLSGPIPVTLGGLTGLLKMDLSSNLLQGSIPPELAGLRSLTLLDLRNNSLTGGLPPVRAGHGVAAGPAALEQPAGRRPAAVRLGGAGGPGHAGPVQRRPRGRHTGVHGGPDGAPVPGAGPQPPDGGRAARARPAAQHRRAVPERQQPDGDAGVLGRVLPAHGAAVRVVGQPRAVLQRRGRGRGPRAVGRGGVQGPAGAQRGRRRAGRGRGRGRGGGRDEARGGLHPRGLLVVRHAGWQCRWARVPGGGSGNGGCGSWVGVPPTIASKQVQKKNTEKLEVMLGRLARSSFCAFSVIFWHLFLAAGGLPSSDGDGGRREHGSGWCEPQITLQ

SEQ ID NO: 40861 - DNA, 2516 bp, Zea mays subsp. mays
  misc_feature (1)..(2516): Ceres Seq. ID no. 12419327
gcacgagaccattacctagaacatcctaatcgaaaagtactcccgtgcgctagtgcgctcggcgctgcccccgtccgcccgcagtccgtccccgctcgccgcccatgcgctcgccggccgcccctcggcgctcccccatctcctcccgctccgcccccgccctccgtctggtagtccgtcgccgctcctcccgcacgccagcacgacctagtagacggctcgaagcgaagacggtcccatttccagtctccgtggtcaagatggatttagaggtatccgagggttcaggtactaatgccacctcggatgaccaatcggtgcaaacgctgcctagaagggcaaagcttttggagtattttcaaccggagttagttgaggtcaatggcgtgatgaaggctatttgcaaatattgcggggcgatgttgaggagttcaagcacaaatagccttagaaaccacgttgcggatacatgtcctaaaatttcagttgaggaccgcaagcaattcattgctacaatggaaaaaggaccagcggaagcttcatttgtgtttgactctcaaaaggctcgtgagtgtatggttaagtggtgcatcagtgccgaggtcgcattcaacaagtttgacgatcctttctttgctcagtggatggagtcaatgcagccatcattcagcggtgttgggcgtcaaacaatgcaaaatgattgtattaccagattcaagatgatgaggcaagagctaagaaatgagctacaaagtcttaactctcggatttgcttgacaactaatctttggacctcaaatcagaagttgggttatctttgcttgacagcccactacattaatgcagactttatcttgaaaaaaaagattattgcgttcaaatatttgaaatatccacatacaggcctagcaatcaaagaaggaattacagagtgtctcaaagagtgggggataaaagagaagatgtttactatcacattagataatgtttctaacaatctgtcagtgcgtgaccttcgagaaagtgggctatttggaggcgatcttcgtattgtccaatgttgtgcacacatattgattctcttagttcaagatggaatggcaattgctcatggagcaatctataagattcgtgagctggtcagacatatcaattcctcaccctcccgcatacaagcttttaatgggattgctgagaggtcttgattgccttcaaaggatagattaattcttgacgttccaaaccgttggaattcgacacacgacatgattatggaggccattgagtacaaggttgtcttgaaaagatatgctgaagaacaacttgagccttcaccaaatgatgaagagtggacaaattctgaggcaattggagagtttcttgaggcatttgagaaagctacaaaagcattctcgacacatagaagtccaacatctcatttgtttttacataatgtgctatgtatccatcgaactctgagaaatacaaattggcaaatcaattgtgtgcttaaggattcggcacgggcgatggatgctaagttcgataaatactgggagaagggcaagtataacatgacacttgtcttagccaccatacttgatccatcaaagaagatggattttttggacttcttttatgagaagatgtctcaatattttgttgacatccagataaacgtggtcttggttaaacaatgtctcaccaaattatttgaaaaatatgcaacacttgttcaaatagataataaaagttcaccttttattgatataaggactagtaatttaggctcaacagttcttggaaaaagaaggttggatgaagaattttctcaatggtcccaaataagaggaagacgttttccaaagtctgagcttgacacatacttagaggaagaacttgtgagaatagatgaaagatttgaaattctaaattggtggaggacaaatgcaaacaaatacccggtgctttcagctatggcgcgtgatattttagcaatacctttgagcactgttccttcggagtttgcgttcagcgctggtggtcgtattcttgatgataatcgaagcacaatgacaccagaaacacttgaatgctttgtatgctgtaaggattggttatatgaatacccaaatattcaagcttagttgatctgacttccttcaaacatgttgaacagtacggcattcaagggagatttatgcatcattctgcgggctcctgtagctgcttagggatgacccttccactgctgctcgcttcaagcttgatcagatactctttctactgatacgcaaggtgtaaaactgccgtgttatgtggtagattggtgtgtgtactgttttctttatgtgtaaaactgtctgcttgatcaggggtgagtattgttttctttatcactctggattcatggtaatgagttcctatttcagtatttcttgccaaaaagattgttgtgcattaaggatatttgacagatgttctttgttatttctctcaagacctgaaagtttatc

SEQ ID NO: 40862 - protein, 366 aa, Zea mays subsp. mays
  peptide (1)..(366): Ceres Seq. ID no. 12419328
  misc_feature (53)..(366): NCBI GI NO: 34908974 NR Description: P0003D09.25
  misc_feature (8)..(366): NCBI GI NO: 14702012 NR Description: putative transposase
  misc_feature (3)..(366): NCBI GI NO: 37531504 NR Description: putative transposable element
  misc_feature (77)..(366): NCBI GI NO: 34894320 NR Description: unnamed protein product
  misc_feature (51)..(366): NCBI GI NO: 15223892 NR Description: transposase, putative; protein id: At1g42110.1
  misc_feature (124)..(366): NCBI GI NO: 37535596 NR Description: putative Tam3-transposase
  misc_feature (59)..(349): NCBI GI NO: 32490366 NR Description: OSJNBa0049H08.1
  misc_feature (93)..(366): NCBI GI NO: 8778836 NR Description: T6D22.19 [Arabidopsis thaliana]
  misc_feature (186)..(366): NCBI GI NO: 4580990 NR Description: putative transposase [Arabidopsis thaliana]
  misc_feature (103)..(366): NCBI GI NO: 15228474 NR Description: putative transposase; protein id: At3g42170.1
MRSPAAPRRSPISSRSAPALRLVVRRRSSRTPARPSRRLEAKTVPFPVSVVKMDLEVSEGSGTNATSDDQSVQTLPRRAKLLEYFQPELVEVNGVMKAICKYCGAMLRSSSTNSLRNHVADTCPKISVEDRKQFIATMEKGPAEASFVFDSQKARECMVKWCISAEVAFNKFDDPFFAQWMESMQPSFSGVGRQTMQNDCITRFKMMRQELRNELQSLNSRICLTTNLWTSNQKLGYLCLTAHYINADFILKKKIIAFKYLKYPHTGLAIKEGITECLKEWGIKEKMFTITLDNVSNNLSVRDLRESGLFGGDLRIVQCCAHILILLVQDGMAIAHGAIYKIRELVRHINSSPSRIQAFNGIAERS

SEQ ID NO: 40863 - protein, 314 aa, Zea mays subsp. mays
  peptide (1)..(314): Ceres Seq. ID no. 12419329
  misc_feature (1)..(314): NCBI GI NO: 34908974 NR Description: P0003D09.25
  misc_feature (1)..(314): NCBI GI NO: 14702012 NR Description: putative transposase
  misc_feature (1)..(314): NCBI GI NO: 37531504 NR Description: putative transposable element
  misc_feature (25)..(314): NCBI GI NO: 34894320 NR Description: unnamed protein product
  misc_feature (1)..(314): NCBI GI NO: 15223892 NR Description: transposase, putative; protein id: At1g42110.1
  misc_feature (72)..(314): NCBI GI NO: 37535596 NR Description: putative Tam3-transposase
  misc_feature (7)..(297): NCBI GI NO: 32490366 NR Description: OSJNBa0049H08.1
  misc_feature (41)..(314): NCBI GI NO: 8778836 NR Description: T6D22.19 [Arabidopsis thaliana]
  misc_feature (134)..(314): NCBI GI NO: 4580990 NR Description: putative transposase [Arabidopsis thaliana]
  misc_feature (51)..(314): NCBI GI NO: 15228474 NR Description: putative transposase; protein id: At3g42170.1
MDLEVSEGSGTNATSDDQSVQTLPRRAKLLEYFQPELVEVNGVMKAICKYCGAMLRSSSTNSLRNHVADTCPKISVEDRKQFIATMEKGPAEASFVFDSQKARECMVKWCISAEVAFNKFDDPFFAQWMESMQPSFSGVGRQTMQNDCITRFKMMRQELRNELQSLNSRICLTTNLWTSNQKLGYLCLTAHYINADFILKKKIIAFKYLKYPHTGLAIKEGITECLKEWGIKEKMFTITLDNVSNNLSVRDLRESGLFGGDLRIVQCCAHILILLVQDGMAIAHGAIYKIRELVRHINSSPSRIQAFNGIAERS

SEQ ID NO: 40864 - protein, 293 aa, Zea mays subsp. mays
  peptide (1)..(293): Ceres Seq. ID no. 12419330
  misc_feature (203)..(285): Pfam Name: Pfam Description:  hAT family dimerisation domain
  misc_feature (1)..(286): NCBI GI NO: 34908974 NR Description: P0003D09.25
  misc_feature (1)..(287): NCBI GI NO: 14702012 NR Description: putative transposase
  misc_feature (1)..(285): NCBI GI NO: 37531504 NR Description: putative transposable element
  misc_feature (1)..(285): NCBI GI NO: 34894320 NR Description: unnamed protein product
  misc_feature (1)..(292): NCBI GI NO: 15223892 NR Description: transposase, putative; protein id: At1g42110.1
  misc_feature (1)..(285): NCBI GI NO: 37535596 NR Description: putative Tam3-transposase
  misc_feature (1)..(292): NCBI GI NO: 8778836 NR Description: T6D22.19 [Arabidopsis thaliana]
  misc_feature (1)..(291): NCBI GI NO: 4580990 NR Description: putative transposase [Arabidopsis thaliana]
  misc_feature (1)..(287): NCBI GI NO: 15228474 NR Description: putative transposase; protein id: At3g42170.1
  misc_feature (1)..(212): NCBI GI NO: 34901990 NR Description: hypothetical protein
MIMEAIEYKVVLKRYAEEQLEPSPNDEEWTNSEAIGEFLEAFEKATKAFSTHRSPTSHLFLHNVLCIHRTLRNTNWQINCVLKDSARAMDAKFDKYWEKGKYNMTLVLATILDPSKKMDFLDFFYEKMSQYFVDIQINVVLVKQCLTKLFEKYATLVQIDNKSSPFIDIRTSNLGSTVLGKRRLDEEFSQWSQIRGRRFPKSELDTYLEEELVRIDERFEILNWWRTNANKYPVLSAMARDILAIPLSTVPSEFAFSAGGRILDDNRSTMTPETLECFVCCKDWLYEYPNIQA

SEQ ID NO: 40865 - DNA, 2187 bp, Zea mays subsp. mays; identical to SEQ ID NO: 35877
  misc_feature (1)..(2187): Ceres Seq. ID no. 13666028

SEQ ID NO: 40866 - protein, 606 aa, Zea mays subsp. mays; identical to SEQ ID NO: 35878
  peptide (1)..(606): Ceres Seq. ID no. 13666029
  misc_feature (1)..(606): NCBI GI NO: 1706328 NR Description: Pyruvate decarboxylase isozyme 2 (PDC)
  misc_feature (1)..(606): NCBI GI NO: 29373077 NR Description: pyruvate decarboxylase 1 [Lotus corniculatus]
  misc_feature (33)..(606): NCBI GI NO: 10732644 NR Description: pyruvate decarboxylase 1 [Vitis vinifera]
  misc_feature (20)..(606): NCBI GI NO: 24745919 NR Description: pyruvate decarboxylase [Solanum tuberosum]
  misc_feature (1)..(606): NCBI GI NO: 10121330 NR Description: pyruvate decarboxylase [Fragaria x ananassa]
  misc_feature (1)..(606): NCBI GI NO: 17225598 NR Description: pyruvate decarboxylase [Fragaria x ananassa]
  misc_feature (9)..(606): NCBI GI NO: 3970823 NR Description: pyruvate decarboxylase [Zea mays]
  misc_feature (9)..(606): NCBI GI NO: 118390 NR Description: Pyruvate decarboxylase isozyme 1 (PDC)
  misc_feature (45)..(569): NCBI GI NO: 11268382 NR Description: probable pyruvate decarboxylase (EC 4
  misc_feature (43)..(532): NCBI GI NO: 2501327 NR Description: Pyruvate decarboxylase

SEQ ID NO: 40867 - protein, 579 aa, Zea mays subsp. mays; identical to SEQ ID NO: 35879
  peptide (1)..(579): Ceres Seq. ID no. 13666030
  misc_feature (1)..(579): NCBI GI NO: 1706328 NR Description: Pyruvate decarboxylase isozyme 2 (PDC)
  misc_feature (1)..(579): NCBI GI NO: 29373077 NR Description: pyruvate decarboxylase 1 [Lotus corniculatus]
  misc_feature (6)..(579): NCBI GI NO: 10732644 NR Description: pyruvate decarboxylase 1 [Vitis vinifera]
  misc_feature (1)..(579): NCBI GI NO: 24745919 NR Description: pyruvate decarboxylase [Solanum tuberosum]
  misc_feature (1)..(579): NCBI GI NO: 10121330 NR Description: pyruvate decarboxylase [Fragaria x ananassa]
  misc_feature (1)..(579): NCBI GI NO: 17225598 NR Description: pyruvate decarboxylase [Fragaria x ananassa]
  misc_feature (1)..(579): NCBI GI NO: 3970823 NR Description: pyruvate decarboxylase [Zea mays]
  misc_feature (1)..(579): NCBI GI NO: 118390 NR Description: Pyruvate decarboxylase isozyme 1 (PDC)
  misc_feature (18)..(542): NCBI GI NO: 11268382 NR Description: probable pyruvate decarboxylase (EC 4
  misc_feature (16)..(505): NCBI GI NO: 2501327 NR Description: Pyruvate decarboxylase

SEQ ID NO: 40868 - protein, 371 aa, Zea mays subsp. mays; identical to SEQ ID NO: 35880
  peptide (1)..(371): Ceres Seq. ID no. 13666031
  misc_feature (1)..(371): NCBI GI NO: 1706328 NR Description: Pyruvate decarboxylase isozyme 2 (PDC)
  misc_feature (1)..(371): NCBI GI NO: 29373077 NR Description: pyruvate decarboxylase 1 [Lotus corniculatus]
  misc_feature (1)..(371): NCBI GI NO: 10732644 NR Description: pyruvate decarboxylase 1 [Vitis vinifera]
  misc_feature (1)..(371): NCBI GI NO: 24745919 NR Description: pyruvate decarboxylase [Solanum tuberosum]
  misc_feature (1)..(371): NCBI GI NO: 10121330 NR Description: pyruvate decarboxylase [Fragaria x ananassa]
  misc_feature (1)..(371): NCBI GI NO: 17225598 NR Description: pyruvate decarboxylase [Fragaria x ananassa]
  misc_feature (1)..(371): NCBI GI NO: 3970823 NR Description: pyruvate decarboxylase [Zea mays]
  misc_feature (1)..(371): NCBI GI NO: 118390 NR Description: Pyruvate decarboxylase isozyme 1 (PDC)
  misc_feature (1)..(334): NCBI GI NO: 11268382 NR Description: probable pyruvate decarboxylase (EC 4
  misc_feature (1)..(297): NCBI GI NO: 2501327 NR Description: Pyruvate decarboxylase

SEQ ID NO: 40869 - DNA, 1174 bp, Zea mays subsp. mays; identical to SEQ ID NO: 27559
  misc_feature (1)..(1174): Ceres Seq. ID no. 12381799

SEQ ID NO: 40870 - protein, 316 aa, Zea mays subsp. mays; identical to SEQ ID NO: 27560
  peptide (1)..(316): Ceres Seq. ID no. 12381800
  misc_feature (146)..(313): Pfam Name: Pfam Description:  PAP_fibrillin
  misc_feature (103)..(316): NCBI GI NO: 38346556 NR Description: OSJNBa0035M09.17
  misc_feature (119)..(316): NCBI GI NO: 15241221 NR Description: putative protein; protein id: At5g19940

SEQ ID NO: 40871 - protein, 221 aa, Zea mays subsp. mays; identical to SEQ ID NO: 27561
  peptide (1)..(221): Ceres Seq. ID no. 12381801
  misc_feature (51)..(218): Pfam Name: Pfam Description:  PAP_fibrillin
  misc_feature (8)..(221): NCBI GI NO: 38346556 NR Description: OSJNBa0035M09.17
  misc_feature (24)..(221): NCBI GI NO: 15241221 NR Description: putative protein; protein id: At5g19940

SEQ ID NO: 40872 - protein, 219 aa, Zea mays subsp. mays; identical to SEQ ID NO: 27562
  peptide (1)..(219): Ceres Seq. ID no. 12381802
  misc_feature (49)..(216): Pfam Name: Pfam Description:  PAP_fibrillin
  misc_feature (6)..(219): NCBI GI NO: 38346556 NR Description: OSJNBa0035M09.17
  misc_feature (22)..(219): NCBI GI NO: 15241221 NR Description: putative protein; protein id: At5g19940

SEQ ID NO: 40873 - DNA, 722 bp, Zea mays subsp. mays
  misc_feature (1)..(722): Ceres Seq. ID no. 12420098
acatcatcacttgcagcttcacaagcaaactaaaacacagcggctaaaggcacagctctccagcattcatccagaaagaagagaaggaaccaagccaacagccaaccatgatcagcgccaagagggtcgctcatctggctaagaagtggcagaggatggctgcccaagggaggcagcgcctcacctggggcggcgcaggcgcggcagcaaagcaagccggcgagagctgcagctccgtggcgagcaagggccactgcgccgtgtacacggccgacggggcgcggttcgaggtgcccctggcgtgcctcagcactctggtcttcagggagctcctggaaatgtcgcaggaggagttcggcttctccggcggcgatggcagtggcaggatcacgctgccctgcgacacggcggtcatggagtacgccatgtgcttgctcaggagaagcgcctctgctgagctagagcaggcgttccttagcaccgtggcggcaacgtcgtgctgccactacgccagccgtgtggcgctggcgacgtgcgtaggagccggccctgcgggttgctgtttagtgatgttcttcagtacgtgtgtataggtagtagataaagtattattattcggagccttctgatcctgcaactgatcaagtaaggtgttagtgttctgtacgtatgtatgattcgctggatatgattggcttatgaaaattgtgaggactacttac

SEQ ID NO: 40874 - protein, 161 aa, Zea mays subsp. mays
  peptide (1)..(161): Ceres Seq. ID no. 12420099
  misc_feature (1)..(111): Pfam Name: Pfam Description:  Auxin responsive protein
  misc_feature (1)..(136): NCBI GI NO: 20149052 NR Description: auxin-induced SAUR-like protein [Capsicum annuum]
  misc_feature (1)..(136): NCBI GI NO: 21592571 NR Description: auxin-induced protein, putative
  misc_feature (1)..(136): NCBI GI NO: 18397101 NR Description: auxin-induced protein, putative
  misc_feature (1)..(131): NCBI GI NO: 18397123 NR Description: auxin-induced protein, putative
  misc_feature (1)..(131): NCBI GI NO: 18397103 NR Description: auxin-induced protein, putative
  misc_feature (1)..(131): NCBI GI NO: 15218951 NR Description: auxin-induced protein, putative
  misc_feature (10)..(136): NCBI GI NO: 25403067 NR Description: probable auxin-induced protein, 48806-48408
  misc_feature (1)..(131): NCBI GI NO: 21553494 NR Description: auxin-induced protein, putative
  misc_feature (1)..(128): NCBI GI NO: 26452075 NR Description: putative auxin-induced protein
  misc_feature (1)..(131): NCBI GI NO: 38603942 NR Description: At1g29420 [Arabidopsis thaliana]
MISAKRVAHLAKKWQRMAAQGRQRLTWGGAGAAAKQAGESCSSVASKGHCAVYTADGARFEVPLACLSTLVFRELLEMSQEEFGFSGGDGSGRITLPCDTAVMEYAMCLLRRSASAELEQAFLSTVAATSCCHYASRVALATCVGAGPAGCCLVMFFSTCV

SEQ ID NO: 40875 - protein, 145 aa, Zea mays subsp. mays
  peptide (1)..(145): Ceres Seq. ID no. 12420100
  misc_feature (1)..(95): Pfam Name: Pfam Description:  Auxin responsive protein
  misc_feature (1)..(120): NCBI GI NO: 20149052 NR Description: auxin-induced SAUR-like protein [Capsicum annuum]
  misc_feature (1)..(120): NCBI GI NO: 21592571 NR Description: auxin-induced protein, putative
  misc_feature (1)..(120): NCBI GI NO: 18397101 NR Description: auxin-induced protein, putative
  misc_feature (1)..(115): NCBI GI NO: 18397123 NR Description: auxin-induced protein, putative
  misc_feature (1)..(115): NCBI GI NO: 18397103 NR Description: auxin-induced protein, putative
  misc_feature (1)..(115): NCBI GI NO: 15218951 NR Description: auxin-induced protein, putative
  misc_feature (1)..(120): NCBI GI NO: 25403067 NR Description: probable auxin-induced protein, 48806-48408
  misc_feature (1)..(115): NCBI GI NO: 21553494 NR Description: auxin-induced protein, putative
  misc_feature (1)..(112): NCBI GI NO: 26452075 NR Description: putative auxin-induced protein
  misc_feature (1)..(115): NCBI GI NO: 38603942 NR Description: At1g29420 [Arabidopsis thaliana]
MAAQGRQRLTWGGAGAAAKQAGESCSSVASKGHCAVYTADGARFEVPLACLSTLVFRELLEMSQEEFGFSGGDGSGRITLPCDTAVMEYAMCLLRRSASAELEQAFLSTVAATSCCHYASRVALATCVGAGPAGCCLVMFFSTCV

SEQ ID NO: 40876 - protein, 84 aa, Zea mays subsp. mays
  peptide (1)..(84): Ceres Seq. ID no. 12420101
  misc_feature (1)..(59): NCBI GI NO: 20149052 NR Description: auxin-induced SAUR-like protein [Capsicum annuum]
  misc_feature (1)..(59): NCBI GI NO: 21592571 NR Description: auxin-induced protein, putative
  misc_feature (1)..(59): NCBI GI NO: 18397101 NR Description: auxin-induced protein, putative
  misc_feature (1)..(54): NCBI GI NO: 18397123 NR Description: auxin-induced protein, putative
  misc_feature (1)..(54): NCBI GI NO: 18397103 NR Description: auxin-induced protein, putative
  misc_feature (1)..(54): NCBI GI NO: 15218951 NR Description: auxin-induced protein, putative
  misc_feature (1)..(59): NCBI GI NO: 25403067 NR Description: probable auxin-induced protein, 48806-48408
  misc_feature (1)..(54): NCBI GI NO: 21553494 NR Description: auxin-induced protein, putative
  misc_feature (1)..(51): NCBI GI NO: 26452075 NR Description: putative auxin-induced protein
  misc_feature (1)..(54): NCBI GI NO: 38603942 NR Description: At1g29420 [Arabidopsis thaliana]
MSQEEFGFSGGDGSGRITLPCDTAVMEYAMCLLRRSASAELEQAFLSTVAATSCCHYASRVALATCVGAGPAGCCLVMFFSTCV

SEQ ID NO: 40877 - DNA, 1291 bp, Zea mays subsp. mays
  misc_feature (1)..(1291): Ceres Seq. ID no. 13494909
gcccttccaaaccatccccgaagcttccagtgcgtcgcgccgcaaccatgagcgacggtaaggactccctcgacctctccgccctcggcgccgccatccccaactcggccgagctcagcgcggaagacaaggctaaccttgtggcgtcgatcaagaacacgctcgagggattggcatcgcggcataccgacgtgctcgagaacctcgagcccaaggtcaggaagcgcgttgagaagctcagggagatccagggcgaacacgatgaacttgaggcgaagtttttcgaagagagagctgctctagaagctaagtatcagaagttgtatgaaccactttactcaaagcgttatgaaattgtcaatggtgtggtcgagattgagggtatcacaaaagaaagtgcagctgaaaccccagaggagcaaaaaagtggagatgagacctctgctgagcaaaaagaagaaaaaggtgtaccagctttctggcttaatgcaatgaagaatcatgaaattttagctgaggagatccaggagagggatgaggaagctctcaagtacctcaaggacatcaagtggtacaggatcagcgagccgaagggttttaagcttgaatttcactttggtacgaatatgttcttcaagaattcggtgcttacaaaaacatatcacatgatcgatgaggatgaaccaattctggagaaagccattggtactgaaattgaatggtaccctgggaagtgcttgacacaaaaagtgctaaaaaagaagccacggaaggggtcaaagaacacgaaacctatcacaaaaaccgaagattgtgagagcttcttcaacttcttcagtccacctcaagtccctgatgacgacgaggaaattgatgaggacacagctgaacagttgcagaaccaaatggagcaagattatgatattggatctaccatcagagacaagattatcccacatgctgtctcgtggttcactggagaggctgctcaagatgaggactttgaagttatggatggcgaggacgacgacgatgaagacgacgatgatgaagacgacgaggatgaagatgacgatgattatgatacaaagaagaccaagggaactgctggaggggaagggcagcagggtgaacgacctgcagagtgcaagcaacagtgaggtgtgatgtcattaagttggttttgtggggccgttgggtgggggttcttgttggttttattttatggaactggcggggggatttttctgggacatgttacatgtgggtctgtattgggtttcagaagggc

SEQ ID NO: 40878 - protein, 385 aa, Zea mays subsp. mays
  peptide (1)..(385): Ceres Seq. ID no. 13494910
  misc_feature (73)..(330): Pfam Name: NAP Pfam Description: Nucleosome assembly protein
  misc_feature (16)..(385): NCBI GI NO: 21898560 NR Description: nucleosome/chromatin assembly factor group A
  misc_feature (16)..(385): NCBI GI NO: 15224782 NR Description: nucleosome assembly protein -related
  misc_feature (16)..(384): NCBI GI NO: 29569109 NR Description: nucleosome/chromatin assembly factor group A
  misc_feature (35)..(385): NCBI GI NO: 2129840 NR Description: nucleosome assembly protein 1 - soybean
  misc_feature (16)..(385): NCBI GI NO: 549975 NR Description: nucleosome assembly protein I-like protein
  misc_feature (16)..(385): NCBI GI NO: 15236115 NR Description: nucleosome assembly protein I-related protein
  misc_feature (35)..(385): NCBI GI NO: 7488816 NR Description: nucleosome assembly protein 1 - garden pea
  misc_feature (16)..(385): NCBI GI NO: 18423918 NR Description: nucleosome assembly protein [Arabidopsis thaliana]
  misc_feature (16)..(385): NCBI GI NO: 8777435 NR Description: nucleosome assembly protein [Arabidopsis thaliana]
  misc_feature (150)..(352): NCBI GI NO: 9294025 NR Description: nucleosome assembly protein-like
PSKPSPKLPVRRAATMSDGKDSLDLSALGAAIPNSAELSAEDKANLVASIKNTLEGLASRHTDVLENLEPKVRKRVEKLREIQGEHDELEAKFFEERAALEAKYQKLYEPLYSKRYEIVNGVVEIEGITKESAAETPEEQKSGDETSAEQKEEKGVPAFWLNAMKNHEILAEEIQERDEEALKYLKDIKWYRISEPKGFKLEFHFGTNMFFKNSVLTKTYHMIDEDEPILEKAIGTEIEWYPGKCLTQKVLKKKPRKGSKNTKPITKTEDCESFFNFFSPPQVPDDDEEIDEDTAEQLQNQMEQDYDIGSTIRDKIIPHAVSWFTGEAAQDEDFEVMDGEDDDDEDDDDEDDEDEDDDDYDTKKTKGTAGGEGQQGERPAECKQQ

SEQ ID NO: 40879 - protein, 370 aa, Zea mays subsp. mays
  peptide (1)..(370): Ceres Seq. ID no. 13494911
  misc_feature (58)..(315): Pfam Name: NAP Pfam Description: Nucleosome assembly protein
  misc_feature (1)..(370): NCBI GI NO: 21898560 NR Description: nucleosome/chromatin assembly factor group A
  misc_feature (1)..(370): NCBI GI NO: 15224782 NR Description: nucleosome assembly protein -related
  misc_feature (1)..(369): NCBI GI NO: 29569109 NR Description: nucleosome/chromatin assembly factor group A
  misc_feature (20)..(370): NCBI GI NO: 2129840 NR Description: nucleosome assembly protein 1 - soybean
  misc_feature (1)..(370): NCBI GI NO: 549975 NR Description: nucleosome assembly protein I-like protein
  misc_feature (1)..(370): NCBI GI NO: 15236115 NR Description: nucleosome assembly protein I-related protein
  misc_feature (20)..(370): NCBI GI NO: 7488816 NR Description: nucleosome assembly protein 1 - garden pea
  misc_feature (1)..(370): NCBI GI NO: 18423918 NR Description: nucleosome assembly protein [Arabidopsis thaliana]
  misc_feature (1)..(370): NCBI GI NO: 8777435 NR Description: nucleosome assembly protein [Arabidopsis thaliana]
  misc_feature (135)..(337): NCBI GI NO: 9294025 NR Description: nucleosome assembly protein-like
MSDGKDSLDLSALGAAIPNSAELSAEDKANLVASIKNTLEGLASRHTDVLENLEPKVRKRVEKLREIQGEHDELEAKFFEERAALEAKYQKLYEPLYSKRYEIVNGVVEIEGITKESAAETPEEQKSGDETSAEQKEEKGVPAFWLNAMKNHEILAEEIQERDEEALKYLKDIKWYRISEPKGFKLEFHFGTNMFFKNSVLTKTYHMIDEDEPILEKAIGTEIEWYPGKCLTQKVLKKKPRKGSKNTKPITKTEDCESFFNFFSPPQVPDDDEEIDEDTAEQLQNQMEQDYDIGSTIRDKIIPHAVSWFTGEAAQDEDFEVMDGEDDDDEDDDDEDDEDEDDDDYDTKKTKGTAGGEGQQGERPAECKQQ

SEQ ID NO: 40880 - protein, 222 aa, Zea mays subsp. mays
  peptide (1)..(222): Ceres Seq. ID no. 13494912
  misc_feature (1)..(167): Pfam Name: NAP Pfam Description: Nucleosome assembly protein
  misc_feature (1)..(222): NCBI GI NO: 21898560 NR Description: nucleosome/chromatin assembly factor group A
  misc_feature (1)..(222): NCBI GI NO: 15224782 NR Description: nucleosome assembly protein -related
  misc_feature (1)..(221): NCBI GI NO: 29569109 NR Description: nucleosome/chromatin assembly factor group A
  misc_feature (1)..(222): NCBI GI NO: 2129840 NR Description: nucleosome assembly protein 1 - soybean
  misc_feature (1)..(222): NCBI GI NO: 549975 NR Description: nucleosome assembly protein I-like protein
  misc_feature (1)..(222): NCBI GI NO: 15236115 NR Description: nucleosome assembly protein I-related protein
  misc_feature (1)..(222): NCBI GI NO: 7488816 NR Description: nucleosome assembly protein 1 - garden pea
  misc_feature (1)..(222): NCBI GI NO: 18423918 NR Description: nucleosome assembly protein [Arabidopsis thaliana]
  misc_feature (1)..(222): NCBI GI NO: 8777435 NR Description: nucleosome assembly protein [Arabidopsis thaliana]
  misc_feature (1)..(189): NCBI GI NO: 9294025 NR Description: nucleosome assembly protein-like
MKNHEILAEEIQERDEEALKYLKDIKWYRISEPKGFKLEFHFGTNMFFKNSVLTKTYHMIDEDEPILEKAIGTEIEWYPGKCLTQKVLKKKPRKGSKNTKPITKTEDCESFFNFFSPPQVPDDDEEIDEDTAEQLQNQMEQDYDIGSTIRDKIIPHAVSWFTGEAAQDEDFEVMDGEDDDDEDDDDEDDEDEDDDDYDTKKTKGTAGGEGQQGERPAECKQQ

SEQ ID NO: 40881 - DNA, 488 bp, Zea mays subsp. mays
  misc_feature (1)..(488): Ceres Seq. ID no. 2790550
gaactggtctatcggcgccgccttcacgccgagagttccctctttctcgcttgctcactcgcgtcgacgactgggctaccggcgcctccaccctccgcctggtgtccttcgccgtcgacgagcgcacaccagggtacagtacgtattgctcgtgatttgtgtaactacggagcaagctgcatacagcacaagatagaagatgggtatccttgagaggatcaaggagattgaggccgagatggctcggactcagaaaaataaagcaacagaatatcatcttggacaactgaaggcaaaactagcaaagttgaggacacaactattagagcctccaargggttccagcggaggtggagatggttttgaagtcacaaagtttgggcatggtcgtgttgcacttattggatttcccagtgttggaaagtcaactcttttaacgatgttgactgggacacattctgaagctgcatcatatgagttcacaacgs

SEQ ID NO: 40882 - protein, 96 aa, Zea mays subsp. mays
  peptide (1)..(96): Ceres Seq. ID no. 2790551
  misc_feature (1)..(95): Pfam Name: Pfam Description:  GTP1/OBG family
  misc_feature (1)..(95): NCBI GI NO: 15218561 NR Description: putative GTP-binding protein; protein id:At1g72660
  misc_feature (1)..(95): NCBI GI NO: 2058456 NR Description: GTP-binding protein [Arabidopsis thaliana]
  misc_feature (1)..(95): NCBI GI NO: 15220113 NR Description: developmentally regulated GTP-binding protein
  misc_feature (1)..(95): NCBI GI NO: 8778457 NR Description: F1L3.17 [Arabidopsis thaliana]
  misc_feature (1)..(95): NCBI GI NO: 7441590 NR Description: GTP binding protein - garden pea
  misc_feature (1)..(95): NCBI GI NO: 13877991 NR Description: putative developmentally regulated GTP-bindingprotein
  misc_feature (1)..(95): NCBI GI NO: 4557537 NR Description: developmentally regulated GTP binding protein 2
  misc_feature (1)..(95): NCBI GI NO: 10946678 NR Description: developmentally regulated GTP binding protein 2
  misc_feature (1)..(95): NCBI GI NO: 12653443 NR Description: developmentally regulated GTP-binding protein 2
  misc_feature (1)..(95): NCBI GI NO: 30584259 NR Description: Homo sapiens developmentally regulated GTP binding protein 2
  misc_feature (46)..(46): Xaa is any aa, unknown or other
MGILERIKEIEAEMARTQKNKATEYHLGQLKAKLAKLRTQLLEPPXGSSGGGDGFEVTKFGHGRVALIGFPSVGKSTLLTMLTGTHSEAASYEFTT

SEQ ID NO: 40883 - protein, 83 aa, Zea mays subsp. mays
  peptide (1)..(83): Ceres Seq. ID no. 2790552
  misc_feature (1)..(82): Pfam Name: Pfam Description:  GTP1/OBG family
  misc_feature (1)..(82): NCBI GI NO: 15218561 NR Description: putative GTP-binding protein; protein id:At1g72660
  misc_feature (1)..(82): NCBI GI NO: 2058456 NR Description: GTP-binding protein [Arabidopsis thaliana]
  misc_feature (1)..(82): NCBI GI NO: 15220113 NR Description: developmentally regulated GTP-binding protein
  misc_feature (1)..(82): NCBI GI NO: 8778457 NR Description: F1L3.17 [Arabidopsis thaliana]
  misc_feature (1)..(82): NCBI GI NO: 7441590 NR Description: GTP binding protein - garden pea
  misc_feature (1)..(82): NCBI GI NO: 13877991 NR Description: putative developmentally regulated GTP-bindingprotein
  misc_feature (1)..(82): NCBI GI NO: 4557537 NR Description: developmentally regulated GTP binding protein 2
  misc_feature (1)..(82): NCBI GI NO: 10946678 NR Description: developmentally regulated GTP binding protein 2
  misc_feature (1)..(82): NCBI GI NO: 12653443 NR Description: developmentally regulated GTP-binding protein 2
  misc_feature (1)..(82): NCBI GI NO: 30584259 NR Description: Homo sapiens developmentally regulated GTP binding protein 2
  misc_feature (33)..(33): Xaa is any aa, unknown or other
MARTQKNKATEYHLGQLKAKLAKLRTQLLEPPXGSSGGGDGFEVTKFGHGRVALIGFPSVGKSTLLTMLTGTHSEAASYEFTT

SEQ ID NO: 40884 - protein, 70 aa, Zea mays subsp. mays
  peptide (1)..(70): Ceres Seq. ID no. 2790553
ELVYRRRLHAESSLFLACSLASTTGLPAPPPSAWCPSPSTSAHQGTVRIARDLCNYGASCIQHKIEDGYP

SEQ ID NO: 40885 - DNA, 1616 bp, Zea mays subsp. mays; identical to SEQ ID NO: 31847
  misc_feature (1)..(1616): Ceres Seq. ID no. 12637795

SEQ ID NO: 40886 - protein, 455 aa, Zea mays subsp. mays; identical to SEQ ID NO: 31848
  peptide (1)..(455): Ceres Seq. ID no. 12637796
  misc_feature (95)..(298): Pfam Name: Pfam Description:  DEAD/DEAH box helicase
  misc_feature (46)..(455): NCBI GI NO: 2500522 NR Description: Eukaryotic initiation factor 4A (eIF-4A) (eIF4A)
  misc_feature (46)..(455): NCBI GI NO: 2341061 NR Description: translational initiation factor eIF-4A [Zea mays]
  misc_feature (46)..(455): NCBI GI NO: 2286151 NR Description: translation initiation factor [Zea mays]
  misc_feature (46)..(455): NCBI GI NO: 1170509 NR Description: EUKARYOTIC INITIATION FACTOR 4A (EIF-4A) (EIF4A)
  misc_feature (46)..(455): NCBI GI NO: 547712 NR Description: Eukaryotic initiation factor 4A (eIF-4A) (eIF4A)
  misc_feature (46)..(455): NCBI GI NO: 2500518 NR Description: Eukaryotic initiation factor 4A-11
  misc_feature (46)..(455): NCBI GI NO: 2119933 NR Description: translation initiation factor eIF-4A
  misc_feature (46)..(455): NCBI GI NO: 2119938 NR Description: translation initiation factor eIF-4A
  misc_feature (46)..(455): NCBI GI NO: 2500520 NR Description: Eukaryotic initiation factor 4A-14
  misc_feature (46)..(455): NCBI GI NO: 1170511 NR Description: Eukaryotic initiation factor 4A-10

SEQ ID NO: 40887 - protein, 410 aa, Zea mays subsp. mays; identical to SEQ ID NO: 31849
  peptide (1)..(410): Ceres Seq. ID no. 12637797
  misc_feature (50)..(253): Pfam Name: Pfam Description:  DEAD/DEAH box helicase
  misc_feature (1)..(410): NCBI GI NO: 2500522 NR Description: Eukaryotic initiation factor 4A (eIF-4A) (eIF4A)
  misc_feature (1)..(410): NCBI GI NO: 2341061 NR Description: translational initiation factor eIF-4A [Zea mays]
  misc_feature (1)..(410): NCBI GI NO: 2286151 NR Description: translation initiation factor [Zea mays]
  misc_feature (1)..(410): NCBI GI NO: 1170509 NR Description: EUKARYOTIC INITIATION FACTOR 4A (EIF-4A) (EIF4A)
  misc_feature (1)..(410): NCBI GI NO: 547712 NR Description: Eukaryotic initiation factor 4A (eIF-4A) (eIF4A)
  misc_feature (1)..(410): NCBI GI NO: 2500518 NR Description: Eukaryotic initiation factor 4A-11
  misc_feature (1)..(410): NCBI GI NO: 2119933 NR Description: translation initiation factor eIF-4A
  misc_feature (1)..(410): NCBI GI NO: 2119938 NR Description: translation initiation factor eIF-4A
  misc_feature (1)..(410): NCBI GI NO: 2500520 NR Description: Eukaryotic initiation factor 4A-14
  misc_feature (1)..(410): NCBI GI NO: 1170511 NR Description: Eukaryotic initiation factor 4A-10

SEQ ID NO: 40888 - protein, 391 aa, Zea mays subsp. mays; identical to SEQ ID NO: 31850
  peptide (1)..(391): Ceres Seq. ID no. 12637798
  misc_feature (31)..(234): Pfam Name: Pfam Description:  DEAD/DEAH box helicase
  misc_feature (1)..(391): NCBI GI NO: 2500522 NR Description: Eukaryotic initiation factor 4A (eIF-4A) (eIF4A)
  misc_feature (1)..(391): NCBI GI NO: 2341061 NR Description: translational initiation factor eIF-4A [Zea mays]
  misc_feature (1)..(391): NCBI GI NO: 2286151 NR Description: translation initiation factor [Zea mays]
  misc_feature (1)..(391): NCBI GI NO: 1170509 NR Description: EUKARYOTIC INITIATION FACTOR 4A (EIF-4A) (EIF4A)
  misc_feature (1)..(391): NCBI GI NO: 547712 NR Description: Eukaryotic initiation factor 4A (eIF-4A) (eIF4A)
  misc_feature (1)..(391): NCBI GI NO: 2500518 NR Description: Eukaryotic initiation factor 4A-11
  misc_feature (1)..(391): NCBI GI NO: 2119933 NR Description: translation initiation factor eIF-4A
  misc_feature (1)..(391): NCBI GI NO: 2119938 NR Description: translation initiation factor eIF-4A
  misc_feature (1)..(391): NCBI GI NO: 2500520 NR Description: Eukaryotic initiation factor 4A-14
  misc_feature (1)..(391): NCBI GI NO: 1170511 NR Description: Eukaryotic initiation factor 4A-10

SEQ ID NO: 40889 - DNA, 1094 bp, Zea mays subsp. mays
  misc_feature (1)..(1094): Ceres Seq. ID no. 12381845
gcacgagaccattacctagaacatcctaatcgaaaaaggagatacttgaagcctcaccagagaccacaaggagggatattcgcaggacccggtttttgcagcacgaggtgtggaggctgctctgccataccaaaaagcagacagaggaccaaggaaggaagcagggatccggctttgctctgcaaccatgagctccctgtacgacgtctcctgcttcgcggctggccttgctgggaacgtcttcgccctcgccctcttcctgtcgccggtgccgacgttcaagagggtcctcaaggccaagtcgacggagcagttcgatgggctgccctacctgctgtccctgctcaactgctgcatctgcctctggtacggcctcccgtgggtctccgacggcggcagggccctcgtcgccaccgtcaactgcaccggcgccctgttccagctcgcctacatctcgctcttcatcttctacgccgacagcaggaccactcggctcaaggtcgcggggcttctggtgctagtggtcttcgcgttcgcgctcatcgcacacgccagcatcgccttcttcgaccagccgctccggcagctgttcgttggcagcgtcagcatggcgtccctggtctccatgttcgcttccccgctggctgtcatgggtgtggtggtccgcaccgagtgcgtggagttcatgcccttctacctctctctgtccacgttcctgatgagcgcatccttcgcagtgtacgggcttctcctgcgtgatttcttcatatacttcccgaatgggctcggagtcatcctgggagcaatgcagctggtgctgtacgcgtactacagccggagatggaaaagcagcgactcgtcagcaccgttgcttgcctgatcatgtagccgagttcgtcagtccaattgcccgtgccgtgctttctgttgttctctgttctgccatcctgtaattctaggagaggagctaggcggtgttttggaacagattaatcgtactgctacgaaatatattttttgagatagattattttaaatagagatggtcataaagtttattcgtcttctaagagaattttgaatacgatcatttt

SEQ ID NO: 40890 - protein, 252 aa, Zea mays subsp. mays
  peptide (1)..(252): Ceres Seq. ID no. 12381846
ARDHYLEHPNRKRRYLKPHQRPQGGIFAGPGFCSTRCGGCSAIPKSRQRTKEGSRDPALLCNHELPVRRLLLRGWPCWERLRPRPLPVAGADVQEGPQGQVDGAVRWAALPAVPAQLLHLPLVRPPVGLRRRQGPRRHRQLHRRPVPARLHLALHLLRRQQDHSAQGRGASGASGLRVRAHRTRQHRLLRPAAPAAVRWQRQHGVPGLHVRFPAGCHGCGGPHRVRGVHALLPLSVHVPDERILRSVRASPA

SEQ ID NO: 40891 - protein, 230 aa, Zea mays subsp. mays
  peptide (1)..(230): Ceres Seq. ID no. 12381847
  misc_feature (10)..(99): Pfam Name: Pfam Description:  MtN3/saliva family
  misc_feature (1)..(183): NCBI GI NO: 34911484 NR Description: putative MtN3
  misc_feature (1)..(229): NCBI GI NO: 18400517 NR Description: expressed protein; protein id: At3g14770
  misc_feature (7)..(226): NCBI GI NO: 34907420 NR Description: P0018C10.36
  misc_feature (13)..(224): NCBI GI NO: 18394992 NR Description: expressed protein; protein id: At1g21460
  misc_feature (13)..(218): NCBI GI NO: 34146818 NR Description: At5g53190 [Arabidopsis thaliana]
  misc_feature (10)..(215): NCBI GI NO: 27754697 NR Description: putative cytochrome c oxidoreductase
  misc_feature (10)..(215): NCBI GI NO: 30683457 NR Description: nodulin MtN3 family protein [Arabidopsis thaliana]
  misc_feature (13)..(218): NCBI GI NO: 15238678 NR Description: MtN3 protein-like; protein id: At5g53190.1
  misc_feature (6)..(217): NCBI GI NO: 34912454 NR Description: P0681B11.31
  misc_feature (13)..(215): NCBI GI NO: 18413388 NR Description: putative protein; protein id: At4g10850
MSSLYDVSCFAAGLAGNVFALALFLSPVPTFKRVLKAKSTEQFDGLPYLLSLLNCCICLWYGLPWVSDGGRALVATVNCTGALFQLAYISLFIFYADSRTTRLKVAGLLVLVVFAFALIAHASIAFFDQPLRQLFVGSVSMASLVSMFASPLAVMGVVVRTECVEFMPFYLSLSTFLMSASFAVYGLLLRDFFIYFPNGLGVILGAMQLVLYAYYSRRWKSSDSSAPLLA

SEQ ID NO: 40892 - DNA, 716 bp, Zea mays subsp. mays
  misc_feature (1)..(716): Ceres Seq. ID no. 12419788
gcacgagaccattacctagaacatcctaatcaaaaaaaaaggccggaggtgagccccgcatccgcggccaagtacccatgacgacgaggctgacagcgacgttgttgctctccagaaccctcgtccgccgcgtaacctcgcgaaccccgacacccctcggccctttcggtctcgaaccatccgcaggaatccccatctcctggtccagacgcgcctcctcgaccgcctcgggagatcggggccaggaaccgccaccggccatggattcgcctatcaaggtggtttctcacctggggagcggacgagggggagagggagagggaggggccgcagcgatcgacgcggggaagtcggcacggaggccgctcagcctgtggcccgggatgtaccactccccggtgaccaacgcgctctgggaggcgcgatccagcatcttcgagcggatgatggacgctgggaacggcgcttcctctgccgagcagcggccgcagactgagctgctcgtcaagacgcccgcgcagagccggaccagcatcgtgtacaagttcgccaccgacgacatcctcagggagcagtaccgggacccctggaacgagttgcgcatcggcaagctgctcgaggatcttgacgccctcgccggcaccatcgccgtcaagcactgttcaggggaagatagcacaacaagaccccttttggttgtgactgcttctgttgac

SEQ ID NO: 40893 - protein, 213 aa, Zea mays subsp. mays
  peptide (1)..(213): Ceres Seq. ID no. 12419789
  misc_feature (94)..(212): NCBI GI NO: 15238956 NR Description: putative protein; protein id: At5g48370.1
  misc_feature (86)..(152): NCBI GI NO: 15224555 NR Description: hypothetical protein; protein id: At2g30720.1
  misc_feature (169)..(212): NCBI GI NO: 15224555 NR Description: hypothetical protein; protein id: At2g30720.1
MTTRLTATLLLSRTLVRRVTSRTPTPLGPFGLEPSAGIPISWSRRASSTASGDRGQEPPPAMDSPIKVVSHLGSGRGGEGEGGAAAIDAGKSARRPLSLWPGMYHSPVTNALWEARSSIFERMMDAGNGASSAEQRPQTELLVKTPAQSRTSIVYKFATDDILREQYRDPWNELRIGKLLEDLDALAGTIAVKHCSGEDSTTRPLLVVTASVD

SEQ ID NO: 40894 - protein, 152 aa, Zea mays subsp. mays
  peptide (1)..(152): Ceres Seq. ID no. 12419790
  misc_feature (33)..(151): NCBI GI NO: 15238956 NR Description: putative protein; protein id: At5g48370.1
  misc_feature (25)..(91): NCBI GI NO: 15224555 NR Description: hypothetical protein; protein id: At2g30720.1
  misc_feature (108)..(151): NCBI GI NO: 15224555 NR Description: hypothetical protein; protein id: At2g30720.1
MDSPIKVVSHLGSGRGGEGEGGAAAIDAGKSARRPLSLWPGMYHSPVTNALWEARSSIFERMMDAGNGASSAEQRPQTELLVKTPAQSRTSIVYKFATDDILREQYRDPWNELRIGKLLEDLDALAGTIAVKHCSGEDSTTRPLLVVTASVD

SEQ ID NO: 40895 - protein, 111 aa, Zea mays subsp. mays
  peptide (1)..(111): Ceres Seq. ID no. 12419791
  misc_feature (1)..(110): NCBI GI NO: 15238956 NR Description: putative protein; protein id: At5g48370.1
  misc_feature (1)..(50): NCBI GI NO: 15224555 NR Description: hypothetical protein; protein id: At2g30720.1
  misc_feature (67)..(110): NCBI GI NO: 15224555 NR Description: hypothetical protein; protein id: At2g30720.1
MYHSPVTNALWEARSSIFERMMDAGNGASSAEQRPQTELLVKTPAQSRTSIVYKFATDDILREQYRDPWNELRIGKLLEDLDALAGTIAVKHCSGEDSTTRPLLVVTASVD

SEQ ID NO: 40896 - DNA, 1903 bp, Zea mays subsp. mays
  misc_feature (1)..(1903): Ceres Seq. ID no. 12436393
gcccaacacccaattgaagacgtcccaatcccaaccctactcccttgcctccccctaatgacatcgcctggcggcgtcttctccgccgcgctcgtcgccgaggacttcccttgggtggacatggaggaggagatggggatggccccggacatgtaccgcgaggtgttcgacctcgcgcagcgcgggacacgagcctttcgcgaccgcctcttcgacgaggcaatatcctgttacactaaagctcaaaatttgagaccagatccaattatccttggcaatcgaagtttgactttctgccggttaagtcaactgttgagggagagatcagcagccgactctgaatatcagcccttgaatggccttgatcctacaactcatgcagagttagctctgaaggatgcagagaagatattatctatcaacagtaattctcctagaccatatattctcaaggcatatgcgctatttctgatggagcattaccatgaggcacgtgagacccttcttgctggtcttcaagttgatcccctcagtcatgtcttgcaaacctgtctgaatgatctggataggaatacaaatattgcagctggggcaaggcgtgcaaggttagctaggattgatgattttgagtgcacattatgctttaagctattgtatgaacctgtcactacaccatgtggccattcattttgtcgctcttgtctacatcagtcaatggatcatggtaataagtgccccatgtgtcggacagtattatttatcggtccaagaacatgccctataagtgtaacattaagcaacataattcagagaaatttcccagaagaatatgctgagaggaggtcagaacatgagactatgacatatgctggtgttgatttgatgcctctctttgtcatggatgttgtacttccatcccaaaagatggcactgaacatatttgaacctcgctacagactgatggtacggagaataatggaagggaaccatcggatgggaatggttgctattgattcggcaacgggtactgtagcagattgtggctgtgaggtggaaatttcagagtgtgaaccacttccacatgggcgcttttatttagaggtggaaggcacacgtcggtttcgtatcgtgcgatcatgggatcaagatggatatagagttgctgaagttgaatggttgaaagatatacctctgccagaaggttcacaagggagaagagaactaatggaactggccaatggagcttcagagctggccagggcatatatcagacatgctagagataccgtacggactgcaaggcgaacaagacatctggatcttgagggcatgcctgggccacaggacccggaaaaatttagtttctggctagccaacttgataagtttgaggccctcggatagattagatacgttacgccttcgcgacactagggagagaatttctagtagcatcagtttgctccgtgattccgaacaaggctgccgtgtacaatgacggaaacagtacaagaatcgtttccacagaccaattcgttcgtctaggagtatatcgatttggagctactccgtgattccgaacaaggctgccgtgtacaatgacggaaacagtacaagaatcgtttccacgtaccaattcgttcgtctaggagtatatcgatttggagctactccgtgattccgaacaaggctgccgtatacaatgacggaaacagtacaagaatcgtttccacagaccaattcgttcgtctaggagtatatcgatttggagctagggatgtaatatgatttagaaaatatccgtccagatccagactcgaagatggtgaatactggttcggatggaattttcggatatccggtctttttttgataacggatacaaatacggatattttattcgc

SEQ ID NO: 40897 - protein, 498 aa, Zea mays subsp. mays
  peptide (1)..(498): Ceres Seq. ID no. 12436394
  misc_feature (295)..(489): Pfam Name: LON Pfam Description: ATP-dependent protease La
  misc_feature (42)..(498): NCBI GI NO: 18394639 NR Description: expressed protein; protein id: At1g18660
  misc_feature (42)..(498): NCBI GI NO: 21554128 NR Description: unknown [Arabidopsis thaliana]
  misc_feature (193)..(482): NCBI GI NO: 38089190 NR Description: similar to hypothetical protein FLJ23749
  misc_feature (193)..(482): NCBI GI NO: 40217796 NR Description: hypothetical protein FLJ23749 [Homo sapiens]
  misc_feature (206)..(481): NCBI GI NO: 38348242 NR Description: FLJ45273 protein [Homo sapiens]
  misc_feature (203)..(482): NCBI GI NO: 10439066 NR Description: unnamed protein product [Homo sapiens]
  misc_feature (216)..(482): NCBI GI NO: 18676903 NR Description: unnamed protein product [Homo sapiens]
  misc_feature (295)..(482): NCBI GI NO: 34878512 NR Description: similar to hypothetical protein FLJ23749
  misc_feature (193)..(288): NCBI GI NO: 34878512 NR Description: similar to hypothetical protein FLJ23749
  misc_feature (203)..(482): NCBI GI NO: 26449305 NR Description: hypothetical protein [Macaca fascicularis]
AQHPIEDVPIPTLLPCLPLMTSPGGVFSAALVAEDFPWVDMEEEMGMAPDMYREVFDLAQRGTRAFRDRLFDEAISCYTKAQNLRPDPIILGNRSLTFCRLSQLLRERSAADSEYQPLNGLDPTTHAELALKDAEKILSINSNSPRPYILKAYALFLMEHYHEARETLLAGLQVDPLSHVLQTCLNDLDRNTNIAAGARRARLARIDDFECTLCFKLLYEPVTTPCGHSFCRSCLHQSMDHGNKCPMCRTVLFIGPRTCPISVTLSNIIQRNFPEEYAERRSEHETMTYAGVDLMPLFVMDVVLPSQKMALNIFEPRYRLMVRRIMEGNHRMGMVAIDSATGTVADCGCEVEISECEPLPHGRFYLEVEGTRRFRIVRSWDQDGYRVAEVEWLKDIPLPEGSQGRRELMELANGASELARAYIRHARDTVRTARRTRHLDLEGMPGPQDPEKFSFWLANLISLRPSDRLDTLRLRDTRERISSSISLLRDSEQGCRVQ

SEQ ID NO: 40898 - protein, 479 aa, Zea mays subsp. mays
  peptide (1)..(479): Ceres Seq. ID no. 12436395
  misc_feature (276)..(470): Pfam Name: LON Pfam Description: ATP-dependent protease La
  misc_feature (23)..(479): NCBI GI NO: 18394639 NR Description: expressed protein; protein id: At1g18660
  misc_feature (23)..(479): NCBI GI NO: 21554128 NR Description: unknown [Arabidopsis thaliana]
  misc_feature (174)..(463): NCBI GI NO: 38089190 NR Description: similar to hypothetical protein FLJ23749
  misc_feature (174)..(463): NCBI GI NO: 40217796 NR Description: hypothetical protein FLJ23749 [Homo sapiens]
  misc_feature (187)..(462): NCBI GI NO: 38348242 NR Description: FLJ45273 protein [Homo sapiens]
  misc_feature (184)..(463): NCBI GI NO: 10439066 NR Description: unnamed protein product [Homo sapiens]
  misc_feature (197)..(463): NCBI GI NO: 18676903 NR Description: unnamed protein product [Homo sapiens]
  misc_feature (276)..(463): NCBI GI NO: 34878512 NR Description: similar to hypothetical protein FLJ23749
  misc_feature (174)..(269): NCBI GI NO: 34878512 NR Description: similar to hypothetical protein FLJ23749
  misc_feature (184)..(463): NCBI GI NO: 26449305 NR Description: hypothetical protein [Macaca fascicularis]
MTSPGGVFSAALVAEDFPWVDMEEEMGMAPDMYREVFDLAQRGTRAFRDRLFDEAISCYTKAQNLRPDPIILGNRSLTFCRLSQLLRERSAADSEYQPLNGLDPTTHAELALKDAEKILSINSNSPRPYILKAYALFLMEHYHEARETLLAGLQVDPLSHVLQTCLNDLDRNTNIAAGARRARLARIDDFECTLCFKLLYEPVTTPCGHSFCRSCLHQSMDHGNKCPMCRTVLFIGPRTCPISVTLSNIIQRNFPEEYAERRSEHETMTYAGVDLMPLFVMDVVLPSQKMALNIFEPRYRLMVRRIMEGNHRMGMVAIDSATGTVADCGCEVEISECEPLPHGRFYLEVEGTRRFRIVRSWDQDGYRVAEVEWLKDIPLPEGSQGRRELMELANGASELARAYIRHARDTVRTARRTRHLDLEGMPGPQDPEKFSFWLANLISLRPSDRLDTLRLRDTRERISSSISLLRDSEQGCRVQ

SEQ ID NO: 40899 - protein, 458 aa, Zea mays subsp. mays
  peptide (1)..(458): Ceres Seq. ID no. 12436396
  misc_feature (255)..(449): Pfam Name: LON Pfam Description: ATP-dependent protease La
  misc_feature (2)..(458): NCBI GI NO: 18394639 NR Description: expressed protein; protein id: At1g18660
  misc_feature (2)..(458): NCBI GI NO: 21554128 NR Description: unknown [Arabidopsis thaliana]
  misc_feature (153)..(442): NCBI GI NO: 38089190 NR Description: similar to hypothetical protein FLJ23749
  misc_feature (153)..(442): NCBI GI NO: 40217796 NR Description: hypothetical protein FLJ23749 [Homo sapiens]
  misc_feature (166)..(441): NCBI GI NO: 38348242 NR Description: FLJ45273 protein [Homo sapiens]
  misc_feature (163)..(442): NCBI GI NO: 10439066 NR Description: unnamed protein product [Homo sapiens]
  misc_feature (176)..(442): NCBI GI NO: 18676903 NR Description: unnamed protein product [Homo sapiens]
  misc_feature (255)..(442): NCBI GI NO: 34878512 NR Description: similar to hypothetical protein FLJ23749
  misc_feature (153)..(248): NCBI GI NO: 34878512 NR Description: similar to hypothetical protein FLJ23749
  misc_feature (163)..(442): NCBI GI NO: 26449305 NR Description: hypothetical protein [Macaca fascicularis]
MEEEMGMAPDMYREVFDLAQRGTRAFRDRLFDEAISCYTKAQNLRPDPIILGNRSLTFCRLSQLLRERSAADSEYQPLNGLDPTTHAELALKDAEKILSINSNSPRPYILKAYALFLMEHYHEARETLLAGLQVDPLSHVLQTCLNDLDRNTNIAAGARRARLARIDDFECTLCFKLLYEPVTTPCGHSFCRSCLHQSMDHGNKCPMCRTVLFIGPRTCPISVTLSNIIQRNFPEEYAERRSEHETMTYAGVDLMPLFVMDVVLPSQKMALNIFEPRYRLMVRRIMEGNHRMGMVAIDSATGTVADCGCEVEISECEPLPHGRFYLEVEGTRRFRIVRSWDQDGYRVAEVEWLKDIPLPEGSQGRRELMELANGASELARAYIRHARDTVRTARRTRHLDLEGMPGPQDPEKFSFWLANLISLRPSDRLDTLRLRDTRERISSSISLLRDSEQGCRVQ

SEQ ID NO: 40900 - DNA, 1942 bp, Zea mays subsp. mays
  misc_feature (1)..(1942): Ceres Seq. ID no. 12436371
  misc_feature (1012)..(1012): n is a, c, t, g, unknown, or other
gcacgagaccattacctagaacatcctaatcgaaaaagggcgctaatttcagccgtgttctcttctctctcgttcgagagatttatactacgtgtataaaaagcatcgtccaacagaggtacctttgctgcgcctctcgatctctagctatagcccgtagctagctagccctcccggcgaatcggccgatcagccggtcgggaacgatgaagaaagatgatgacctcgagtcggcgctgctggccgccaaagagccggcgccggcgcccgccaagggctacgcgtacgcgctcacctgcgcgctcctggcttccctcacctccatcatctacggctacaaccgcggggtgatgagcggggcgcagaagttcgtgcaggccgacctcggcgtcacggacgcgcagctggaggtgctcatcggcgccaccagcgtctactccctcgtcggctcgctggcggcgggctgggcgtgcgaccgcgcgggccggcgccgcaccatcgcgctgtcggcggccttgttcctcgccggctcagccgtcaccgccgccgccgacggctacgccgcgctcatggcgggccagttcgtcgccggcgtggcctgcggattcggcctcgtcgtcgctcccgtctacatcgcggagatctcgccggccaacgctcggggcttcctctcctccatccccgagatcgccggcaactcgggcatcctgctgagctacatcgccgacttcgcgctcgccggcctcccgacgccactcaactggcgcctgatgatcggcatcggcgccgtccctcctctattcctagcggccgcggccgcgcttgccatgccggagaccccgcgctggctcgtcctccacggccaccgcgacgaggcgcgccgcgtgctggcgcgcacggtgggggacgcggaccgccggctccaggagatcgtgacgtccgtgcaggaggccacgaagcaggcgggctccggcggcggcgacgcgccgtcgtcggcgagcgtgcggcgcgngatcctgctccggccgacgcccgccgtccgccgcgtgatgctggccatcctggggctgcaggtgttccagcaggcgtgcggcgtggcggccatggtgctgtacgccccgcgcgtgttcagccacgtcgggatcacctccgagcgcgacgtgctcggcgccaccgtcctcctcggcgccgccaagacggtggcgatcgtcgtccctctgttcctcgccgacagcctcggccgccggcccatgctgctcaccagcgcgggtggcatggccgcgtcgcttctggtcctcggcctgtccatacgcgcgacgtcggccgcgacgtgcgtcgccgccgccgtggcgttcatggcgaccttctcgctggggttcggacccgtgatctggatgtacgggtcggagatcctgccgctgcggctgcgcgcgcaggggactggcgtcgggacggcggtcaaccgggtgatgagcgccatcgtggggatgaccttcatcccgatgtacgaggcggtgggcatggccgggaccttctacatcttcgcggcgatgtccgcggcagcgtgggtgttcgtctacgcgtgcctgcctgagaccaaggggaggagcctcgaggagatggaggcactcttcgacgccggtgccggtgccgatgctgcaccgtcgccacgggcggcgttgtcgtgacgttccagacactgagtacacatgcatcatgtccacgcaaggaacaaacacgtgatgacatgaagttgtcaggtgtgcagtgtagcaaggttagacaggtgctagtgtatttgtaagcagccaagatgccgtcgacgaatagttttgtactcttgtcattttgaatgggttgattatatggtagctgtttctagcaacgcgtctcttaaatttcattctctaaagcaatatgtaccgttctttacatttacaat

SEQ ID NO: 40901 - protein, 493 aa, Zea mays subsp. mays
  peptide (1)..(493): Ceres Seq. ID no. 12436372
  misc_feature (31)..(476): Pfam Name: and other Pfam Description: Sugar
  misc_feature (12)..(476): NCBI GI NO: 30025133 NR Description: putative sorbitol transporter [Prunus cerasus]
  misc_feature (19)..(489): NCBI GI NO: 15230212 NR Description: sugar transport, putative; protein id: At3g18830.1
  misc_feature (3)..(476): NCBI GI NO: 28316433 NR Description: sorbitol transporter [Prunus cerasus]
  misc_feature (19)..(476): NCBI GI NO: 33636088 NR Description: sorbitol-like transporter [Glycine max]
  misc_feature (1)..(488): NCBI GI NO: 16118827 NR Description: putative sugar transporter [Oryza sativa]
  misc_feature (13)..(488): NCBI GI NO: 34393630 NR Description: putative sorbitol transporter
  misc_feature (9)..(477): NCBI GI NO: 1778095 NR Description: putative sugar transporter
  misc_feature (9)..(477): NCBI GI NO: 7484647 NR Description: probable sugar transport protein 205 - beet
  misc_feature (8)..(476): NCBI GI NO: 15226682 NR Description: putative sugar transporter; protein id: At2g16120
  misc_feature (37)..(476): NCBI GI NO: 29691859 NR Description: sorbitol transporter [Malus x domestica]
  misc_feature (269)..(269): Xaa is any aa, unknown or other
MKKDDDLESALLAAKEPAPAPAKGYAYALTCALLASLTSIIYGYNRGVMSGAQKFVQADLGVTDAQLEVLIGATSVYSLVGSLAAGWACDRAGRRRTIALSAALFLAGSAVTAAADGYAALMAGQFVAGVACGFGLVVAPVYIAEISPANARGFLSSIPEIAGNSGILLSYIADFALAGLPTPLNWRLMIGIGAVPPLFLAAAAALAMPETPRWLVLHGHRDEARRVLARTVGDADRRLQEIVTSVQEATKQAGSGGGDAPSSASVRRXILLRPTPAVRRVMLAILGLQVFQQACGVAAMVLYAPRVFSHVGITSERDVLGATVLLGAAKTVAIVVPLFLADSLGRRPMLLTSAGGMAASLLVLGLSIRATSAATCVAAAVAFMATFSLGFGPVIWMYGSEILPLRLRAQGTGVGTAVNRVMSAIVGMTFIPMYEAVGMAGTFYIFAAMSAAAWVFVYACLPETKGRSLEEMEALFDAGAGADAAPSPRAALS

SEQ ID NO: 40902 - protein, 445 aa, Zea mays subsp. mays
  peptide (1)..(445): Ceres Seq. ID no. 12436373
  misc_feature (1)..(428): Pfam Name: and other Pfam Description: Sugar
  misc_feature (1)..(428): NCBI GI NO: 30025133 NR Description: putative sorbitol transporter [Prunus cerasus]
  misc_feature (1)..(441): NCBI GI NO: 15230212 NR Description: sugar transport, putative; protein id: At3g18830.1
  misc_feature (1)..(428): NCBI GI NO: 28316433 NR Description: sorbitol transporter [Prunus cerasus]
  misc_feature (1)..(428): NCBI GI NO: 33636088 NR Description: sorbitol-like transporter [Glycine max]
  misc_feature (1)..(440): NCBI GI NO: 16118827 NR Description: putative sugar transporter [Oryza sativa]
  misc_feature (1)..(440): NCBI GI NO: 34393630 NR Description: putative sorbitol transporter
  misc_feature (1)..(429): NCBI GI NO: 1778095 NR Description: putative sugar transporter
  misc_feature (1)..(429): NCBI GI NO: 7484647 NR Description: probable sugar transport protein 205 - beet
  misc_feature (1)..(428): NCBI GI NO: 15226682 NR Description: putative sugar transporter; protein id: At2g16120
  misc_feature (1)..(428): NCBI GI NO: 29691859 NR Description: sorbitol transporter [Malus x domestica]
  misc_feature (221)..(221): Xaa is any aa, unknown or other
MSGAQKFVQADLGVTDAQLEVLIGATSVYSLVGSLAAGWACDRAGRRRTIALSAALFLAGSAVTAAADGYAALMAGQFVAGVACGFGLVVAPVYIAEISPANARGFLSSIPEIAGNSGILLSYIADFALAGLPTPLNWRLMIGIGAVPPLFLAAAAALAMPETPRWLVLHGHRDEARRVLARTVGDADRRLQEIVTSVQEATKQAGSGGGDAPSSASVRRXILLRPTPAVRRVMLAILGLQVFQQACGVAAMVLYAPRVFSHVGITSERDVLGATVLLGAAKTVAIVVPLFLADSLGRRPMLLTSAGGMAASLLVLGLSIRATSAATCVAAAVAFMATFSLGFGPVIWMYGSEILPLRLRAQGTGVGTAVNRVMSAIVGMTFIPMYEAVGMAGTFYIFAAMSAAAWVFVYACLPETKGRSLEEMEALFDAGAGADAAPSPRAALS

SEQ ID NO: 40903 - protein, 372 aa, Zea mays subsp. mays
  peptide (1)..(372): Ceres Seq. ID no. 12436374
  misc_feature (1)..(355): Pfam Name: and other Pfam Description: Sugar
  misc_feature (1)..(355): NCBI GI NO: 30025133 NR Description: putative sorbitol transporter [Prunus cerasus]
  misc_feature (1)..(368): NCBI GI NO: 15230212 NR Description: sugar transport, putative; protein id: At3g18830.1
  misc_feature (1)..(355): NCBI GI NO: 28316433 NR Description: sorbitol transporter [Prunus cerasus]
  misc_feature (1)..(355): NCBI GI NO: 33636088 NR Description: sorbitol-like transporter [Glycine max]
  misc_feature (1)..(367): NCBI GI NO: 16118827 NR Description: putative sugar transporter [Oryza sativa]
  misc_feature (1)..(367): NCBI GI NO: 34393630 NR Description: putative sorbitol transporter
  misc_feature (1)..(356): NCBI GI NO: 1778095 NR Description: putative sugar transporter
  misc_feature (1)..(356): NCBI GI NO: 7484647 NR Description: probable sugar transport protein 205 - beet
  misc_feature (1)..(355): NCBI GI NO: 15226682 NR Description: putative sugar transporter; protein id: At2g16120
  misc_feature (1)..(355): NCBI GI NO: 29691859 NR Description: sorbitol transporter [Malus x domestica]
  misc_feature (148)..(148): Xaa is any aa, unknown or other
MAGQFVAGVACGFGLVVAPVYIAEISPANARGFLSSIPEIAGNSGILLSYIADFALAGLPTPLNWRLMIGIGAVPPLFLAAAAALAMPETPRWLVLHGHRDEARRVLARTVGDADRRLQEIVTSVQEATKQAGSGGGDAPSSASVRRXILLRPTPAVRRVMLAILGLQVFQQACGVAAMVLYAPRVFSHVGITSERDVLGATVLLGAAKTVAIVVPLFLADSLGRRPMLLTSAGGMAASLLVLGLSIRATSAATCVAAAVAFMATFSLGFGPVIWMYGSEILPLRLRAQGTGVGTAVNRVMSAIVGMTFIPMYEAVGMAGTFYIFAAMSAAAWVFVYACLPETKGRSLEEMEALFDAGAGADAAPSPRAALS

SEQ ID NO: 40904 - DNA, 2161 bp, Zea mays subsp. mays; identical to SEQ ID NO: 29098
  misc_feature (1)..(2161): Ceres Seq. ID no. 13494407
  misc_feature (1914)..(1914): n is a, c, t, g, unknown, or other
  misc_feature (1981)..(1981): n is a, c, t, g, unknown, or other
  misc_feature (1873)..(1873): n is a, c, t, g, unknown, or other
  misc_feature (1786)..(1786): n is a, c, t, g, unknown, or other

SEQ ID NO: 40905 - protein, 412 aa, Zea mays subsp. mays; identical to SEQ ID NO: 29099
  peptide (1)..(412): Ceres Seq. ID no. 13494408
  misc_feature (352)..(408): Pfam Name: Pfam Description:  Extensin-like region
  misc_feature (2)..(409): NCBI GI NO: 34906174 NR Description: putative extensin-like protein
  misc_feature (35)..(409): NCBI GI NO: 34912294 NR Description: putative extensin-like protein
  misc_feature (28)..(408): NCBI GI NO: 15233976 NR Description: leucine-rich repeat extensin family
  misc_feature (383)..(411): NCBI GI NO: 15233976 NR Description: leucine-rich repeat extensin family
  misc_feature (29)..(409): NCBI GI NO: 15235668 NR Description: leucine-rich repeat extensin family
  misc_feature (28)..(409): NCBI GI NO: 15230120 NR Description: leucine-rich repeat extensin family
  misc_feature (47)..(408): NCBI GI NO: 15228861 NR Description: leucine-rich repeat extensin family
  misc_feature (35)..(412): NCBI GI NO: 7484956 NR Description: extensin homolog F24O1.18 - Arabidopsis thaliana
  misc_feature (35)..(412): NCBI GI NO: 15220780 NR Description: leucine-rich repeat extensin family
  misc_feature (35)..(408): NCBI GI NO: 15221178 NR Description: leucine-rich repeat extensin family

SEQ ID NO: 40906 - protein, 411 aa, Zea mays subsp. mays; identical to SEQ ID NO: 29100
  peptide (1)..(411): Ceres Seq. ID no. 13494409
  misc_feature (351)..(407): Pfam Name: Pfam Description:  Extensin-like region
  misc_feature (1)..(408): NCBI GI NO: 34906174 NR Description: putative extensin-like protein
  misc_feature (34)..(408): NCBI GI NO: 34912294 NR Description: putative extensin-like protein
  misc_feature (27)..(407): NCBI GI NO: 15233976 NR Description: leucine-rich repeat extensin family
  misc_feature (382)..(410): NCBI GI NO: 15233976 NR Description: leucine-rich repeat extensin family
  misc_feature (28)..(408): NCBI GI NO: 15235668 NR Description: leucine-rich repeat extensin family
  misc_feature (27)..(408): NCBI GI NO: 15230120 NR Description: leucine-rich repeat extensin family
  misc_feature (46)..(407): NCBI GI NO: 15228861 NR Description: leucine-rich repeat extensin family
  misc_feature (34)..(411): NCBI GI NO: 7484956 NR Description: extensin homolog F24O1.18 - Arabidopsis thaliana
  misc_feature (34)..(411): NCBI GI NO: 15220780 NR Description: leucine-rich repeat extensin family
  misc_feature (34)..(407): NCBI GI NO: 15221178 NR Description: leucine-rich repeat extensin family

SEQ ID NO: 40907 - DNA, 2010 bp, Zea mays subsp. mays
  misc_feature (1)..(2010): Ceres Seq. ID no. 12362438
actcaccacccccggccgagcgaattgaagaagctccccctctgaactgaagcaatggcaggcggcaatgccggtggcgccgctcgagtcctgttctccatcctcggcctggcgctggcgctgccgctgctcgtggccggcgacgacccgtaccggttcttcacgtggacggtgacctacggcgacatctacccgctgggcgtcaagcagcaggggatcctgatcaacaaccagttcccggggccgcagatcgaggccgtcaccaacgacaacctcatcatcaacgtcttcaacaagctcaacgagccgttcctcctctcctggagcgggctccagcagcggcggaactcgttcgaggacggcgtggccgggacgacgtgcccgatcccgccgggctccaacttcacctacatcatgcaggccaaggaccagatcggcacctactactacttcccatcgctggccttccacaaggccgccggcgggttcggcggcatccgcgtgctcagccgcccgcagatccccgtcccgttcccgccgccggccgccgactacaccgtcctcatcggcgactggtacaaggccaaccacaccgacttgcggtacgtgctcgacagcggcgtggcgctcgggttccctgacgggctgctcatcaacggctggggcctgaatggctacaccttcaacgttcagcccggccggacgtaccggttccggatcaccaacgtggggctggccacgtccctcaacatccggttccaggggcacaccatgaagctggtggaggtggagggctcgcacaccatgcagaccacctactcgtccctggacgtgcacctgggccagtcctactccgtgctgctcaccgccgaccagccgggctacgactacgccgtcgtcgtctccacgcgcttcacgagccggatcatctccaccacggcggtcctgcgctacgccaactccgccggcagggcgccgggtcccctccccggtggccccaccatccagatcgactggtcgctcaaccaggcccgctcggtccggtggaacctgacggccagcgggccgcggcccaacccgcaggggtcgtaccactacggcctggtgccggtgacctggaccatccgcctggccaactcggcggcgaccatcggcgggaagcggcgctacgcggtgaacggcgcgtcgtacgtgggccccgacaccccgctcaaggtcgcagactactacaagatcggcggcgtcttctccgtgggcaccatcgccgacagcccccccgcctacggcggcgccgcctacctgcggacgtcggtcatgggcgccagctacagggactacgtcgaggtcgtgttcgagaacggcgaggacgaggtgcagtcgtggcacatcgacggatacgccttctgggtcgtcgggatggatggagggaaatggtcgtcggcaagcaggcagggctacaacctgagggacggcgtttcgcggtacactgttcaggtgtaccccagatcgtggacggcgatttacatgcccctggacaacgtgggcatgtggaacgtccggtcggagaactgggccaggcagtacctggggcagcagttctacctccgcgtctggacgccgtccacgtcgttgcgcgacgagtaccccatccccaagaacgcgctcctgtgcggccgggcggccggacgccggaccaggccgctgtgagagtgacactgccgccggatcattcacagcttttgtcatgagaggatgacacactattggtttggtctttggagaagagcaggaacatacacaagtttatataccctcaactgaagggaggttcagaggaacgaaagtgttgcttgccgattttttttcattttagtttttttttccctttaaagtttcatatttacgtctctgctgaactaaaaccgtgttggaatttctgggtcaacactataacttatactccctccgtcccaacatagtatttgttttagagtgttaacggattcatgc

SEQ ID NO: 40908 - protein, 550 aa, Zea mays subsp. mays
  peptide (1)..(550): Ceres Seq. ID no. 12362439
  misc_feature (6)..(550): NCBI GI NO: 15982771 NR Description: At1g76160/T23E18_10 [Arabidopsis thaliana]
  misc_feature (14)..(550): NCBI GI NO: 1255951 NR Description: PS60 [Nicotiana tabacum]
  misc_feature (6)..(550): NCBI GI NO: 15222981 NR Description: pectinesterase
  misc_feature (6)..(550): NCBI GI NO: 22531132 NR Description: pectinesterase, putative [Arabidopsis thaliana]
  misc_feature (1)..(550): NCBI GI NO: 16648889 NR Description: Unknown protein [Arabidopsis thaliana]
  misc_feature (1)..(550): NCBI GI NO: 25285550 NR Description: probable pectinesterase
  misc_feature (1)..(550): NCBI GI NO: 18400509 NR Description: pectinesterase
  misc_feature (17)..(549): NCBI GI NO: 15234688 NR Description: pectinesterase
  misc_feature (30)..(534): NCBI GI NO: 7432997 NR Description: pollen-specific protein homolog - tomato
  misc_feature (16)..(547): NCBI GI NO: 15219118 NR Description: pectinesterase
MAGGNAGGAARVLFSILGLALALPLLVAGDDPYRFFTWTVTYGDIYPLGVKQQGILINNQFPGPQIEAVTNDNLIINVFNKLNEPFLLSWSGLQQRRNSFEDGVAGTTCPIPPGSNFTYIMQAKDQIGTYYYFPSLAFHKAAGGFGGIRVLSRPQIPVPFPPPAADYTVLIGDWYKANHTDLRYVLDSGVALGFPDGLLINGWGLNGYTFNVQPGRTYRFRITNVGLATSLNIRFQGHTMKLVEVEGSHTMQTTYSSLDVHLGQSYSVLLTADQPGYDYAVVVSTRFTSRIISTTAVLRYANSAGRAPGPLPGGPTIQIDWSLNQARSVRWNLTASGPRPNPQGSYHYGLVPVTWTIRLANSAATIGGKRRYAVNGASYVGPDTPLKVADYYKIGGVFSVGTIADSPPAYGGAAYLRTSVMGASYRDYVEVVFENGEDEVQSWHIDGYAFWVVGMDGGKWSSASRQGYNLRDGVSRYTVQVYPRSWTAIYMPLDNVGMWNVRSENWARQYLGQQFYLRVWTPSTSLRDEYPIPKNALLCGRAAGRRTRPL

SEQ ID NO: 40909 - protein, 430 aa, Zea mays subsp. mays
  peptide (1)..(430): Ceres Seq. ID no. 12362440
  misc_feature (1)..(430): NCBI GI NO: 15982771 NR Description: At1g76160/T23E18_10 [Arabidopsis thaliana]
  misc_feature (1)..(430): NCBI GI NO: 1255951 NR Description: PS60 [Nicotiana tabacum]
  misc_feature (1)..(430): NCBI GI NO: 15222981 NR Description: pectinesterase
  misc_feature (1)..(430): NCBI GI NO: 22531132 NR Description: pectinesterase, putative [Arabidopsis thaliana]
  misc_feature (1)..(430): NCBI GI NO: 16648889 NR Description: Unknown protein [Arabidopsis thaliana]
  misc_feature (1)..(430): NCBI GI NO: 25285550 NR Description: probable pectinesterase
  misc_feature (1)..(430): NCBI GI NO: 18400509 NR Description: pectinesterase
  misc_feature (1)..(429): NCBI GI NO: 15234688 NR Description: pectinesterase
  misc_feature (1)..(414): NCBI GI NO: 7432997 NR Description: pollen-specific protein homolog - tomato
  misc_feature (1)..(427): NCBI GI NO: 15219118 NR Description: pectinesterase
MQAKDQIGTYYYFPSLAFHKAAGGFGGIRVLSRPQIPVPFPPPAADYTVLIGDWYKANHTDLRYVLDSGVALGFPDGLLINGWGLNGYTFNVQPGRTYRFRITNVGLATSLNIRFQGHTMKLVEVEGSHTMQTTYSSLDVHLGQSYSVLLTADQPGYDYAVVVSTRFTSRIISTTAVLRYANSAGRAPGPLPGGPTIQIDWSLNQARSVRWNLTASGPRPNPQGSYHYGLVPVTWTIRLANSAATIGGKRRYAVNGASYVGPDTPLKVADYYKIGGVFSVGTIADSPPAYGGAAYLRTSVMGASYRDYVEVVFENGEDEVQSWHIDGYAFWVVGMDGGKWSSASRQGYNLRDGVSRYTVQVYPRSWTAIYMPLDNVGMWNVRSENWARQYLGQQFYLRVWTPSTSLRDEYPIPKNALLCGRAAGRRTRPL

SEQ ID NO: 40910 - protein, 311 aa, Zea mays subsp. mays
  peptide (1)..(311): Ceres Seq. ID no. 12362441
  misc_feature (1)..(311): NCBI GI NO: 15982771 NR Description: At1g76160/T23E18_10 [Arabidopsis thaliana]
  misc_feature (1)..(311): NCBI GI NO: 1255951 NR Description: PS60 [Nicotiana tabacum]
  misc_feature (1)..(311): NCBI GI NO: 15222981 NR Description: pectinesterase
  misc_feature (1)..(311): NCBI GI NO: 22531132 NR Description: pectinesterase, putative [Arabidopsis thaliana]
  misc_feature (1)..(311): NCBI GI NO: 16648889 NR Description: Unknown protein [Arabidopsis thaliana]
  misc_feature (1)..(311): NCBI GI NO: 18400509 NR Description: pectinesterase
  misc_feature (1)..(311): NCBI GI NO: 25285550 NR Description: probable pectinesterase
  misc_feature (1)..(310): NCBI GI NO: 15234688 NR Description: pectinesterase
  misc_feature (1)..(295): NCBI GI NO: 7432997 NR Description: pollen-specific protein homolog - tomato
  misc_feature (1)..(308): NCBI GI NO: 15219118 NR Description: pectinesterase
MKLVEVEGSHTMQTTYSSLDVHLGQSYSVLLTADQPGYDYAVVVSTRFTSRIISTTAVLRYANSAGRAPGPLPGGPTIQIDWSLNQARSVRWNLTASGPRPNPQGSYHYGLVPVTWTIRLANSAATIGGKRRYAVNGASYVGPDTPLKVADYYKIGGVFSVGTIADSPPAYGGAAYLRTSVMGASYRDYVEVVFENGEDEVQSWHIDGYAFWVVGMDGGKWSSASRQGYNLRDGVSRYTVQVYPRSWTAIYMPLDNVGMWNVRSENWARQYLGQQFYLRVWTPSTSLRDEYPIPKNALLCGRAAGRRTRPL

SEQ ID NO: 40911 - DNA, 1184 bp, Zea mays subsp. mays
  misc_feature (1)..(1184): Ceres Seq. ID no. 12364672
gcacgagaccattacctagaacatcctaatcgaaaactccacctccaccaatccaaccaaccattggccattgcgtagaaaagattactttaagaatgggctgctccaagcgcattgcactggtacttgtcgcggctcttgtagcgctccacgtccatgtcccgatggccaccgcagccaactccaacctcttccgggactacatcggcgccatcttcaacggcgtcaagttcaccgacgtccccatcaacccgagggtccgcttcgactacatcctcgccttcgtgatcgactacaccaccgcgacggagccgcccaccccgaccaacggccagttcaacatcttctggcaggactcggtgctgacggcgtccgcggtggccgccatcaagcagagcaacccgaacgtgcgggtggccgtcagcatcggcggcgccaccgtgaacgaccgccctgtgttcttcaacatcacctccgtcgactcctgggtccagaacgccgtctcctccctgaccaccatcatccagaagtacaacctggacggcatcgacatcgactacgagcagttccaggccgacccggccaccttcgccgagtgcatcggccgcctggtcaccacgctcaagagcaacggggtgatcagcttcgcgtccatcgccccgttcgacaacgccgacgtgcagcgccattaccaggccctgtgggcgacctacggaagcgtcatagactacgtcaacttccagttctacgcctacggcgccagcacgaccgaggcgcagtacgtcgacttcttcaaccagcagcttgtcaactaccccggcggcaacatcctggccagcttcaccacggcgcccaccaccacgtcggtgcccatcaacacgtcgctcagcgcttgccagacattgcagtcgcagggcaagctctacgggatcttcatctgggcagcccgaccattccaggagccaaggcttcaagtacgacacacaagcacaagcactgctcgccaacgcccctgctggctactagtagatggctaccataccttcaatgcgtttaagttggatttggatttcattttcaggtgaacaaataatattattatgtatggaataaggctgtcattggaatataatacggggctatttctatattcctgtgttctctataaaaattaaacaattctt

SEQ ID NO: 40912 - protein, 329 aa, Zea mays subsp. mays
  peptide (1)..(329): Ceres Seq. ID no. 12364673
  misc_feature (49)..(284): Pfam Name: Pfam Description:  Glycosyl hydrolases family 18
  misc_feature (1)..(284): NCBI GI NO: 37534348 NR Description: putative class III chitinase RCB4
  misc_feature (29)..(284): NCBI GI NO: 27462188 NR Description: chitinase [Oryza sativa]
  misc_feature (32)..(284): NCBI GI NO: 7434972 NR Description: chitinase (EC 3
  misc_feature (23)..(284): NCBI GI NO: 11262118 NR Description: chitinase (EC 3
  misc_feature (32)..(284): NCBI GI NO: 7434971 NR Description: chitinase (EC 3
  misc_feature (31)..(284): NCBI GI NO: 7434970 NR Description: chitinase (EC 3.2.1.14) a - Gladiolus gandavensis
  misc_feature (29)..(284): NCBI GI NO: 37534362 NR Description: putative class III chitinase
  misc_feature (29)..(284): NCBI GI NO: 37534356 NR Description: putative class III chitinase
  misc_feature (32)..(284): NCBI GI NO: 632149 NR Description: narbonin - Vicia pannonica
  misc_feature (49)..(238): NCBI GI NO: 730692 NR Description: RuBisCO-associated protein
MGCSKRIALVLVAALVALHVHVPMATAANSNLFRDYIGAIFNGVKFTDVPINPRVRFDYILAFVIDYTTATEPPTPTNGQFNIFWQDSVLTASAVAAIKQSNPNVRVAVSIGGATVNDRPVFFNITSVDSWVQNAVSSLTTIIQKYNLDGIDIDYEQFQADPATFAECIGRLVTTLKSNGVISFASIAPFDNADVQRHYQALWATYGSVIDYVNFQFYAYGASTTEAQYVDFFNQQLVNYPGGNILASFTTAPTTTSVPINTSLSACQTLQSQGKLYGIFIWAARPFQEPRLQVRHTSTSTARQRPCWLLVDGYHTFNAFKLDLDFIFR

SEQ ID NO: 40913 - protein, 306 aa, Zea mays subsp. mays
  peptide (1)..(306): Ceres Seq. ID no. 12364674
  misc_feature (26)..(261): Pfam Name: Pfam Description:  Glycosyl hydrolases family 18
  misc_feature (1)..(261): NCBI GI NO: 37534348 NR Description: putative class III chitinase RCB4
  misc_feature (6)..(261): NCBI GI NO: 27462188 NR Description: chitinase [Oryza sativa]
  misc_feature (9)..(261): NCBI GI NO: 7434972 NR Description: chitinase (EC 3
  misc_feature (1)..(261): NCBI GI NO: 11262118 NR Description: chitinase (EC 3
  misc_feature (9)..(261): NCBI GI NO: 7434971 NR Description: chitinase (EC 3
  misc_feature (8)..(261): NCBI GI NO: 7434970 NR Description: chitinase (EC 3.2.1.14) a - Gladiolus gandavensis
  misc_feature (6)..(261): NCBI GI NO: 37534362 NR Description: putative class III chitinase
  misc_feature (6)..(261): NCBI GI NO: 37534356 NR Description: putative class III chitinase
  misc_feature (9)..(261): NCBI GI NO: 632149 NR Description: narbonin - Vicia pannonica
  misc_feature (26)..(215): NCBI GI NO: 730692 NR Description: RuBisCO-associated protein
MATAANSNLFRDYIGAIFNGVKFTDVPINPRVRFDYILAFVIDYTTATEPPTPTNGQFNIFWQDSVLTASAVAAIKQSNPNVRVAVSIGGATVNDRPVFFNITSVDSWVQNAVSSLTTIIQKYNLDGIDIDYEQFQADPATFAECIGRLVTTLKSNGVISFASIAPFDNADVQRHYQALWATYGSVIDYVNFQFYAYGASTTEAQYVDFFNQQLVNYPGGNILASFTTAPTTTSVPINTSLSACQTLQSQGKLYGIFIWAARPFQEPRLQVRHTSTSTARQRPCWLLVDGYHTFNAFKLDLDFIFR

SEQ ID NO: 40914 - DNA, 2116 bp, Zea mays subsp. mays; identical to SEQ ID NO: 39957
  misc_feature (1)..(2116): Ceres Seq. ID no. 13566658
  misc_feature (1610)..(1610): n is a, c, t, g, unknown, or other

SEQ ID NO: 40915 - protein, 592 aa, Zea mays subsp. mays; identical to SEQ ID NO: 39958
  peptide (1)..(592): Ceres Seq. ID no. 13566659
  misc_feature (7)..(588): NCBI GI NO: 34897712 NR Description: ESTs AU082304
  misc_feature (7)..(589): NCBI GI NO: 27817921 NR Description: putative pectinesterase
  misc_feature (21)..(592): NCBI GI NO: 15234551 NR Description: pectinesterase (pectin methylesterase) family
  misc_feature (1)..(341): NCBI GI NO: 37535902 NR Description: putative ascorbate oxidase
  misc_feature (326)..(590): NCBI GI NO: 37535902 NR Description: putative ascorbate oxidase
  misc_feature (13)..(589): NCBI GI NO: 22328918 NR Description: pectinesterase (pectin methylesterase) family
  misc_feature (5)..(588): NCBI GI NO: 15242108 NR Description: pectinesterase (pectin methylesterase) family
  misc_feature (13)..(557): NCBI GI NO: 7433000 NR Description: pollen-specific protein homolog F24A6
  misc_feature (8)..(490): NCBI GI NO: 34893990 NR Description: putative pollen-specific protein homolog
  misc_feature (490)..(557): NCBI GI NO: 34893990 NR Description: putative pollen-specific protein homolog
  misc_feature (489)..(489): Xaa is any aa, unknown or other

SEQ ID NO: 40916 - protein, 535 aa, Zea mays subsp. mays; identical to SEQ ID NO: 39959
  peptide (1)..(535): Ceres Seq. ID no. 13566660
  misc_feature (1)..(531): NCBI GI NO: 34897712 NR Description: ESTs AU082304
  misc_feature (1)..(532): NCBI GI NO: 27817921 NR Description: putative pectinesterase
  misc_feature (1)..(535): NCBI GI NO: 15234551 NR Description: pectinesterase (pectin methylesterase) family
  misc_feature (1)..(284): NCBI GI NO: 37535902 NR Description: putative ascorbate oxidase
  misc_feature (269)..(533): NCBI GI NO: 37535902 NR Description: putative ascorbate oxidase
  misc_feature (1)..(532): NCBI GI NO: 22328918 NR Description: pectinesterase (pectin methylesterase) family
  misc_feature (1)..(531): NCBI GI NO: 15242108 NR Description: pectinesterase (pectin methylesterase) family
  misc_feature (1)..(500): NCBI GI NO: 7433000 NR Description: pollen-specific protein homolog F24A6
  misc_feature (1)..(433): NCBI GI NO: 34893990 NR Description: putative pollen-specific protein homolog
  misc_feature (433)..(500): NCBI GI NO: 34893990 NR Description: putative pollen-specific protein homolog
  misc_feature (432)..(432): Xaa is any aa, unknown or other

SEQ ID NO: 40917 - protein, 463 aa, Zea mays subsp. mays; identical to SEQ ID NO: 39960
  peptide (1)..(463): Ceres Seq. ID no. 13566661
  misc_feature (1)..(459): NCBI GI NO: 34897712 NR Description: ESTs AU082304
  misc_feature (1)..(460): NCBI GI NO: 27817921 NR Description: putative pectinesterase
  misc_feature (1)..(463): NCBI GI NO: 15234551 NR Description: pectinesterase (pectin methylesterase) family
  misc_feature (1)..(212): NCBI GI NO: 37535902 NR Description: putative ascorbate oxidase
  misc_feature (197)..(461): NCBI GI NO: 37535902 NR Description: putative ascorbate oxidase
  misc_feature (1)..(460): NCBI GI NO: 22328918 NR Description: pectinesterase (pectin methylesterase) family
  misc_feature (1)..(459): NCBI GI NO: 15242108 NR Description: pectinesterase (pectin methylesterase) family
  misc_feature (1)..(428): NCBI GI NO: 7433000 NR Description: pollen-specific protein homolog F24A6
  misc_feature (1)..(361): NCBI GI NO: 34893990 NR Description: putative pollen-specific protein homolog
  misc_feature (361)..(428): NCBI GI NO: 34893990 NR Description: putative pollen-specific protein homolog
  misc_feature (360)..(360): Xaa is any aa, unknown or other

SEQ ID NO: 40918 - DNA, 2003 bp, Zea mays subsp. mays
  misc_feature (1)..(2003): Ceres Seq. ID no. 12387993
gcaccgagaccattacctagaacatcctaatcgaaaaatccgacccagtatccccgacaaagtcaatgcgatgcgtctcctccttgctctatcgactatcgtagccgattccccgttgcaagtaactaaaactaagtctcaagtctgcagagtaaccggagtagcatagcactagcaagcaatggccgctctcacttccgctctcctcttcgccgccctcctcgtggccgcccagtacgtgctccgcttgctccactccttcctgtgggtcccgttccgcctggaacgccgcttccggcggcagggaatccggtggccaccacgaagcctggtctccggtaacgcagccgactaccgcgacctgctagccgccgccaggtccgcgcccctctcctccttccgccacaacggcgtcgtcgcccgcgccacgccgcagtacgcggtctggctggcgcggtacggccggccgttcgtgtactggttcgggccccggccgcggctggtgatctccgacacggagctcgtgaaggccgtgatgaccgactccacggggggctttgataaggcggcctcgggcggcaacaacccgctcgccaggcagctcatcggcgaggggctcgtcgggctctccggggagacgtgggcgcgccaccgccgcgtgatttcgccggcgtttaacatggagagggtgaaggcttggataccagaaatagcagctgcggcatcacctgttctggataagtgggaggccgaaggtgggagccgcactgagtttgagatcgatgtccataaagcattccacactttgagtgcggatgtcatttcctgtgtggcatttggaagcaggctacgaggaggggaaacgaattttccaattgcaggaggaacagatgcaacttgctcttcttgcaatgaggactgtttatattcctggcttcaggtttgtaccaacaaagaagaaccgaaaaaggcagaggttaaaccaggaaatccaatgctccctgcgcaaattgatcgaaatcaatggaacaaaatgtgaggactcaaaaaatttgctggggttaatgctatcagccagcaaagctgggagtgaatacaaaatgggaatcgaagagataatccatgagtgcaagacgttttactttgctgggaaggaaacaacagcgaacctgttgacatgggcaacacttcttcttgcgttgcatcaagagtggcaggtcaaggcccgtgatgaggttcttaaagtgtgcggaaagcatgagcaccctaatgcagaaaacctgagcgatctcaagattgtaactatggtgttaaaagaaaccctcaggctgtatcctccagctacatttatcaatcggactgccactagggatatcaagctgggtaaactagacatcccggctggcacacggctggacttccctatcattcacatccatcgtgaccatgaagtctggggcatggatgcagaggagtttaatccatcaaggtttgcagatggcagcagctatcacctaggtgcttacttcccctttgggatcggccctacaatctgcgttggccagaatcttgcaatggtcgaggccaaggtggcgcttgcaatgacccttcagcggtttgcgttcaccgtttcggcgtcttatgctcatgcaccgatgctggtgttcaccctccagcctcagttcggtgctcaagttcttgtccggaagatatgagccttctatgtgacaaccaataaggtcataaaatttctatatctttttgagtagtctgaaggatccatgaggcctctcctttttttcttcttctttcgaacacaggactctacttttttttgttcaatcctgttcatgaaagacttgtatataagatttgttctctacaggaatctgataaaggcttcaaacacttgagctaaaatggcatgtgttgtacaaaaaccatctagaacctgcatgaatataccgatttggaactgcaagcctcaccgcttgggtttgttg

SEQ ID NO: 40919 - protein, 299 aa, Zea mays subsp. mays
  peptide (1)..(299): Ceres Seq. ID no. 12387994
  misc_feature (13)..(299): NCBI GI NO: 15222125 NR Description: cytochrome P450, putative; protein id: At1g75130.1
  misc_feature (10)..(299): NCBI GI NO: 15225777 NR Description: cytochrome P450, putative; protein id: At2g26710.1
  misc_feature (12)..(297): NCBI GI NO: 34896248 NR Description: OSJNBb0008D07.14
  misc_feature (10)..(299): NCBI GI NO: 21805645 NR Description: cytochrome P450 monooxygenase CYP72A5
  misc_feature (10)..(299): NCBI GI NO: 13661774 NR Description: putative cytochrome P450 [Lolium rigidum]
  misc_feature (10)..(299): NCBI GI NO: 13661772 NR Description: putative cytochrome P450 [Lolium rigidum]
  misc_feature (10)..(299): NCBI GI NO: 13661768 NR Description: putative cytochrome P450 [Lolium rigidum]
  misc_feature (10)..(299): NCBI GI NO: 13661766 NR Description: putative cytochrome P450 [Lolium rigidum]
  misc_feature (10)..(299): NCBI GI NO: 13661770 NR Description: putative cytochrome P450 [Lolium rigidum]
  misc_feature (10)..(299): NCBI GI NO: 21842133 NR Description: cytochrome P450 monooxygenase CYP72A16
MSFPVWHLEAGYEEGKRIFQLQEEQMQLALLAMRTVYIPGFRFVPTKKNRKRQRLNQEIQCSLRKLIEINGTKCEDSKNLLGLMLSASKAGSEYKMGIEEIIHECKTFYFAGKETTANLLTWATLLLALHQEWQVKARDEVLKVCGKHEHPNAENLSDLKIVTMVLKETLRLYPPATFINRTATRDIKLGKLDIPAGTRLDFPIIHIHRDHEVWGMDAEEFNPSRFADGSSYHLGAYFPFGIGPTICVGQNLAMVEAKVALAMTLQRFAFTVSASYAHAPMLVFTLQPQFGAQVLVRKI

SEQ ID NO: 40920 - protein, 285 aa, Zea mays subsp. mays
  peptide (1)..(285): Ceres Seq. ID no. 12387995
  misc_feature (7)..(232): NCBI GI NO: 15222125 NR Description: cytochrome P450, putative; protein id: At1g75130.1
  misc_feature (29)..(241): NCBI GI NO: 15225777 NR Description: cytochrome P450, putative; protein id: At2g26710.1
  misc_feature (90)..(232): NCBI GI NO: 34896248 NR Description: OSJNBb0008D07.14
  misc_feature (11)..(96): NCBI GI NO: 34896248 NR Description: OSJNBb0008D07.14
  misc_feature (3)..(234): NCBI GI NO: 21805645 NR Description: cytochrome P450 monooxygenase CYP72A5
  misc_feature (8)..(234): NCBI GI NO: 13661774 NR Description: putative cytochrome P450 [Lolium rigidum]
  misc_feature (8)..(234): NCBI GI NO: 13661772 NR Description: putative cytochrome P450 [Lolium rigidum]
  misc_feature (3)..(234): NCBI GI NO: 13661768 NR Description: putative cytochrome P450 [Lolium rigidum]
  misc_feature (3)..(234): NCBI GI NO: 13661770 NR Description: putative cytochrome P450 [Lolium rigidum]
  misc_feature (4)..(234): NCBI GI NO: 13661766 NR Description: putative cytochrome P450 [Lolium rigidum]
MAALTSALLFAALLVAAQYVLRLLHSFLWVPFRLERRFRRQGIRWPPRSLVSGNAADYRDLLAAARSAPLSSFRHNGVVARATPQYAVWLARYGRPFVYWFGPRPRLVISDTELVKAVMTDSTGGFDKAASGGNNPLARQLIGEGLVGLSGETWARHRRVISPAFNMERVKAWIPEIAAAASPVLDKWEAEGGSRTEFEIDVHKAFHTLSADVISCVAFGSRLRGGETNFPIAGGTDATCSSCNEDCLYSWLQVCTNKEEPKKAEVKPGNPMLPAQIDRNQWNKM

SEQ ID NO: 40921 - protein, 274 aa, Zea mays subsp. mays
  peptide (1)..(274): Ceres Seq. ID no. 12387996
  misc_feature (1)..(274): NCBI GI NO: 15222125 NR Description: cytochrome P450, putative; protein id: At1g75130.1
  misc_feature (1)..(274): NCBI GI NO: 15225777 NR Description: cytochrome P450, putative; protein id: At2g26710.1
  misc_feature (1)..(272): NCBI GI NO: 34896248 NR Description: OSJNBb0008D07.14
  misc_feature (1)..(274): NCBI GI NO: 21805645 NR Description: cytochrome P450 monooxygenase CYP72A5
  misc_feature (1)..(274): NCBI GI NO: 13661774 NR Description: putative cytochrome P450 [Lolium rigidum]
  misc_feature (1)..(274): NCBI GI NO: 13661772 NR Description: putative cytochrome P450 [Lolium rigidum]
  misc_feature (1)..(274): NCBI GI NO: 13661768 NR Description: putative cytochrome P450 [Lolium rigidum]
  misc_feature (1)..(274): NCBI GI NO: 13661766 NR Description: putative cytochrome P450 [Lolium rigidum]
  misc_feature (1)..(274): NCBI GI NO: 13661770 NR Description: putative cytochrome P450 [Lolium rigidum]
  misc_feature (1)..(274): NCBI GI NO: 21842133 NR Description: cytochrome P450 monooxygenase CYP72A16
MQLALLAMRTVYIPGFRFVPTKKNRKRQRLNQEIQCSLRKLIEINGTKCEDSKNLLGLMLSASKAGSEYKMGIEEIIHECKTFYFAGKETTANLLTWATLLLALHQEWQVKARDEVLKVCGKHEHPNAENLSDLKIVTMVLKETLRLYPPATFINRTATRDIKLGKLDIPAGTRLDFPIIHIHRDHEVWGMDAEEFNPSRFADGSSYHLGAYFPFGIGPTICVGQNLAMVEAKVALAMTLQRFAFTVSASYAHAPMLVFTLQPQFGAQVLVRKI

SEQ ID NO: 40922 - DNA, 1911 bp, Zea mays subsp. mays
  misc_feature (1)..(1911): Ceres Seq. ID no. 12375693
gcacgagaccattacctagaacatcctaatcaaaaaacggggccgccggccggactcttctgacttggcaaccgccgcgcagcgcgacgagcgccacctgcttgctgccgcgtgcctgcgtgcgtgtgcgtccaccactgaccccgcgcccgcccgccgcccctgcccctccactccacttgctcactcgtcggctcgtcgcggcccgcttcccccccggccaagggatggacgcgcttcgcctacggccgtccctcctccccgtgcggcccggcgcggcccgcccgcgagatcattttctaccaccatgttgttccatacaacgaaatggtgaaggacgaatttgcttttctagccaaaggacccaaggtcctaccttgcatcaccatcagaaattcttcgaatggaaatcctcctattgtaggatatcacatcggtcattaaatacttctgttaatgcttcggggcaacagctgcagtctgaacctgaaacacatgattctacaaccatctggagggcaatatcatcttctctagatgcattttacagattttcccggccacatactgtcataggaacagcattaagcatagtctcagtttcccttctagctgtccagagcttgtctgatatatcacctttgttcctcactggtttgctggaggcagtggtagctgcccttttcatgaatatctatattgttggactgaaccagttattcgacattgagatagacaaggttaacaagccaactcttccattggcatctggggaatacacccttgcaactggggttgcaatagtttcggtctttgccgctatgagctttggccttggatgggctgttggatcacaacctctgttttgggctcttttcataagctttgttcttgggactgcatattcaatcaatctgccgtaccttcgatggaagagatttgctgttgttgcagcactgtgcatattagcagttcgtgcagtgattgttcagctggccttttttctccacattcagacttttgttttcaggagaccggcagtgttttctaggccattattatttgcaactggatttatgacgttcttctctgttgtaatagcactattcaaggatatacctgacatcgaaggggaccgcatattcggggatccgatccttcagcgtccggttagggcaaaagaaggtcttttggatctgcgttggcttgcttgagatggcctacagcgttgcgatactgatgggagctacctcttcctgtttgtggagcaaaacagcaaccatcgctggccattccatacttgccgcgatcctatggagctgcgcgcgatcggtggacttgacgagcaaagccgccaataacgtccttctacatgttcatctggaagctgttctacgcggagtacctgctcatccctctggtgcggtgagcgcgaggcgaggtggtggcagacggatcggcgtcggcggggcggcaaacaactccacgggagaacttgagtgccggaagtaaactcccgtttgaaagttgaagcgtgcaccaccggcaccgggcagagagagacacggtggctggatggatacggatggcccccccaataaattcccccgtgcatggtaccccacgctgcttgatgatatcccatgtgtccgggtgaccggacctgatcgtctctagagagattggttgcataacgtccaacatagcccgtaggtattgctaccactgctagtatgatactccttcctagtccttgccagcaccagtgacccaaacttggtcggctgagctcagcgctcagcagctttacgtgcatctgcgccttgacttgtgcagtgggcgtcgctagcatgaatgatgtatggtgcgtcacggcctgacggttcgtcagtctgggccgtgttttgtgtc

SEQ ID NO: 40923 - protein, 328 aa, Zea mays subsp. mays
  peptide (1)..(328): Ceres Seq. ID no. 12375694
  misc_feature (112)..(307): Pfam Name: Pfam Description:  UbiA prenyltransferase family
  misc_feature (69)..(307): NCBI GI NO: 30680535 NR Description: tocopherol polyprenyltransferase
  misc_feature (95)..(307): NCBI GI NO: 33391142 NR Description: homogentisic acid geranylgeranyl transferase
  misc_feature (99)..(307): NCBI GI NO: 33391138 NR Description: homogentisic acid geranylgeranyl transferase
  misc_feature (84)..(307): NCBI GI NO: 33391144 NR Description: homogentisic acid geranylgeranyl transferase
  misc_feature (121)..(229): NCBI GI NO: 7485781 NR Description: hypothetical protein F19F24
  misc_feature (103)..(306): NCBI GI NO: 23125851 NR Description: hypothetical protein [Nostoc punctiforme]
  misc_feature (101)..(306): NCBI GI NO: 16330366 NR Description: unknown protein [Synechocystis sp. PCC 6803]
  misc_feature (102)..(327): NCBI GI NO: 37519852 NR Description: unknown protein [Gloeobacter violaceus]
  misc_feature (76)..(306): NCBI GI NO: 17230940 NR Description: hypothetical protein [Nostoc sp. PCC 7120]
  misc_feature (93)..(260): NCBI GI NO: 23039416 NR Description: hypothetical protein
MDALRLRPSLLPVRPGAARPRDHFLPPCCSIQRNGEGRICFSSQRTQGPTLHHHQKFFEWKSSYCRISHRSLNTSVNASGQQLQSEPETHDSTTIWRAISSSLDAFYRFSRPHTVIGTALSIVSVSLLAVQSLSDISPLFLTGLLEAVVAALFMNIYIVGLNQLFDIEIDKVNKPTLPLASGEYTLATGVAIVSVFAAMSFGLGWAVGSQPLFWALFISFVLGTAYSINLPYLRWKRFAVVAALCILAVRAVIVQLAFFLHIQTFVFRRPAVFSRPLLFATGFMTFFSVVIALFKDIPDIEGDRIFGDPILQRPVRAKEGLLDLRWLA

SEQ ID NO: 40924 - protein, 175 aa, Zea mays subsp. mays
  peptide (1)..(175): Ceres Seq. ID no. 12375695
  misc_feature (1)..(154): Pfam Name: Pfam Description:  UbiA prenyltransferase family
  misc_feature (1)..(154): NCBI GI NO: 30680535 NR Description: tocopherol polyprenyltransferase
  misc_feature (1)..(154): NCBI GI NO: 33391142 NR Description: homogentisic acid geranylgeranyl transferase
  misc_feature (1)..(154): NCBI GI NO: 33391138 NR Description: homogentisic acid geranylgeranyl transferase
  misc_feature (1)..(154): NCBI GI NO: 33391144 NR Description: homogentisic acid geranylgeranyl transferase
  misc_feature (1)..(76): NCBI GI NO: 7485781 NR Description: hypothetical protein F19F24
  misc_feature (1)..(153): NCBI GI NO: 23125851 NR Description: hypothetical protein [Nostoc punctiforme]
  misc_feature (1)..(153): NCBI GI NO: 16330366 NR Description: unknown protein [Synechocystis sp. PCC 6803]
  misc_feature (1)..(174): NCBI GI NO: 37519852 NR Description: unknown protein [Gloeobacter violaceus]
  misc_feature (1)..(153): NCBI GI NO: 17230940 NR Description: hypothetical protein [Nostoc sp. PCC 7120]
  misc_feature (1)..(107): NCBI GI NO: 23039416 NR Description: hypothetical protein
MNIYIVGLNQLFDIEIDKVNKPTLPLASGEYTLATGVAIVSVFAAMSFGLGWAVGSQPLFWALFISFVLGTAYSINLPYLRWKRFAVVAALCILAVRAVIVQLAFFLHIQTFVFRRPAVFSRPLLFATGFMTFFSVVIALFKDIPDIEGDRIFGDPILQRPVRAKEGLLDLRWLA

SEQ ID NO: 40925 - DNA, 961 bp, Zea mays subsp. mays
  misc_feature (1)..(961): Ceres Seq. ID no. 12420159
attctcgtaagctgaccgtccgtccctgcaatgcaccaggcggaggcggaggcggaggcggtgctctgccagccggcgagcgagttcctgccggtgatgcaggaggtgtacgcggcgctggtggccaaggtggagcgcgccatcccgggcgccaaggtggaggacaacaagttctgcctgtcggtccacttccgttgcgtggaggaggcgtgctgggccgcgctcttcgagcaggtccgcgccgtgctgagggaccacccgggcctgcgcctcaccccagggccgcaaggtgctggaggtccgccccatgatccgctgggacaagggcaaggcgctggagttcctgctccacgccctcggcttcgccgccgacgccgaccgcgacgacgtcttccccatctacgtcggcgacgaccgcaccgacgaggacgccttcagggtgctgcgcgcgcgcgggcacggcgccgggatcctcgtgtccaggttccccaaggacaccagcgcgtccttcacgctacgcgaccccgccgaggtcaaggagttcctgcgcaagctcgtcggcgccaacgacgacagctgatgatccggcccgcgattcgtttccctttcccgccgtgaccagctccgatccgcctgtgtcaagccgctaactcaacctcggctacctacctgctgcaccggcagagggcttccttgttgttgcaactgcatctccatcgagcagcttgctttgggacaagaacagacctagctagtagtacagtagagcccttttgtatcttcgttttttttttggtttccatctctcttgttcatcatgcatgcctgctgttgtttaccatttgcctcggctgaaaaggcttgtattttcggcgcccttcccgcgaggcactgtaactagttgctttgtctgctgtacgtacgcgtaccatgttgaaataatatgtcatgttgaggagcc

SEQ ID NO: 40926 - protein, 195 aa, Zea mays subsp. mays
  peptide (1)..(195): Ceres Seq. ID no. 12420160
  misc_feature (7)..(84): Pfam Name: Pfam Description:  Trehalose-phosphatase
  misc_feature (7)..(84): NCBI GI NO: 30692524 NR Description: trehalose-6-phosphate phosphatase, putative
  misc_feature (9)..(84): NCBI GI NO: 30683008 NR Description: trehalose-6-phosphate phosphatase, putative
  misc_feature (7)..(84): NCBI GI NO: 15227161 NR Description: putative trehalose-6-phosphate phosphatase
  misc_feature (2)..(84): NCBI GI NO: 33146623 NR Description: putative trehalose-6-phosphate phosphatase
  misc_feature (10)..(84): NCBI GI NO: 15238360 NR Description: trehalose-6-phosphate phosphatase
  misc_feature (5)..(84): NCBI GI NO: 15219843 NR Description: trehalose-6-phosphate phosphatase, putative
  misc_feature (9)..(84): NCBI GI NO: 11282598 NR Description: trehalose-6-phosphate phosphatase-like protein -Arabidopsis thaliana
  misc_feature (9)..(84): NCBI GI NO: 15218205 NR Description: trehalose-6-phosphate phosphatase
  misc_feature (9)..(84): NCBI GI NO: 25354595 NR Description: trehalose-phosphatase (EC 3.1.3.12) B
  misc_feature (9)..(84): NCBI GI NO: 18399940 NR Description: trehalose-phosphatase, putative
MHQAEAEAEAVLCQPASEFLPVMQEVYAALVAKVERAIPGAKVEDNKFCLSVHFRCVEEACWAALFEQVRAVLRDHPGLRLTPGPQGAGGPPHDPLGQGQGAGVPAPRPRLRRRRRPRRRLPHLRRRRPHRRGRLQGAARARARRRDPRVQVPQGHQRVLHATRPRRGQGVPAQARRRQRRQLMIRPAIRFPFPP

SEQ ID NO: 40927 - protein, 173 aa, Zea mays subsp. mays
  peptide (1)..(173): Ceres Seq. ID no. 12420161
  misc_feature (1)..(62): Pfam Name: Pfam Description:  Trehalose-phosphatase
  misc_feature (1)..(62): NCBI GI NO: 30692524 NR Description: trehalose-6-phosphate phosphatase, putative
  misc_feature (1)..(62): NCBI GI NO: 30683008 NR Description: trehalose-6-phosphate phosphatase, putative
  misc_feature (1)..(62): NCBI GI NO: 15227161 NR Description: putative trehalose-6-phosphate phosphatase
  misc_feature (1)..(62): NCBI GI NO: 33146623 NR Description: putative trehalose-6-phosphate phosphatase
  misc_feature (1)..(62): NCBI GI NO: 15238360 NR Description: trehalose-6-phosphate phosphatase
  misc_feature (1)..(62): NCBI GI NO: 15219843 NR Description: trehalose-6-phosphate phosphatase, putative
  misc_feature (1)..(62): NCBI GI NO: 11282598 NR Description: trehalose-6-phosphate phosphatase-like protein -Arabidopsis thaliana
  misc_feature (1)..(62): NCBI GI NO: 15218205 NR Description: trehalose-6-phosphate phosphatase
  misc_feature (1)..(62): NCBI GI NO: 25354595 NR Description: trehalose-phosphatase (EC 3.1.3.12) B
  misc_feature (1)..(62): NCBI GI NO: 18399940 NR Description: trehalose-phosphatase, putative
MQEVYAALVAKVERAIPGAKVEDNKFCLSVHFRCVEEACWAALFEQVRAVLRDHPGLRLTPGPQGAGGPPHDPLGQGQGAGVPAPRPRLRRRRRPRRRLPHLRRRRPHRRGRLQGAARARARRRDPRVQVPQGHQRVLHATRPRRGQGVPAQARRRQRRQLMIRPAIRFPFPP

SEQ ID NO: 40928 - protein, 102 aa, Zea mays subsp. mays
  peptide (1)..(102): Ceres Seq. ID no. 12420162
  misc_feature (35)..(88): Pfam Name: 20 copies Pfam Description: Collagen triple helix repeat
  misc_feature (77)..(102): NCBI GI NO: 1082604 NR Description: mucin 5AC (clone JER58) - human (fragment)
  misc_feature (82)..(102): NCBI GI NO: 11359723 NR Description: proteophosphoglycan, membrane-associated
  misc_feature (77)..(102): NCBI GI NO: 5420387 NR Description: proteophosphoglycan [Leishmania major]
  misc_feature (77)..(102): NCBI GI NO: 11359723 NR Description: proteophosphoglycan, membrane-associated
  misc_feature (77)..(102): NCBI GI NO: 27375632 NR Description: blr0521 [Bradyrhizobium japonicum]
  misc_feature (86)..(102): NCBI GI NO: 17384258 NR Description: mucin 5 [Homo sapiens]
  misc_feature (82)..(102): NCBI GI NO: 13592175 NR Description: ppg3 [Leishmania major]
  misc_feature (82)..(102): NCBI GI NO: 13592175 NR Description: ppg3 [Leishmania major]
  misc_feature (82)..(102): NCBI GI NO: 13592175 NR Description: ppg3 [Leishmania major]
  misc_feature (78)..(102): NCBI GI NO: 23017082 NR Description: hypothetical protein [Thermobifida fusca]
SRKLTVRPCNAPGGGGGGGGALPAGERVPAGDAGGVRGAGGQGGARHPGRQGGGQQVLPVGPLPLRGGGVLGRALRAGPRRAEGPPGPAPHPRAARCWRSAP

SEQ ID NO: 40929 - DNA, 1375 bp, Zea mays subsp. mays
  misc_feature (1)..(1375): Ceres Seq. ID no. 12419315
aacagcgagctgcagccacgcgcgccggcgaccaaacaaagccagctaggcaccggcaagggagcggacggagcaagcgcgcggccgatcgatcgagcttcagcttgagctccagcaagatggtgaacttcatcgaggcgcagaagccgctgctgtcacggttgatgaagatggccgggctccgccccattgagatggagctggagccgggcacgaccatgcacgtgtgggcgcccaagcaccacgtgggcaagaagggcaccaccatcagcccgctcgagcctaccgccgccaagaagaagaagaagaataggaagagccccgagtcgaggcccaacgtggtgctcatccacggcttcgccgccgagggcaacgtgacgtggcagttcaacttcggcgtgctggtgtcgcgctacaacctgtacatcccggaccttatgttcttcggcaagtcgtcgacgtcgagcgcggaccggtccccggacttccaggccgagtgcgtggcgggggcgctggcgcggctgggcgtggcgcggtgcgacgtggtcgggttcagctacgggggcatggtggcgttcaagctggccgaggcgcggccggggctggtgcggtcgctgtgcgtgtccgggtccgtggtggccatgacggacgcggtgaacagggagaccatggagcggctgggggccgggtcgtccgccgagctgctcatgcccgacacgctcaaggggctcaaggcgctcctctccgtctccatgtacaggaagatgtggttccccgacaggttctacaaggactacctcaaggtgatgttcaccaacaggaaggagaggatggagctgttgcaggggctgataaccagcaacacggacgccaagatccctacattccaacagaaaataatgctgctgtggggcgaggaggacaagatcttcgacatcgagctcgccaggaagatgaaagagcagctgggcgacaactgcttcctgtacggcatccgcaaggccggccacctgctccacgtcgagcggccgtgcgcctacaaccgccagctccagaggtggttcgcctacgtcaactccacagaagaccacgtccaggccagatgatcgacacgccccgccccgctcctgctgccgctgctgctgctgctacatggagatcatgcatgcatatatacacgtcccgtctcagttgatattacctttgcattgttgttgttcgttattgatgttgttattagctgttgctcccaagaaagaagacgctggcagggcagccaacacactgtatgtatgtagtgtgttgcgctggccatggtttcagtacgtgtactctcgatcaagtgtagaccgacctcggtcgtacgtgtcgcctc

SEQ ID NO: 40930 - protein, 367 aa, Zea mays subsp. mays
  peptide (1)..(367): Ceres Seq. ID no. 12419316
  misc_feature (138)..(352): Pfam Name: Pfam Description:  alpha/beta hydrolase fold
  misc_feature (40)..(361): NCBI GI NO: 19387256 NR Description: putative hydrolase
  misc_feature (40)..(365): NCBI GI NO: 15234460 NR Description: putative protein; protein id: At4g36610
  misc_feature (40)..(365): NCBI GI NO: 21593332 NR Description: putative hydrolase [Arabidopsis thaliana]
  misc_feature (40)..(359): NCBI GI NO: 18398716 NR Description: expressed protein; protein id: At2g18360
  misc_feature (40)..(359): NCBI GI NO: 25411863 NR Description: hypothetical protein At2g18360
  misc_feature (109)..(347): NCBI GI NO: 18394481 NR Description: expressed protein; protein id: At1g17430
  misc_feature (106)..(267): NCBI GI NO: 27436747 NR Description: Hypothetical protein
  misc_feature (265)..(348): NCBI GI NO: 27436747 NR Description: Hypothetical protein
  misc_feature (52)..(355): NCBI GI NO: 37533664 NR Description: putative hydrolase
  misc_feature (109)..(347): NCBI GI NO: 21592821 NR Description: unknown [Arabidopsis thaliana]
QRAAATRAGDQTKPARHRQGSGRSKRAADRSSFSLSSSKMVNFIEAQKPLLSRLMKMAGLRPIEMELEPGTTMHVWAPKHHVGKKGTTISPLEPTAAKKKKKNRKSPESRPNVVLIHGFAAEGNVTWQFNFGVLVSRYNLYIPDLMFFGKSSTSSADRSPDFQAECVAGALARLGVARCDVVGFSYGGMVAFKLAEARPGLVRSLCVSGSVVAMTDAVNRETMERLGAGSSAELLMPDTLKGLKALLSVSMYRKMWFPDRFYKDYLKVMFTNRKERMELLQGLITSNTDAKIPTFQQKIMLLWGEEDKIFDIELARKMKEQLGDNCFLYGIRKAGHLLHVERPCAYNRQLQRWFAYVNSTEDHVQAR

SEQ ID NO: 40931 - protein, 328 aa, Zea mays subsp. mays
  peptide (1)..(328): Ceres Seq. ID no. 12419317
  misc_feature (99)..(313): Pfam Name: Pfam Description:  alpha/beta hydrolase fold
  misc_feature (1)..(322): NCBI GI NO: 19387256 NR Description: putative hydrolase
  misc_feature (1)..(326): NCBI GI NO: 15234460 NR Description: putative protein; protein id: At4g36610
  misc_feature (1)..(326): NCBI GI NO: 21593332 NR Description: putative hydrolase [Arabidopsis thaliana]
  misc_feature (1)..(320): NCBI GI NO: 18398716 NR Description: expressed protein; protein id: At2g18360
  misc_feature (1)..(320): NCBI GI NO: 25411863 NR Description: hypothetical protein At2g18360
  misc_feature (70)..(308): NCBI GI NO: 18394481 NR Description: expressed protein; protein id: At1g17430
  misc_feature (67)..(228): NCBI GI NO: 27436747 NR Description: Hypothetical protein
  misc_feature (226)..(309): NCBI GI NO: 27436747 NR Description: Hypothetical protein
  misc_feature (13)..(316): NCBI GI NO: 37533664 NR Description: putative hydrolase
  misc_feature (70)..(308): NCBI GI NO: 21592821 NR Description: unknown [Arabidopsis thaliana]
MVNFIEAQKPLLSRLMKMAGLRPIEMELEPGTTMHVWAPKHHVGKKGTTISPLEPTAAKKKKKNRKSPESRPNVVLIHGFAAEGNVTWQFNFGVLVSRYNLYIPDLMFFGKSSTSSADRSPDFQAECVAGALARLGVARCDVVGFSYGGMVAFKLAEARPGLVRSLCVSGSVVAMTDAVNRETMERLGAGSSAELLMPDTLKGLKALLSVSMYRKMWFPDRFYKDYLKVMFTNRKERMELLQGLITSNTDAKIPTFQQKIMLLWGEEDKIFDIELARKMKEQLGDNCFLYGIRKAGHLLHVERPCAYNRQLQRWFAYVNSTEDHVQAR

SEQ ID NO: 40932 - protein, 313 aa, Zea mays subsp. mays
  peptide (1)..(313): Ceres Seq. ID no. 12419318
  misc_feature (84)..(298): Pfam Name: Pfam Description:  alpha/beta hydrolase fold
  misc_feature (1)..(307): NCBI GI NO: 19387256 NR Description: putative hydrolase
  misc_feature (1)..(311): NCBI GI NO: 15234460 NR Description: putative protein; protein id: At4g36610
  misc_feature (1)..(311): NCBI GI NO: 21593332 NR Description: putative hydrolase [Arabidopsis thaliana]
  misc_feature (1)..(305): NCBI GI NO: 18398716 NR Description: expressed protein; protein id: At2g18360
  misc_feature (1)..(305): NCBI GI NO: 25411863 NR Description: hypothetical protein At2g18360
  misc_feature (55)..(293): NCBI GI NO: 18394481 NR Description: expressed protein; protein id: At1g17430
  misc_feature (52)..(213): NCBI GI NO: 27436747 NR Description: Hypothetical protein
  misc_feature (211)..(294): NCBI GI NO: 27436747 NR Description: Hypothetical protein
  misc_feature (1)..(301): NCBI GI NO: 37533664 NR Description: putative hydrolase
  misc_feature (55)..(293): NCBI GI NO: 21592821 NR Description: unknown [Arabidopsis thaliana]
MKMAGLRPIEMELEPGTTMHVWAPKHHVGKKGTTISPLEPTAAKKKKKNRKSPESRPNVVLIHGFAAEGNVTWQFNFGVLVSRYNLYIPDLMFFGKSSTSSADRSPDFQAECVAGALARLGVARCDVVGFSYGGMVAFKLAEARPGLVRSLCVSGSVVAMTDAVNRETMERLGAGSSAELLMPDTLKGLKALLSVSMYRKMWFPDRFYKDYLKVMFTNRKERMELLQGLITSNTDAKIPTFQQKIMLLWGEEDKIFDIELARKMKEQLGDNCFLYGIRKAGHLLHVERPCAYNRQLQRWFAYVNSTEDHVQAR

SEQ ID NO: 40933 - DNA, 1201 bp, Zea mays subsp. mays
  misc_feature (1)..(1201): Ceres Seq. ID no. 12419311
gcacgagaccattacctagaacatcctaatctaaaaacaggatctcccactcgtctcgaagacggccgcaccgcagacgccgcgggaatttaacgagagagactggcgccgcgcctcgcggagaccgcagcctggagccagcccgtgacgctgacgcggcgggccacgggcggggcgatgccaggagccatggagccggcagaggcggacgcggcggcagccgctgttgcgggaaggcggccgacggcgtccgagcgccggcgcatgtaccgcgacctggcgctgtcgctgcggtgcggactccgcgacgcggcccgcggggttctcgttcctgcgcctgcgcggcctccgcgcgctcctccgcgcccctccgctccacctccgacgccgacgccgacgcccgacgcgggcctcttccgcgactcccagtccatccgagatctccaagtgatcccggtgctgttcgagcacagcctgcgcaaggcgaccggggacgcggtgctgacggtggcgcaggtgctgggcatggagcccgccgccgccaggctcaggaaccccgccacggactccgaggtcgtgcttgcgctcagggtgctcgaaggttgctgcctcctctgcccggcctgcgcagccgcggcgcaccgctacaatgccgtcaaggtggttttgaatatactgatgacacgtggtatcctcgagcaaagagcatgtctcgacactctcttagcgttgctggtgaattgttcaggaaacctgacggatttcaaagaacaagatggactaaataaaattgctgtcattgtaaaagatgcaaatagggatgaccatgtaaggttaaaatgttccgagtttctgcttctttactctggaaacgcaaaagaaaaatgtggcgcagattccgagtctaatatgcgagaagatttggcaaaggttttcggagaaaaatgtgcatcatttatctcctcaatgaacctattcagctcaactctagagtcacaaatgaggcaatctgagctaagctttcttgcagagcatgtgttggattacatgtagagccatactaaagataaccataatcgtgccattttctccacacacaacagagttcagtgctccaaaatgtatgtttcctattaacttgggtaattattgacgatgctactgtatatgaactcaactacgagaatgttactgttcacct

SEQ ID NO: 40934 - protein, 291 aa, Zea mays subsp. mays
  peptide (1)..(291): Ceres Seq. ID no. 12419312
  misc_feature (1)..(161): NCBI GI NO: 37536150 NR Description: hypothetical protein
  misc_feature (195)..(223): NCBI GI NO: 37536150 NR Description: hypothetical protein
  misc_feature (79)..(289): NCBI GI NO: 30687718 NR Description: expressed protein [Arabidopsis thaliana]
  misc_feature (2)..(45): NCBI GI NO: 30687718 NR Description: expressed protein [Arabidopsis thaliana]
  misc_feature (1)..(219): NCBI GI NO: 34898066 NR Description: ESTs AU030224
  misc_feature (79)..(220): NCBI GI NO: 7452470 NR Description: hypothetical protein T29A15
  misc_feature (2)..(45): NCBI GI NO: 7452470 NR Description: hypothetical protein T29A15
MPGAMEPAEADAAAAAVAGRRPTASERRRMYRDLALSLRCGLRDAARGVLVPAPARPPRAPPRPSAPPPTPTPTPDAGLFRDSQSIRDLQVIPVLFEHSLRKATGDAVLTVAQVLGMEPAAARLRNPATDSEVVLALRVLEGCCLLCPACAAAAHRYNAVKVVLNILMTRGILEQRACLDTLLALLVNCSGNLTDFKEQDGLNKIAVIVKDANRDDHVRLKCSEFLLLYSGNAKEKCGADSESNMREDLAKVFGEKCASFISSMNLFSSTLESQMRQSELSFLAEHVLDYM

SEQ ID NO: 40935 - protein, 287 aa, Zea mays subsp. mays
  peptide (1)..(287): Ceres Seq. ID no. 12419313
  misc_feature (1)..(157): NCBI GI NO: 37536150 NR Description: hypothetical protein
  misc_feature (191)..(219): NCBI GI NO: 37536150 NR Description: hypothetical protein
  misc_feature (75)..(285): NCBI GI NO: 30687718 NR Description: expressed protein [Arabidopsis thaliana]
  misc_feature (1)..(41): NCBI GI NO: 30687718 NR Description: expressed protein [Arabidopsis thaliana]
  misc_feature (1)..(215): NCBI GI NO: 34898066 NR Description: ESTs AU030224
  misc_feature (75)..(216): NCBI GI NO: 7452470 NR Description: hypothetical protein T29A15
  misc_feature (1)..(41): NCBI GI NO: 7452470 NR Description: hypothetical protein T29A15
MEPAEADAAAAAVAGRRPTASERRRMYRDLALSLRCGLRDAARGVLVPAPARPPRAPPRPSAPPPTPTPTPDAGLFRDSQSIRDLQVIPVLFEHSLRKATGDAVLTVAQVLGMEPAAARLRNPATDSEVVLALRVLEGCCLLCPACAAAAHRYNAVKVVLNILMTRGILEQRACLDTLLALLVNCSGNLTDFKEQDGLNKIAVIVKDANRDDHVRLKCSEFLLLYSGNAKEKCGADSESNMREDLAKVFGEKCASFISSMNLFSSTLESQMRQSELSFLAEHVLDYM

SEQ ID NO: 40936 - protein, 262 aa, Zea mays subsp. mays
  peptide (1)..(262): Ceres Seq. ID no. 12419314
  misc_feature (1)..(132): NCBI GI NO: 37536150 NR Description: hypothetical protein
  misc_feature (166)..(194): NCBI GI NO: 37536150 NR Description: hypothetical protein
  misc_feature (50)..(260): NCBI GI NO: 30687718 NR Description: expressed protein [Arabidopsis thaliana]
  misc_feature (1)..(16): NCBI GI NO: 30687718 NR Description: expressed protein [Arabidopsis thaliana]
  misc_feature (1)..(190): NCBI GI NO: 34898066 NR Description: ESTs AU030224
  misc_feature (50)..(191): NCBI GI NO: 7452470 NR Description: hypothetical protein T29A15
  misc_feature (1)..(16): NCBI GI NO: 7452470 NR Description: hypothetical protein T29A15
MYRDLALSLRCGLRDAARGVLVPAPARPPRAPPRPSAPPPTPTPTPDAGLFRDSQSIRDLQVIPVLFEHSLRKATGDAVLTVAQVLGMEPAAARLRNPATDSEVVLALRVLEGCCLLCPACAAAAHRYNAVKVVLNILMTRGILEQRACLDTLLALLVNCSGNLTDFKEQDGLNKIAVIVKDANRDDHVRLKCSEFLLLYSGNAKEKCGADSESNMREDLAKVFGEKCASFISSMNLFSSTLESQMRQSELSFLAEHVLDYM

SEQ ID NO: 40937 - DNA, 1859 bp, Zea mays subsp. mays
  misc_feature (1)..(1859): Ceres Seq. ID no. 12362446
gtaaaggaaggcgaggcaatacacccaccgagagagaagaactaagctttggacacggaagatcgcaagagcctcaaccacactattcaggtggcctaggactctacgagggacgttcgtcgtgcctcggatgagatgggcggcggaggaggaggaggaggcgggaagtccgagaaggcgcggcgttcgtcggcgcgggtgaggctgtgggtcgcgcgcgccagcaccgtgctgctctggacgtgcctcgtccagctcgcggcctaccgggagctctgggcgcccagcgtgctctccaggtggcctggctgcctcaaccagccgcacgtcgcgcggaggccatcggagcgtgtggcggacgccggccagacgcaggcagcgcgcgcgttggtggtgctcccacccaaaagaatctacaggaacaacggctatctaatggtctcctgcaacggcgggcttaaccagatgcgagcagcaatttgtgatatggtaaccatcgcaaggtatcttaacgttactctcatagtaccagagttggataaggcttcattttgggctgatcccagcgatttccaagacatatttgacgtggactacttcatagcgtcgctgagagacgaggtccggatcctgaggcagctgccgccgaggctcaagagaagagtggagatgggatccctccggtccctgccaccagtcagctggtccgacatcggctactaccgccgtcagattctgcctctggtaaagaagtacaaggtcgttcacctgaacaggacggatgcccggctcgcgaacaacggcctacccgtggagatgcagagactgcggtgtccgtcaactacaatgccctgaggtttacccctgaaatcgaggatctgggcagacgcctggttcgagctcttcgccggaacgggccctttgtggtccttcacttgcggtatgagatggacatgcttgccttctccggatgcacgcacggttgcagcagcatggaggctcaagagctcacgaagatgagatatgcctacccatggtggaaggagaaagtgatcgactcggacgccaagaggaaagacgggctgtgtccgttaacgccggaggagaccgcgctggtgctgcaggcgctcggcattgaccgcggctaccagatctacattgccgcaggcgaaatttacggtgggcagagaagaatggctgcgctcacctcggcttatcccaacgtggttagaaaggagacgctgttgccttgggaagtcggcctcttccagaaccactcctcccagatggctgcgctggactacatggtgtccctggagagcgatgtcttcatacccacctacgacggcaacatggccaaggtcgtagaaggccatcgcaggtacctggggtttaggaagacggtgctgctggaccggaggcgtatcgtcgagctcgtcgacgagtacaggaacgggacgttgagctggaccgacttctcgtctgccgtcatggcgtcgcacaccagccgcatgggcgaaccgtccaggaggcagacggttcctgacagacccaaggaagaggactacttctacgcgaacccgcacgagtgcctgcaccagccggaagatgtctcggccttgtgatactgatacagtggatgatgcgcgggctttcggaatccagaaccacatgtatatgttaatagcgcattcgacaccgttgcgttggcagaggattaaacgtaaacggacgaggagggcctcgtttggtccggccggttgaacgggcatgtgagttaggtttcggtacagattcatggaacggtggttcgccgattcttttttctgttcagaagaataagcagaccctttcgttgc

SEQ ID NO: 40938 - protein, 239 aa, Zea mays subsp. mays
  peptide (1)..(239): Ceres Seq. ID no. 12362447
  misc_feature (101)..(233): Pfam Name: Pfam Description:  Plant protein family
  misc_feature (8)..(233): NCBI GI NO: 15242375 NR Description: putative protein; protein id: At5g15740.1
  misc_feature (8)..(233): NCBI GI NO: 30678517 NR Description: auxin-independent growth promoter -related
  misc_feature (101)..(233): NCBI GI NO: 6041793 NR Description: putative auxin-independent growth promoter
  misc_feature (21)..(233): NCBI GI NO: 8778398 NR Description: F16A14.24 [Arabidopsis thaliana]
  misc_feature (76)..(233): NCBI GI NO: 19071634 NR Description: putative auxin independent growth-related protein
  misc_feature (88)..(233): NCBI GI NO: 27754419 NR Description: putative axi 1 protein [Arabidopsis thaliana]
  misc_feature (21)..(233): NCBI GI NO: 15223028 NR Description: putative growth regulator protein
  misc_feature (16)..(233): NCBI GI NO: 34902158 NR Description: Putative growth regulator protein
  misc_feature (88)..(233): NCBI GI NO: 15227586 NR Description: similar to axi 1 protein from Nicotiana tabacum
  misc_feature (95)..(233): NCBI GI NO: 15224418 NR Description: similar to axi 1 protein from Nicotiana tabacum
MGGGGGGGGGKSEKARRSSARVRLWVARASTVLLWTCLVQLAAYRELWAPSVLSRWPGCLNQPHVARRPSERVADAGQTQAARALVVLPPKRIYRNNGYLMVSCNGGLNQMRAAICDMVTIARYLNVTLIVPELDKASFWADPSDFQDIFDVDYFIASLRDEVRILRQLPPRLKRRVEMGSLRSLPPVSWSDIGYYRRQILPLVKKYKVVHLNRTDARLANNGLPVEMQRLRCPSTTMP

SEQ ID NO: 40939 - protein, 225 aa, Zea mays subsp. mays
  peptide (1)..(225): Ceres Seq. ID no. 12362448
  misc_feature (1)..(177): Pfam Name: Pfam Description:  Plant protein family
  misc_feature (1)..(216): NCBI GI NO: 15242375 NR Description: putative protein; protein id: At5g15740.1
  misc_feature (1)..(216): NCBI GI NO: 30678517 NR Description: auxin-independent growth promoter -related
  misc_feature (1)..(216): NCBI GI NO: 6041793 NR Description: putative auxin-independent growth promoter
  misc_feature (1)..(216): NCBI GI NO: 8778398 NR Description: F16A14.24 [Arabidopsis thaliana]
  misc_feature (1)..(216): NCBI GI NO: 19071634 NR Description: putative auxin independent growth-related protein
  misc_feature (1)..(216): NCBI GI NO: 27754419 NR Description: putative axi 1 protein [Arabidopsis thaliana]
  misc_feature (1)..(216): NCBI GI NO: 15223028 NR Description: putative growth regulator protein
  misc_feature (1)..(216): NCBI GI NO: 34902158 NR Description: Putative growth regulator protein
  misc_feature (1)..(216): NCBI GI NO: 15227586 NR Description: similar to axi 1 protein from Nicotiana tabacum
  misc_feature (1)..(222): NCBI GI NO: 15224418 NR Description: similar to axi 1 protein from Nicotiana tabacum
MDMLAFSGCTHGCSSMEAQELTKMRYAYPWWKEKVIDSDAKRKDGLCPLTPEETALVLQALGIDRGYQIYIAAGEIYGGQRRMAALTSAYPNVVRKETLLPWEVGLFQNHSSQMAALDYMVSLESDVFIPTYDGNMAKVVEGHRRYLGFRKTVLLDRRRIVELVDEYRNGTLSWTDFSSAVMASHTSRMGEPSRRQTVPDRPKEEDYFYANPHECLHQPEDVSAL

SEQ ID NO: 40940 - protein, 223 aa, Zea mays subsp. mays
  peptide (1)..(223): Ceres Seq. ID no. 12362449
  misc_feature (1)..(175): Pfam Name: Pfam Description:  Plant protein family
  misc_feature (1)..(214): NCBI GI NO: 15242375 NR Description: putative protein; protein id: At5g15740.1
  misc_feature (1)..(214): NCBI GI NO: 30678517 NR Description: auxin-independent growth promoter -related
  misc_feature (1)..(214): NCBI GI NO: 6041793 NR Description: putative auxin-independent growth promoter
  misc_feature (1)..(214): NCBI GI NO: 8778398 NR Description: F16A14.24 [Arabidopsis thaliana]
  misc_feature (1)..(214): NCBI GI NO: 19071634 NR Description: putative auxin independent growth-related protein
  misc_feature (1)..(214): NCBI GI NO: 27754419 NR Description: putative axi 1 protein [Arabidopsis thaliana]
  misc_feature (1)..(214): NCBI GI NO: 15223028 NR Description: putative growth regulator protein
  misc_feature (1)..(214): NCBI GI NO: 34902158 NR Description: Putative growth regulator protein
  misc_feature (1)..(214): NCBI GI NO: 15227586 NR Description: similar to axi 1 protein from Nicotiana tabacum
  misc_feature (1)..(220): NCBI GI NO: 15224418 NR Description: similar to axi 1 protein from Nicotiana tabacum
MLAFSGCTHGCSSMEAQELTKMRYAYPWWKEKVIDSDAKRKDGLCPLTPEETALVLQALGIDRGYQIYIAAGEIYGGQRRMAALTSAYPNVVRKETLLPWEVGLFQNHSSQMAALDYMVSLESDVFIPTYDGNMAKVVEGHRRYLGFRKTVLLDRRRIVELVDEYRNGTLSWTDFSSAVMASHTSRMGEPSRRQTVPDRPKEEDYFYANPHECLHQPEDVSAL

SEQ ID NO: 40941 - DNA, 990 bp, Zea mays subsp. mays
  misc_feature (1)..(990): Ceres Seq. ID no. 12419778
gcacgagaccattacctagaacatcctaatcgaaaaaaaccatcacaagctctagttttccagctctgcagcacacaagctagttaagctcctgcaacctccaagaaactaggcaatcgtttcctcctctgcttcagtatctccccttccagcagtagctaagctgccatatggcgacaagcaggcttgcgctcgtgtccgtgtttgccgcagccgtcctgctgggcatggcgtcggcggcgacctacaacgtcggcgagccgggcgggtcctgggacctgcgtaccaactacggcacctgggtctcctccaagaggttccacccgggtgaccagatcgtgttcaagtactcgccccaggcgcacgacgtggtggaggtgaacaaggcggactacgactcctgctcaatcgccagccccgtcgccacccacaactccggcaacgacgccatcgccctggcctcccccggcacccgctacttcatctgcggcttccctggccactgcgacgcgggcatgaagatccagatcaacgtcgtgcccagcgccaactccctcggccccgccagcgctcccgccgccaactctcccgtctctcccccgcccatgtccgcgccctcttccgccgctaccaaggccaccggtttcggcgcccttgccgccgtcatgatcgccgcaggcctcatggcttactagatactctgtcgcttgctgcgtacatttagttttccttagatattatatatacgttgtattgtattcttttgagagatcagagttcagacgaatgacatggcatacatgtatctacgtaaagacagatgactagtttatacattattcatattgtatatcattcaggtttcgctcttcggtgtatgtatcgatattcattcagatagatagagatagagatgactagtaatttcctggtgtagttttctctttgttgttccgattatagatatgaatgtaatgaatgattagtatt

SEQ ID NO: 40942 - protein, 174 aa, Zea mays subsp. mays
  peptide (1)..(174): Ceres Seq. ID no. 12419779
  misc_feature (35)..(112): Pfam Name: Pfam Description:  Plastocyanin-like domain
  misc_feature (7)..(174): NCBI GI NO: 38636760 NR Description: putative blue copper binding protein
  misc_feature (1)..(173): NCBI GI NO: 4104058 NR Description: blue copper-binding protein homolog
  misc_feature (4)..(174): NCBI GI NO: 38636761 NR Description: putative blue copper binding protein
  misc_feature (1)..(173): NCBI GI NO: 37651973 NR Description: blue copper binding protein
  misc_feature (2)..(169): NCBI GI NO: 38636763 NR Description: putative blue copper binding protein
  misc_feature (1)..(174): NCBI GI NO: 38636764 NR Description: putative blue copper binding protein
  misc_feature (1)..(169): NCBI GI NO: 38636838 NR Description: putative blue copper binding protein
  misc_feature (6)..(172): NCBI GI NO: 38636767 NR Description: putative blue copper binding protein
  misc_feature (7)..(169): NCBI GI NO: 34915492 NR Description: contains ESTsD24614
  misc_feature (3)..(152): NCBI GI NO: 15224605 NR Description: putative blue copper-binding protein
MATSRLALVSVFAAAVLLGMASAATYNVGEPGGSWDLRTNYGTWVSSKRFHPGDQIVFKYSPQAHDVVEVNKADYDSCSIASPVATHNSGNDAIALASPGTRYFICGFPGHCDAGMKIQINVVPSANSLGPASAPAANSPVSPPPMSAPSSAATKATGFGALAAVMIAAGLMAY

SEQ ID NO: 40943 - protein, 155 aa, Zea mays subsp. mays
  peptide (1)..(155): Ceres Seq. ID no. 12419780
  misc_feature (16)..(93): Pfam Name: Pfam Description:  Plastocyanin-like domain
  misc_feature (1)..(155): NCBI GI NO: 38636760 NR Description: putative blue copper binding protein
  misc_feature (1)..(154): NCBI GI NO: 4104058 NR Description: blue copper-binding protein homolog
  misc_feature (1)..(155): NCBI GI NO: 38636761 NR Description: putative blue copper binding protein
  misc_feature (1)..(154): NCBI GI NO: 37651973 NR Description: blue copper binding protein
  misc_feature (1)..(150): NCBI GI NO: 38636763 NR Description: putative blue copper binding protein
  misc_feature (1)..(155): NCBI GI NO: 38636764 NR Description: putative blue copper binding protein
  misc_feature (1)..(150): NCBI GI NO: 38636838 NR Description: putative blue copper binding protein
  misc_feature (1)..(153): NCBI GI NO: 38636767 NR Description: putative blue copper binding protein
  misc_feature (1)..(150): NCBI GI NO: 34915492 NR Description: contains ESTsD24614
  misc_feature (1)..(133): NCBI GI NO: 15224605 NR Description: putative blue copper-binding protein
MASAATYNVGEPGGSWDLRTNYGTWVSSKRFHPGDQIVFKYSPQAHDVVEVNKADYDSCSIASPVATHNSGNDAIALASPGTRYFICGFPGHCDAGMKIQINVVPSANSLGPASAPAANSPVSPPPMSAPSSAATKATGFGALAAVMIAAGLMAY

SEQ ID NO: 40944 - DNA, 1732 bp, Zea mays subsp. mays
  misc_feature (1)..(1732): Ceres Seq. ID no. 12375791
aaataatagaggcagaggcagagccaagacggttccgttcagtggctggcggcgcatagatagatagccatggcgaagaagctagtggaggaagcgctcctcgcagcggcggacgagcactaggaggagaacctgagcgtgcgcgaggagctgaagaagcagctatggctggctgggcccatgatcgccggcgcgctcctgcagaacgtgatccagatgatctccgtcatgtacgtgggacaccttggagagcccccctcgctggctcatccatggccaactccttcgccaccgtcaccggcctcagcctgctgctaggcatggcaagcgctctagacacactgtgcggccaagcgttcggcgcgaggcagtactatctcctgggcatctacaagcagcgcgccatgttcctgctgaccctggtgagcgtccctctgtccgtggtgtggttctacaccggcgagatcctcctcctgttcggccaggacccggacatcgccgcagaggccggcacctacgcccggtggatgatcccgctgctgttcgcgtacggcctgctgcagtgccacgtccggttcctccagacgcagaacatcgtggtgcccgtgatggcgagcgccggcgccgccgcggcctgccacgtcgtcgtctgctgggcgctggtgtacgcgctcgggatgggcagcaagggcgcggcgctcagcaacgccatctcctactgggtcaacgtggccgtgctgtccgtgtacgtgagggtgtccagcgcctgcaaggagacgtggacgggcttctccacggaggccttccgcgacgcgctcggcttcttcaggcttgcggtcccgtccgctctcatggtctgcttggagatgtggtcgtttgaactcattgtgctcctctcgggccttcttcccaacccaaaactggagacctccgtgctgtcgatcagccttaacactgctgcgttcgtgtggatgatcccctttgggcttagctcagctatcagcactcgcgtgtcgaatgagctgggtgccgggcgtcctcgagccgcccgccttgcggtgcgtgtcgttgtgttgctgtctgtcgccgaagggctaggcgtgggcctcatcctggtgtgcgtgcgctacgtctggggccatgcctacagcaacgtcgaggaggtggtgacgtacgtggccaacatgatgctggtcattgcagtgtccaacttcttcgatggtatccagtgcgtgctttcaggtgtggctagaggctgcggatggcagaagatcggtgcctgcatcaaccttggcgcctactacatcgtcggcatcccctctgcttacctcatagcgttcgtcctgcgtgtcggtgggacgggactctggttgggcatcatatgtgggctcatcgtacagctccttctgctcgcgatcatcactctctgcaccaactgggatagcgaggcaacgaaggcaaagaacagagtgttcaattcttcctctccagcatccggaacgtgaacgcattggcggtgaagtaaacggcgagcaaacacggaaactataggagttatgcctgtagttttggaaacttcagcacctctgatcctctctgattttctggctcccacattaactctaatggttagcattgacacttgcagtctggattttgaaacataaatgcgttccttgaacagagtagaggaagggaccaatggaaaacttatacaatagcgttagatcgc

SEQ ID NO: 40945 - protein, 446 aa, Zea mays subsp. mays
  peptide (1)..(446): Ceres Seq. ID no. 12375792
  misc_feature (32)..(446): NCBI GI NO: 38346676 NR Description: OSJNBa0069D17.7
  misc_feature (32)..(436): NCBI GI NO: 22138480 NR Description: hypothetical protein
  misc_feature (31)..(441): NCBI GI NO: 15237158 NR Description: MATE efflux family protein, putative
  misc_feature (31)..(444): NCBI GI NO: 37533146 NR Description: putative integral membrane protein
  misc_feature (31)..(444): NCBI GI NO: 37533148 NR Description: putative transmembrane protein
  misc_feature (32)..(446): NCBI GI NO: 37533130 NR Description: putative integral membrane protein
  misc_feature (31)..(445): NCBI GI NO: 15219524 NR Description: putative integral membrane protein
  misc_feature (31)..(445): NCBI GI NO: 21537267 NR Description: putative integral membrane protein
  misc_feature (31)..(428): NCBI GI NO: 15226290 NR Description: hypothetical protein; protein id: At2g34360.1
  misc_feature (32)..(439): NCBI GI NO: 16797803 NR Description: hypothetical membrane protein-1
MAGWAHDRRRAPAERDPDDLRHVRGTPWRAPLAGSSMANSFATVTGLSLLLGMASALDTLCGQAFGARQYYLLGIYKQRAMFLLTLVSVPLSVVWFYTGEILLLFGQDPDIAAEAGTYARWMIPLLFAYGLLQCHVRFLQTQNIVVPVMASAGAAAACHVVVCWALVYALGMGSKGAALSNAISYWVNVAVLSVYVRVSSACKETWTGFSTEAFRDALGFFRLAVPSALMVCLEMWSFELIVLLSGLLPNPKLETSVLSISLNTAAFVWMIPFGLSSAISTRVSNELGAGRPRAARLAVRVVVLLSVAEGLGVGLILVCVRYVWGHAYSNVEEVVTYVANMMLVIAVSNFFDGIQCVLSGVARGCGWQKIGACINLGAYYIVGIPSAYLIAFVLRVGGTGLWLGIICGLIVQLLLLAIITLCTNWDSEATKAKNRVFNSSSPASGT

SEQ ID NO: 40946 - protein, 410 aa, Zea mays subsp. mays
  peptide (1)..(410): Ceres Seq. ID no. 12375793
  misc_feature (1)..(410): NCBI GI NO: 38346676 NR Description: OSJNBa0069D17.7
  misc_feature (1)..(400): NCBI GI NO: 22138480 NR Description: hypothetical protein
  misc_feature (1)..(405): NCBI GI NO: 15237158 NR Description: MATE efflux family protein, putative
  misc_feature (1)..(408): NCBI GI NO: 37533146 NR Description: putative integral membrane protein
  misc_feature (1)..(408): NCBI GI NO: 37533148 NR Description: putative transmembrane protein
  misc_feature (1)..(410): NCBI GI NO: 37533130 NR Description: putative integral membrane protein
  misc_feature (1)..(409): NCBI GI NO: 15219524 NR Description: putative integral membrane protein
  misc_feature (1)..(409): NCBI GI NO: 21537267 NR Description: putative integral membrane protein
  misc_feature (1)..(392): NCBI GI NO: 15226290 NR Description: hypothetical protein; protein id: At2g34360.1
  misc_feature (1)..(403): NCBI GI NO: 16797803 NR Description: hypothetical membrane protein-1
MANSFATVTGLSLLLGMASALDTLCGQAFGARQYYLLGIYKQRAMFLLTLVSVPLSVVWFYTGEILLLFGQDPDIAAEAGTYARWMIPLLFAYGLLQCHVRFLQTQNIVVPVMASAGAAAACHVVVCWALVYALGMGSKGAALSNAISYWVNVAVLSVYVRVSSACKETWTGFSTEAFRDALGFFRLAVPSALMVCLEMWSFELIVLLSGLLPNPKLETSVLSISLNTAAFVWMIPFGLSSAISTRVSNELGAGRPRAARLAVRVVVLLSVAEGLGVGLILVCVRYVWGHAYSNVEEVVTYVANMMLVIAVSNFFDGIQCVLSGVARGCGWQKIGACINLGAYYIVGIPSAYLIAFVLRVGGTGLWLGIICGLIVQLLLLAIITLCTNWDSEATKAKNRVFNSSSPASGT

SEQ ID NO: 40947 - protein, 394 aa, Zea mays subsp. mays
  peptide (1)..(394): Ceres Seq. ID no. 12375794
  misc_feature (1)..(394): NCBI GI NO: 38346676 NR Description: OSJNBa0069D17.7
  misc_feature (1)..(384): NCBI GI NO: 22138480 NR Description: hypothetical protein
  misc_feature (1)..(389): NCBI GI NO: 15237158 NR Description: MATE efflux family protein, putative
  misc_feature (1)..(392): NCBI GI NO: 37533146 NR Description: putative integral membrane protein
  misc_feature (1)..(392): NCBI GI NO: 37533148 NR Description: putative transmembrane protein
  misc_feature (1)..(394): NCBI GI NO: 37533130 NR Description: putative integral membrane protein
  misc_feature (1)..(393): NCBI GI NO: 15219524 NR Description: putative integral membrane protein
  misc_feature (1)..(393): NCBI GI NO: 21537267 NR Description: putative integral membrane protein
  misc_feature (1)..(376): NCBI GI NO: 15226290 NR Description: hypothetical protein; protein id: At2g34360.1
  misc_feature (1)..(387): NCBI GI NO: 16797803 NR Description: hypothetical membrane protein-1
MASALDTLCGQAFGARQYYLLGIYKQRAMFLLTLVSVPLSVVWFYTGEILLLFGQDPDIAAEAGTYARWMIPLLFAYGLLQCHVRFLQTQNIVVPVMASAGAAAACHVVVCWALVYALGMGSKGAALSNAISYWVNVAVLSVYVRVSSACKETWTGFSTEAFRDALGFFRLAVPSALMVCLEMWSFELIVLLSGLLPNPKLETSVLSISLNTAAFVWMIPFGLSSAISTRVSNELGAGRPRAARLAVRVVVLLSVAEGLGVGLILVCVRYVWGHAYSNVEEVVTYVANMMLVIAVSNFFDGIQCVLSGVARGCGWQKIGACINLGAYYIVGIPSAYLIAFVLRVGGTGLWLGIICGLIVQLLLLAIITLCTNWDSEATKAKNRVFNSSSPASGT

SEQ ID NO: 40948 - DNA, 1742 bp, Zea mays subsp. mays
  misc_feature (1)..(1742): Ceres Seq. ID no. 12595019
ctagaacatcctaatcgaaaagcaatgggaagcaaatggccaaccaatagcaaaaaggcagccgtgtatcgatcgccttatccgggtcctgtggcactggcacaccgcgcgtccggatttggctgagtagctgactagctgagcgagcaatccatcccttcgcccgccgcaccatggaagccctcgcctcggcgcctcgggcgctcttcccgcgcgcgtgcccagtggcgacgccggccggcccagcccggcgccgctccgccgctcctcacatctgcagggcctccgcggcggccggggaggagacgacgccgccgccgccgccggcggccgctcccaagaagatcctcaagaagaagcccgtctactcgatgaagaaagggcagattgtgcgcgtggacaaggagaagtacctgaacagcatcaattatctgtcagtgggacacccgcccttctacaaggggctggactacatataccaagaccgcggcgaggtcttggatatcaggaacttcgaaacaggagaatacgccctgatcgcttgggtggggatcccgacgccaccggcatggctaccaacctacatgctcattaagtcggacaagctcgactacgagaggatatatggccggccggcggcctcgcagggcaccgtagcgccgccgccgaattcatgcttcatttcgcatcaggagtcggccaagcaggacacacctcttgttgttgacttgttgtaggtatatacgtacatgccagtattgccagaacagtcgacagaggcaatctgagacctcagctgctggaataatcaggaagtagatcgagagcgacgtacgatgacgagattcataattgctgctgcacatcacctgaggccggggctgaagcacggcatgttctcccgagaggaagaggagaccgtcatgagcctccacgccaagctcggcaacaagtggtcccagatcgcacggcatctgccgggacggacggacaacgaggtgaagaactactggaactcctacctcaagaagcgtgtcgagggcggcgcgcaggcgaagggctcggcggacccggcgacacccgcccgctccgacgacgtgcacgggagcccggaccccagcgagaacggccagaggtccgtcagccggccggcgaactctggctcgtccgagccggcgggggagtcgtcctcggcggacgactctagctgcctcaccgtcaccgagcctgcgcccgcggtgcggaccgcacgcgcccgtgctccccaaggtcatgttcgcggactggctggacatggactacggaaccagcctgctggcgctgggtccggacgccggtttcttcgacgtggccggccgcagcccgggccagggcctgagccaccaggggtctgcgcaggttgacgggccgtgcggcgtcgtggattccctgcacggcctcggcgtcggcgtcggcgtcggcggcatgtgctgggagttcgacggcgcggcggcggagcagctggacgtgcagggaggagagttctgcgatttgctctccatgagcgagttcctcgggatcaactaggcgtcgggccgttctcttcttcccaacgattcatcttgaagcatccttgtcaaatctgtttcttccgtaggcgagagtgtaaaaaactgtgtgttataccaatgtgcagttactaaagtgtatagtatatgcagaggagctgagtaaagatgtgtgaggattgtcctttccggtcc

SEQ ID NO: 40949 - protein, 188 aa, Zea mays subsp. mays
  peptide (1)..(188): Ceres Seq. ID no. 12595020
  misc_feature (19)..(63): Pfam Name: Pfam Description:  Myb-like DNA-binding domain
  misc_feature (10)..(143): NCBI GI NO: 32489825 NR Description: OSJNBb0039L24.8
  misc_feature (10)..(122): NCBI GI NO: 7438354 NR Description: myb-related protein YUP8H12R
  misc_feature (10)..(122): NCBI GI NO: 15219313 NR Description: myb family transcription factor
  misc_feature (1)..(130): NCBI GI NO: 15235149 NR Description: myb family transcription factor
  misc_feature (1)..(130): NCBI GI NO: 25387539 NR Description: myb-like protein [imported] - Arabidopsis thaliana
  misc_feature (10)..(130): NCBI GI NO: 11358530 NR Description: myb-related transcription factor MYB18
  misc_feature (10)..(85): NCBI GI NO: 15242947 NR Description: myb family transcription factor
  misc_feature (10)..(85): NCBI GI NO: 11358531 NR Description: myb-related transcription factor MYB19
  misc_feature (10)..(114): NCBI GI NO: 19072740 NR Description: typical P-type R2R3 Myb protein [Zea mays]
  misc_feature (19)..(122): NCBI GI NO: 11358551 NR Description: myb-related transcription factor MYB63
MTRFIIAAAHHLRPGLKHGMFSREEEETVMSLHAKLGNKWSQIARHLPGRTDNEVKNYWNSYLKKRVEGGAQAKGSADPATPARSDDVHGSPDPSENGQRSVSRPANSGSSEPAGESSSADDSSCLTVTEPAPAVRTARARAPQGHVRGLAGHGLRNQPAGAGSGRRFLRRGRPQPGPGPEPPGVCAG

SEQ ID NO: 40950 - protein, 187 aa, Zea mays subsp. mays
  peptide (1)..(187): Ceres Seq. ID no. 12595021
  misc_feature (42)..(150): NCBI GI NO: 18410719 NR Description: expressed protein; protein id: At1g74880
  misc_feature (1)..(133): NCBI GI NO: 34905786 NR Description: P0401G10.19
MEALASAPRALFPRACPVATPAGPARRRSAAPHICRASAAAGEETTPPPPPAAAPKKILKKKPVYSMKKGQIVRVDKEKYLNSINYLSVGHPPFYKGLDYIYQDRGEVLDIRNFETGEYALIAWVGIPTPPAWLPTYMLIKSDKLDYERIYGRPAASQGTVAPPPNSCFISHQESAKQDTPLVVDLL

SEQ ID NO: 40951 - protein, 169 aa, Zea mays subsp. mays
  peptide (1)..(169): Ceres Seq. ID no. 12595022
  misc_feature (1)..(44): Pfam Name: Pfam Description:  Myb-like DNA-binding domain
  misc_feature (1)..(124): NCBI GI NO: 32489825 NR Description: OSJNBb0039L24.8
  misc_feature (1)..(103): NCBI GI NO: 7438354 NR Description: myb-related protein YUP8H12R
  misc_feature (1)..(103): NCBI GI NO: 15219313 NR Description: myb family transcription factor
  misc_feature (1)..(111): NCBI GI NO: 15235149 NR Description: myb family transcription factor
  misc_feature (1)..(111): NCBI GI NO: 25387539 NR Description: myb-like protein [imported] - Arabidopsis thaliana
  misc_feature (1)..(111): NCBI GI NO: 11358530 NR Description: myb-related transcription factor MYB18
  misc_feature (1)..(66): NCBI GI NO: 15242947 NR Description: myb family transcription factor
  misc_feature (1)..(66): NCBI GI NO: 11358531 NR Description: myb-related transcription factor MYB19
  misc_feature (1)..(95): NCBI GI NO: 19072740 NR Description: typical P-type R2R3 Myb protein [Zea mays]
  misc_feature (1)..(103): NCBI GI NO: 11358551 NR Description: myb-related transcription factor MYB63
MFSREEEETVMSLHAKLGNKWSQIARHLPGRTDNEVKNYWNSYLKKRVEGGAQAKGSADPATPARSDDVHGSPDPSENGQRSVSRPANSGSSEPAGESSSADDSSCLTVTEPAPAVRTARARAPQGHVRGLAGHGLRNQPAGAGSGRRFLRRGRPQPGPGPEPPGVCAG

SEQ ID NO: 40952 - DNA, 890 bp, Zea mays subsp. mays
  misc_feature (1)..(890): Ceres Seq. ID no. 13499377
tagaacatcctaatcaaaagaccaaccagccaaaacacgcccgcgcgcctgtttgttcggccggaggacgccatggccatggaggagggatcaggagcggtggagaaagggccggccgtgggcacggtggctgacgcctccgccagcgtcatcggcgaaggcgccgtgaaggaggaggccgggggcagacggcagccgtcggccggctacgcggccgtcgtgattggcggcaccttcgaccgcctacaccagggccaccatctcttcctgaaggcggcagcggagctggcgagggagaggatcgtggtcggcgtctgcgacggcccgatgctcgccaagaaacagtacgccgacctgatacaaccgatcgagaagcggatgcagaacgccaaggattatattaagtccataaagcccgaccttgatgttcatgtggagcccatcgtcgaccctttcggcccatccatcgttgacccaggccttgaggccatcattgtcagcaaggagacgttgccgggagggcacgctgtcaacaggaagagagcagagagagggctcactcagctgcagatcgaggtgatagagctggtgccagaggagtcgacgggggacaagataagttccacggcattcagaaagatggaagccgagagggcgctgcagcaacagaataaacaagaagatacagcagtaggcactccggttggggtgcaaaacatagcggttcagtcacatggagcatagtacatgaaccgaagttctgttgcctgtacctttttttaaaaaagtacatgaaactttgaggtctctacttccatcacatacaaagggacaatgcttctttgcccaaacatggactgatcatcaatacagaaaagttccagtttctt

SEQ ID NO: 40953 - protein, 223 aa, Zea mays subsp. mays
  peptide (1)..(223): Ceres Seq. ID no. 13499378
  misc_feature (39)..(206): NCBI GI NO: 15224138 NR Description: cytidylyltransferase domain-containing protein
  misc_feature (46)..(199): NCBI GI NO: 34393473 NR Description: bifunctional phosphopantetheine adenylyltransferase dephospho CoA kinase-like
  misc_feature (35)..(200): NCBI GI NO: 39589394 NR Description: Hypothetical protein CBG22156
  misc_feature (26)..(197): NCBI GI NO: 25143409 NR Description: Cytidylyltransferase and Dephospho-CoA kinase (51
  misc_feature (36)..(217): NCBI GI NO: 20465246 NR Description: bifunctional phosphopantetheine adenylyltransferase / dephospho CoA kinase
  misc_feature (40)..(217): NCBI GI NO: 27229125 NR Description: CoA synthase
  misc_feature (40)..(217): NCBI GI NO: 40555799 NR Description: 1300003G02Rik protein [Mus musculus]
  misc_feature (36)..(189): NCBI GI NO: 17981025 NR Description: phosphopantetheine adenylyltransferase / dephosphocoenzyme A kinase
  misc_feature (36)..(189): NCBI GI NO: 22095395 NR Description: nucleotide binding protein
  misc_feature (40)..(217): NCBI GI NO: 34873748 NR Description: similar to CoA synthase [Rattus norvegicus]
MAMEEGSGAVEKGPAVGTVADASASVIGEGAVKEEAGGRRQPSAGYAAVVIGGTFDRLHQGHHLFLKAAAELARERIVVGVCDGPMLAKKQYADLIQPIEKRMQNAKDYIKSIKPDLDVHVEPIVDPFGPSIVDPGLEAIIVSKETLPGGHAVNRKRAERGLTQLQIEVIELVPEESTGDKISSTAFRKMEAERALQQQNKQEDTAVGTPVGVQNIAVQSHGA

SEQ ID NO: 40954 - protein, 221 aa, Zea mays subsp. mays
  peptide (1)..(221): Ceres Seq. ID no. 13499379
  misc_feature (37)..(204): NCBI GI NO: 15224138 NR Description: cytidylyltransferase domain-containing protein
  misc_feature (44)..(197): NCBI GI NO: 34393473 NR Description: bifunctional phosphopantetheine adenylyltransferase dephospho CoA kinase-like
  misc_feature (33)..(198): NCBI GI NO: 39589394 NR Description: Hypothetical protein CBG22156
  misc_feature (24)..(195): NCBI GI NO: 25143409 NR Description: Cytidylyltransferase and Dephospho-CoA kinase (51
  misc_feature (34)..(215): NCBI GI NO: 20465246 NR Description: bifunctional phosphopantetheine adenylyltransferase / dephospho CoA kinase
  misc_feature (38)..(215): NCBI GI NO: 27229125 NR Description: CoA synthase
  misc_feature (38)..(215): NCBI GI NO: 40555799 NR Description: 1300003G02Rik protein [Mus musculus]
  misc_feature (34)..(187): NCBI GI NO: 17981025 NR Description: phosphopantetheine adenylyltransferase / dephosphocoenzyme A kinase
  misc_feature (34)..(187): NCBI GI NO: 22095395 NR Description: nucleotide binding protein
  misc_feature (38)..(215): NCBI GI NO: 34873748 NR Description: similar to CoA synthase [Rattus norvegicus]
MEEGSGAVEKGPAVGTVADASASVIGEGAVKEEAGGRRQPSAGYAAVVIGGTFDRLHQGHHLFLKAAAELARERIVVGVCDGPMLAKKQYADLIQPIEKRMQNAKDYIKSIKPDLDVHVEPIVDPFGPSIVDPGLEAIIVSKETLPGGHAVNRKRAERGLTQLQIEVIELVPEESTGDKISSTAFRKMEAERALQQQNKQEDTAVGTPVGVQNIAVQSHGA

SEQ ID NO: 40955 - protein, 138 aa, Zea mays subsp. mays
  peptide (1)..(138): Ceres Seq. ID no. 13499380
  misc_feature (1)..(121): NCBI GI NO: 15224138 NR Description: cytidylyltransferase domain-containing protein
  misc_feature (1)..(114): NCBI GI NO: 34393473 NR Description: bifunctional phosphopantetheine adenylyltransferase dephospho CoA kinase-like
  misc_feature (1)..(115): NCBI GI NO: 39589394 NR Description: Hypothetical protein CBG22156
  misc_feature (1)..(112): NCBI GI NO: 25143409 NR Description: Cytidylyltransferase and Dephospho-CoA kinase (51
  misc_feature (1)..(132): NCBI GI NO: 20465246 NR Description: bifunctional phosphopantetheine adenylyltransferase / dephospho CoA kinase
  misc_feature (1)..(132): NCBI GI NO: 27229125 NR Description: CoA synthase
  misc_feature (1)..(132): NCBI GI NO: 40555799 NR Description: 1300003G02Rik protein [Mus musculus]
  misc_feature (1)..(104): NCBI GI NO: 17981025 NR Description: phosphopantetheine adenylyltransferase / dephosphocoenzyme A kinase
  misc_feature (1)..(104): NCBI GI NO: 22095395 NR Description: nucleotide binding protein
  misc_feature (1)..(132): NCBI GI NO: 34873748 NR Description: similar to CoA synthase [Rattus norvegicus]
MLAKKQYADLIQPIEKRMQNAKDYIKSIKPDLDVHVEPIVDPFGPSIVDPGLEAIIVSKETLPGGHAVNRKRAERGLTQLQIEVIELVPEESTGDKISSTAFRKMEAERALQQQNKQEDTAVGTPVGVQNIAVQSHGA

SEQ ID NO: 40956 - DNA, 434 bp, Zea mays subsp. mays
  misc_feature (1)..(434): Ceres Seq. ID no. 1852863
aaaaatgtgtaccttcagtactcaaatagacaggagattgtcaacaacaaggcaactggggaaggttcaggcaacgttttgcttgtgggaatggagggtgttgcaccagattctgtcagcattgatgttctacacgtggtattttctgctttcggatttgttcataagatcgctacctttgagaaagcatctggttatcaggctttgattcagttttctgatgctgaaactgcaacatctgcaaaagctgcactggatggtagatgcattcctagctatttgctaccagaactggatgtggcctgcactttgagaataacctattcagcacacagtgttctcaacgtcaagtatcagagccacaggagtagggacttcactaatccttaccttccttttctggactctgcyaaagatggctctggaccggatgg

SEQ ID NO: 40957 - protein, 144 aa, Zea mays subsp. mays
  peptide (1)..(144): Ceres Seq. ID no. 1852864
  misc_feature (39)..(90): Pfam Name: a.k.a. RRM, RBD, or RNP domain Pfam Description: RNA recognition motif.
  misc_feature (1)..(143): NCBI GI NO: 18921326 NR Description: putative polypyrimidine tract-binding protein
  misc_feature (1)..(142): NCBI GI NO: 15238677 NR Description: polypyrimidine tract-binding protein
  misc_feature (1)..(141): NCBI GI NO: 11358627 NR Description: polypyrimidine tract-binding protein homolog
  misc_feature (1)..(141): NCBI GI NO: 15232047 NR Description: polypyrimidine tract-binding protein
  misc_feature (1)..(101): NCBI GI NO: 34912728 NR Description: putative polypyrimidine tract-binding protein
  misc_feature (124)..(143): NCBI GI NO: 34912728 NR Description: putative polypyrimidine tract-binding protein
  misc_feature (43)..(141): NCBI GI NO: 20260638 NR Description: putative polypyrimidine tract-binding protein
  misc_feature (21)..(129): NCBI GI NO: 18921326 NR Description: putative polypyrimidine tract-binding protein
  misc_feature (21)..(132): NCBI GI NO: 15238677 NR Description: polypyrimidine tract-binding protein
  misc_feature (1)..(132): NCBI GI NO: 22329999 NR Description: heterogeneous nuclear ribonucleoprotein
  misc_feature (137)..(137): Xaa is any aa, unknown or other
KNVYLQYSNRQEIVNNKATGEGSGNVLLVGMEGVAPDSVSIDVLHVVFSAFGFVHKIATFEKASGYQALIQFSDAETATSAKAALDGRCIPSYLLPELDVACTLRITYSAHSVLNVKYQSHRSRDFTNPYLPFLDSXKDGSGPD

SEQ ID NO: 40958 - protein, 114 aa, Zea mays subsp. mays
  peptide (1)..(114): Ceres Seq. ID no. 1852865
  misc_feature (9)..(60): Pfam Name: a.k.a. RRM, RBD, or RNP domain Pfam Description: RNA recognition motif.
  misc_feature (1)..(113): NCBI GI NO: 18921326 NR Description: putative polypyrimidine tract-binding protein
  misc_feature (1)..(112): NCBI GI NO: 15238677 NR Description: polypyrimidine tract-binding protein
  misc_feature (1)..(111): NCBI GI NO: 11358627 NR Description: polypyrimidine tract-binding protein homolog
  misc_feature (1)..(111): NCBI GI NO: 15232047 NR Description: polypyrimidine tract-binding protein
  misc_feature (1)..(71): NCBI GI NO: 34912728 NR Description: putative polypyrimidine tract-binding protein
  misc_feature (94)..(113): NCBI GI NO: 34912728 NR Description: putative polypyrimidine tract-binding protein
  misc_feature (13)..(111): NCBI GI NO: 20260638 NR Description: putative polypyrimidine tract-binding protein
  misc_feature (1)..(99): NCBI GI NO: 18921326 NR Description: putative polypyrimidine tract-binding protein
  misc_feature (1)..(102): NCBI GI NO: 15238677 NR Description: polypyrimidine tract-binding protein
  misc_feature (1)..(102): NCBI GI NO: 22329999 NR Description: heterogeneous nuclear ribonucleoprotein
  misc_feature (107)..(107): Xaa is any aa, unknown or other
MEGVAPDSVSIDVLHVVFSAFGFVHKIATFEKASGYQALIQFSDAETATSAKAALDGRCIPSYLLPELDVACTLRITYSAHSVLNVKYQSHRSRDFTNPYLPFLDSXKDGSGPD

SEQ ID NO: 40959 - DNA, 1838 bp, Zea mays subsp. mays; identical to SEQ ID NO: 30551
  misc_feature (1)..(1838): Ceres Seq. ID no. 12372855

SEQ ID NO: 40960 - protein, 551 aa, Zea mays subsp. mays; identical to SEQ ID NO: 30552
  peptide (1)..(551): Ceres Seq. ID no. 12372856
  misc_feature (281)..(526): Pfam Name: Pfam Description:  Shikimate / quinate 5-dehydrogenase
  misc_feature (94)..(539): NCBI GI NO: 34914824 NR Description: putative 3-dehydroquinate dehydratase
  misc_feature (33)..(95): NCBI GI NO: 34914824 NR Description: putative 3-dehydroquinate dehydratase
  misc_feature (33)..(525): NCBI GI NO: 34914828 NR Description: putative 3-dehydroquinate dehydratase / shikimate5-dehydrogenase
  misc_feature (28)..(528): NCBI GI NO: 15230703 NR Description: dehydroquinate dehydratase/shikimate dehydrogenase
  misc_feature (96)..(540): NCBI GI NO: 7436862 NR Description: 3-dehydroquinate dehydratase (EC 4
  misc_feature (27)..(94): NCBI GI NO: 7436862 NR Description: 3-dehydroquinate dehydratase (EC 4
  misc_feature (27)..(527): NCBI GI NO: 629688 NR Description: 3-dehydroquinate dehydratase (EC 4
  misc_feature (33)..(352): NCBI GI NO: 7488788 NR Description: 3-dehydroquinate dehydratase (EC 4
  misc_feature (264)..(551): NCBI GI NO: 21402380 NR Description: Shikimate_DH, Shikimate / quinate 5-dehydrogenase
  misc_feature (264)..(526): NCBI GI NO: 30022412 NR Description: Shikimate 5-dehydrogenase

SEQ ID NO: 40961 - protein, 540 aa, Zea mays subsp. mays; identical to SEQ ID NO: 30553
  peptide (1)..(540): Ceres Seq. ID no. 12372857
  misc_feature (270)..(515): Pfam Name: Pfam Description:  Shikimate / quinate 5-dehydrogenase
  misc_feature (83)..(528): NCBI GI NO: 34914824 NR Description: putative 3-dehydroquinate dehydratase
  misc_feature (22)..(84): NCBI GI NO: 34914824 NR Description: putative 3-dehydroquinate dehydratase
  misc_feature (22)..(514): NCBI GI NO: 34914828 NR Description: putative 3-dehydroquinate dehydratase / shikimate5-dehydrogenase
  misc_feature (17)..(517): NCBI GI NO: 15230703 NR Description: dehydroquinate dehydratase/shikimate dehydrogenase
  misc_feature (85)..(529): NCBI GI NO: 7436862 NR Description: 3-dehydroquinate dehydratase (EC 4
  misc_feature (16)..(83): NCBI GI NO: 7436862 NR Description: 3-dehydroquinate dehydratase (EC 4
  misc_feature (16)..(516): NCBI GI NO: 629688 NR Description: 3-dehydroquinate dehydratase (EC 4
  misc_feature (22)..(341): NCBI GI NO: 7488788 NR Description: 3-dehydroquinate dehydratase (EC 4
  misc_feature (253)..(540): NCBI GI NO: 21402380 NR Description: Shikimate_DH, Shikimate / quinate 5-dehydrogenase
  misc_feature (253)..(515): NCBI GI NO: 30022412 NR Description: Shikimate 5-dehydrogenase

SEQ ID NO: 40962 - protein, 536 aa, Zea mays subsp. mays; identical to SEQ ID NO: 30554
  peptide (1)..(536): Ceres Seq. ID no. 12372858
  misc_feature (266)..(511): Pfam Name: Pfam Description:  Shikimate / quinate 5-dehydrogenase
  misc_feature (79)..(524): NCBI GI NO: 34914824 NR Description: putative 3-dehydroquinate dehydratase
  misc_feature (18)..(80): NCBI GI NO: 34914824 NR Description: putative 3-dehydroquinate dehydratase
  misc_feature (18)..(510): NCBI GI NO: 34914828 NR Description: putative 3-dehydroquinate dehydratase / shikimate5-dehydrogenase
  misc_feature (13)..(513): NCBI GI NO: 15230703 NR Description: dehydroquinate dehydratase/shikimate dehydrogenase
  misc_feature (81)..(525): NCBI GI NO: 7436862 NR Description: 3-dehydroquinate dehydratase (EC 4
  misc_feature (12)..(79): NCBI GI NO: 7436862 NR Description: 3-dehydroquinate dehydratase (EC 4
  misc_feature (12)..(512): NCBI GI NO: 629688 NR Description: 3-dehydroquinate dehydratase (EC 4
  misc_feature (18)..(337): NCBI GI NO: 7488788 NR Description: 3-dehydroquinate dehydratase (EC 4
  misc_feature (249)..(536): NCBI GI NO: 21402380 NR Description: Shikimate_DH, Shikimate / quinate 5-dehydrogenase
  misc_feature (249)..(511): NCBI GI NO: 30022412 NR Description: Shikimate 5-dehydrogenase

SEQ ID NO: 40963 - DNA, 1189 bp, Zea mays subsp. mays
  misc_feature (1)..(1189): Ceres Seq. ID no. 12358770
actatatatacagacaccatgcatgtcatcgtctctcgatctattcgatcgacaagccgtgtgttgagtcatttcaaaacaaccagagaaacacatggccaacatccccaagtatcgctggacccaaaaccccttaatccttctatcttgcgctggtgcggtgctggcagtttctactctgatgctgccagtgcctgctgcatcccaaactataaatttcaagaatctttgcattggtgtccataagatcctagacgcatgtgtgggtgccaatgccgaactacgccaagtgtctatggccgccggtgcgaggaacgctagggcgctcctgcttaacagtcagggtatatctgggccacttcccacgggtttgggcgccttctccaacttgagttacgtcgccctcgccaacaacaagctcaccgggccaatcccaccatcagtcgggcacctgcaccactccctccgcgagattgtcttcctcaacaaccagctctccggctgcctccccggcgagctagggatgctcagcaaggcggtcgtcatggacgccggcatgaatcagctcaccggtccaatccctcctctcttttcctgcctcagcagagtcgagcagctcaacctggccgggaaccgcctctatggccatgttcccgacgctctctgcaggctcgcggggccggctggccgcctttccaatctaaccttgtctggcaactactttgtcgccgtcgggccggcatgcgcagcgctgatcaaagacggcgtcctggacgtgaagaacaactgcatttcgggctttgccaaccagaggcctccggcggagtgtgcagcgttccagagccagccaaagacgtgcccggaggaggcgagcactcaggtgtcatgcccagccgcagctaccatgcacatgaacgctgcgccgccgagggatcagcggaagaccaccagggactactacagctacgtgacgtacgctagcctgcgttagtgaggcgccacgtacggccatgcaatgacgcgccaccagtacctatagctggaacttggctatatgtgttatcttcttgtatcattattaattattttgtaccatgcatgtgttggtgtgctgcttgtgattgttgtttgttcgtttgtatcaggtgctactggcatatcttatatattacacgccacttgttagtgt

SEQ ID NO: 40964 - protein, 298 aa, Zea mays subsp. mays
  peptide (1)..(298): Ceres Seq. ID no. 12358771
  misc_feature (76)..(297): NCBI GI NO: 32490271 NR Description: OSJNBb0116K07.13
  misc_feature (78)..(297): NCBI GI NO: 15222811 NR Description: unknown protein; protein id: At1g49750.1
  misc_feature (78)..(256): NCBI GI NO: 15230349 NR Description: unknown protein; protein id: At3g19320.1
  misc_feature (73)..(256): NCBI GI NO: 30680322 NR Description: extensin-related protein [Arabidopsis thaliana]
  misc_feature (77)..(276): NCBI GI NO: 15224840 NR Description: putative disease resistance protein
  misc_feature (77)..(267): NCBI GI NO: 15233499 NR Description: extensin-like protein; protein id: At4g29240
  misc_feature (77)..(283): NCBI GI NO: 15226640 NR Description: unknown protein; protein id: At2g15880.1
  misc_feature (65)..(255): NCBI GI NO: 5917664 NR Description: extensin-like protein [Lycopersicon esculentum]
  misc_feature (77)..(258): NCBI GI NO: 15235186 NR Description: extensin-like protein; protein id: At4g33970.1
  misc_feature (74)..(266): NCBI GI NO: 15228861 NR Description: hypothetical protein; protein id: At3g22800.1
MANIPKYRWTQNPLILLSCAGAVLAVSTLMLPVPAASQTINFKNLCIGVHKILDACVGANAELRQVSMAAGARNARALLLNSQGISGPLPTGLGAFSNLSYVALANNKLTGPIPPSVGHLHHSLREIVFLNNQLSGCLPGELGMLSKAVVMDAGMNQLTGPIPPLFSCLSRVEQLNLAGNRLYGHVPDALCRLAGPAGRLSNLTLSGNYFVAVGPACAALIKDGVLDVKNNCISGFANQRPPAECAAFQSQPKTCPEEASTQVSCPAAATMHMNAAPPRDQRKTTRDYYSYVTYASLR

SEQ ID NO: 40965 - protein, 269 aa, Zea mays subsp. mays
  peptide (1)..(269): Ceres Seq. ID no. 12358772
  misc_feature (47)..(268): NCBI GI NO: 32490271 NR Description: OSJNBb0116K07.13
  misc_feature (49)..(268): NCBI GI NO: 15222811 NR Description: unknown protein; protein id: At1g49750.1
  misc_feature (49)..(227): NCBI GI NO: 15230349 NR Description: unknown protein; protein id: At3g19320.1
  misc_feature (44)..(227): NCBI GI NO: 30680322 NR Description: extensin-related protein [Arabidopsis thaliana]
  misc_feature (48)..(247): NCBI GI NO: 15224840 NR Description: putative disease resistance protein
  misc_feature (48)..(238): NCBI GI NO: 15233499 NR Description: extensin-like protein; protein id: At4g29240
  misc_feature (48)..(254): NCBI GI NO: 15226640 NR Description: unknown protein; protein id: At2g15880.1
  misc_feature (36)..(226): NCBI GI NO: 5917664 NR Description: extensin-like protein [Lycopersicon esculentum]
  misc_feature (48)..(229): NCBI GI NO: 15235186 NR Description: extensin-like protein; protein id: At4g33970.1
  misc_feature (45)..(237): NCBI GI NO: 15228861 NR Description: hypothetical protein; protein id: At3g22800.1
MLPVPAASQTINFKNLCIGVHKILDACVGANAELRQVSMAAGARNARALLLNSQGISGPLPTGLGAFSNLSYVALANNKLTGPIPPSVGHLHHSLREIVFLNNQLSGCLPGELGMLSKAVVMDAGMNQLTGPIPPLFSCLSRVEQLNLAGNRLYGHVPDALCRLAGPAGRLSNLTLSGNYFVAVGPACAALIKDGVLDVKNNCISGFANQRPPAECAAFQSQPKTCPEEASTQVSCPAAATMHMNAAPPRDQRKTTRDYYSYVTYASLR

SEQ ID NO: 40966 - protein, 231 aa, Zea mays subsp. mays
  peptide (1)..(231): Ceres Seq. ID no. 12358773
  misc_feature (9)..(230): NCBI GI NO: 32490271 NR Description: OSJNBb0116K07.13
  misc_feature (11)..(230): NCBI GI NO: 15222811 NR Description: unknown protein; protein id: At1g49750.1
  misc_feature (11)..(189): NCBI GI NO: 15230349 NR Description: unknown protein; protein id: At3g19320.1
  misc_feature (6)..(189): NCBI GI NO: 30680322 NR Description: extensin-related protein [Arabidopsis thaliana]
  misc_feature (10)..(209): NCBI GI NO: 15224840 NR Description: putative disease resistance protein
  misc_feature (10)..(200): NCBI GI NO: 15233499 NR Description: extensin-like protein; protein id: At4g29240
  misc_feature (10)..(216): NCBI GI NO: 15226640 NR Description: unknown protein; protein id: At2g15880.1
  misc_feature (1)..(188): NCBI GI NO: 5917664 NR Description: extensin-like protein [Lycopersicon esculentum]
  misc_feature (10)..(191): NCBI GI NO: 15235186 NR Description: extensin-like protein; protein id: At4g33970.1
  misc_feature (7)..(199): NCBI GI NO: 15228861 NR Description: hypothetical protein; protein id: At3g22800.1
MAAGARNARALLLNSQGISGPLPTGLGAFSNLSYVALANNKLTGPIPPSVGHLHHSLREIVFLNNQLSGCLPGELGMLSKAVVMDAGMNQLTGPIPPLFSCLSRVEQLNLAGNRLYGHVPDALCRLAGPAGRLSNLTLSGNYFVAVGPACAALIKDGVLDVKNNCISGFANQRPPAECAAFQSQPKTCPEEASTQVSCPAAATMHMNAAPPRDQRKTTRDYYSYVTYASLR

SEQ ID NO: 40967 - DNA, 1588 bp, Zea mays subsp. mays
  misc_feature (1)..(1588): Ceres Seq. ID no. 12376845
gagaccattacctagaacatcctaatcgaaaaaccgattcccacgtgattgcggcgcggccgcgcgaggagtgctcgtagccctcccccccgcccgcccgcccagattcggtcgcccatggcgagggacccagcccgcaccgtcttcataggtaacttggacgaaaaggtatctgagagaatcttgtatgagattcttattcaggcaggccatgtagtagacctgcatgtacccagtgacaaggagagtaacagtctcaaaggttacgcttttgttgagtatgaaaccgaggaaatcgcacaatacgctgttaagcttttctcaggacttgttcggatcagtggtaaaacgcttaagttcatgattgctggttatgacaaaccgtcttcaaatgtcaatacctcagtaatgctcaatcctgtaccctcttcaaatggcaataatccacatatcaggtggtaaacgggaggattggaggttatgtcttttctctcactccttatccatatggttttcaagctttatcaggtggacaagtacacggccatggccagcctttgcacatcggacatacttgaaggcttgaagctgtcgtccttacagtctcatcgaccgatgccacagcgacacatgcacgaacaagagcacctgcccgactgagcgtgcacgacctcgcgccgatcagggccaagaactcacccccgtcgtgtgtgccgatggaggtggaggccgacgggatccaggaagccaccgcaggcgcaggagacggcggcggcgtggcacgcatgtcttcttctgcgtcgccgcgacgtccaggggcaacaagaacagcatctcctacttccacaccaacgcggtcggcgaggacgccgagtcggcgctcgcgctcgccgcgctctgcctcgaccacgcccccgaccaccaccggtggcaccaccacaccgtcgccggggcgaagacgttcgcgttcctctcggccgacgacggccgcacgtacttcgccgcggccgacccgagccccggcgccgccgaggtggtccggttcctggagcgcgtccgcgacgcgtgcgacgccgcgcccaggaagcgcctgcgcgacgaggcggtggcccccgtcgctcgccagttcgccaggacgctgcgggcggcggcggcgggcccgagctcaggcgcggagctaccggaggcctcgctgcaggcgaaggagccgtccacgccgctggcgccggtctgcgagaaagacgaggaggagcgccagagggccggagagcgacgtcgcgccttcttgcagccggaggaaagcgcaagcgcgcttccggggtggcgcccgtggtggcgccacgcgtcggtcgtgatcgtcgtggatgtggtgctgtgcctcgtgctgttcgccgtgtggatgggggtttgcaaaggcttcgggtgtctgcgatgaaaatcgcccgagagcatgcaattgtaaatttgtaatcacatccatgctgtgtgcatggttcgcgttctttatgttaatttgcttgtcagatatcacatctacaatttgaaggaaaaaaacggtttaagaaacgaagacgcatgccttcaatgc

SEQ ID NO: 40968 - protein, 212 aa, Zea mays subsp. mays
  peptide (1)..(212): Ceres Seq. ID no. 12376846
  misc_feature (25)..(155): Pfam Name: Pfam Description:  Mucin-like glycoprotein
  misc_feature (2)..(212): NCBI GI NO: 25143299 NR Description: pre-mRNA splicing SR protein related RSR-1 (68
  misc_feature (1)..(208): NCBI GI NO: 5821151 NR Description: RNA binding protein [Homo sapiens]
  misc_feature (1)..(208): NCBI GI NO: 6634015 NR Description: KIAA0324 protein [Homo sapiens]
  misc_feature (1)..(208): NCBI GI NO: 7512967 NR Description: hypothetical protein KIAA0324 - human (fragment)
  misc_feature (1)..(208): NCBI GI NO: 6649242 NR Description: splicing coactivator subunit SRm300 [Homo sapiens]
  misc_feature (1)..(208): NCBI GI NO: 19923466 NR Description: splicing coactivator subunit SRm300
  misc_feature (1)..(212): NCBI GI NO: 5821145 NR Description: RNA binding protein [Homo sapiens]
  misc_feature (1)..(212): NCBI GI NO: 5821143 NR Description: RNA binding protein [Homo sapiens]
  misc_feature (1)..(212): NCBI GI NO: 6649242 NR Description: splicing coactivator subunit SRm300 [Homo sapiens]
  misc_feature (1)..(212): NCBI GI NO: 19923466 NR Description: splicing coactivator subunit SRm300
MEVEADGIQEATAGAGDGGGVARMSSSASPRRPGATRTASPTSTPTRSARTPSRRSRSPRSASTTPPTTTGGTTTPSPGRRRSRSSRPTTAARTSPRPTRAPAPPRWSGSWSASATRATPRPGSACATRRWPPSLASSPGRCGRRRRARAQARSYRRPRCRRRSRPRRWRRSARKTRRSARGPESDVAPSCSRRKAQARFRGGARGGATRRS

SEQ ID NO: 40969 - protein, 189 aa, Zea mays subsp. mays
  peptide (1)..(189): Ceres Seq. ID no. 12376847
  misc_feature (2)..(132): Pfam Name: Pfam Description:  Mucin-like glycoprotein
  misc_feature (1)..(189): NCBI GI NO: 25143299 NR Description: pre-mRNA splicing SR protein related RSR-1 (68
  misc_feature (1)..(185): NCBI GI NO: 5821151 NR Description: RNA binding protein [Homo sapiens]
  misc_feature (1)..(185): NCBI GI NO: 6634015 NR Description: KIAA0324 protein [Homo sapiens]
  misc_feature (1)..(185): NCBI GI NO: 7512967 NR Description: hypothetical protein KIAA0324 - human (fragment)
  misc_feature (1)..(185): NCBI GI NO: 6649242 NR Description: splicing coactivator subunit SRm300 [Homo sapiens]
  misc_feature (1)..(185): NCBI GI NO: 19923466 NR Description: splicing coactivator subunit SRm300
  misc_feature (1)..(189): NCBI GI NO: 5821145 NR Description: RNA binding protein [Homo sapiens]
  misc_feature (1)..(189): NCBI GI NO: 5821143 NR Description: RNA binding protein [Homo sapiens]
  misc_feature (1)..(189): NCBI GI NO: 6649242 NR Description: splicing coactivator subunit SRm300 [Homo sapiens]
  misc_feature (1)..(189): NCBI GI NO: 19923466 NR Description: splicing coactivator subunit SRm300
MSSSASPRRPGATRTASPTSTPTRSARTPSRRSRSPRSASTTPPTTTGGTTTPSPGRRRSRSSRPTTAARTSPRPTRAPAPPRWSGSWSASATRATPRPGSACATRRWPPSLASSPGRCGRRRRARAQARSYRRPRCRRRSRPRRWRRSARKTRRSARGPESDVAPSCSRRKAQARFRGGARGGATRRS

SEQ ID NO: 40970 - protein, 114 aa, Zea mays subsp. mays
  peptide (1)..(114): Ceres Seq. ID no. 12376848
  misc_feature (9)..(81): Pfam Name: a.k.a. RRM, RBD, or RNP domain Pfam Description: RNA recognition motif.
  misc_feature (1)..(103): NCBI GI NO: 34907328 NR Description: P0698A10.26
  misc_feature (8)..(92): NCBI GI NO: 30681329 NR Description: RNA recognition motif (RRM)-containing protein
  misc_feature (27)..(92): NCBI GI NO: 7486312 NR Description: hypothetical protein F28M11
  misc_feature (3)..(91): NCBI GI NO: 40738651 NR Description: hypothetical protein AN6501.2
  misc_feature (3)..(99): NCBI GI NO: 37535012 NR Description: putative spliceosomal protein
  misc_feature (3)..(100): NCBI GI NO: 19114913 NR Description: spliceosome associated protein 49; RNA binding
  misc_feature (3)..(99): NCBI GI NO: 14334958 NR Description: putative spliceosome associated protein
  misc_feature (3)..(99): NCBI GI NO: 15224186 NR Description: pre-mRNA splicing factor SF3b, putative
  misc_feature (3)..(99): NCBI GI NO: 21593441 NR Description: putative spliceosome associated protein
  misc_feature (1)..(99): NCBI GI NO: 34858075 NR Description: similar to Sf3b4 protein [Rattus norvegicus]
MARDPARTVFIGNLDEKVSERILYEILIQAGHVVDLHVPSDKESNSLKGYAFVEYETEEIAQYAVKLFSGLVRISGKTLKFMIAGYDKPSSNVNTSVMLNPVPSSNGNNPHIRW

SEQ ID NO: 40971 - DNA, 1172 bp, Zea mays subsp. mays
  misc_feature (1)..(1172): Ceres Seq. ID no. 12424116
  misc_feature (524)..(524): n is a, c, t, g, unknown, or other
  misc_feature (523)..(523): n is a, c, t, g, unknown, or other
gcacgagaccattacctagaacatcctaatcgaaaaaccagaccagctcatcatcacattcgcatacatctcttctagcacgcaaagatcgagctatagctagctctgcaaccagagacaaggaggactacccttcgccggccggcctaaggaggagtacgtacagaacttgggacatggaaaccgtcgtgggcgacctcatggcgaccgagctgaggcttggcctgccgggcaccgtcgacgactgcagccagccccaactggtgaaggccacgccgccgtcgacgccaaggggcaagaggcgcgccaccgccgatgccgtggaggaagccgccggcgccgaggaggcaagcaagcgtgacgccgagacggcgcccccggcagccaaggcgcccgtggtgggttggccgccggtgaggtcgtaccggaagagctgcttccagcaggccagcagcaagcaggcggcggcggccaaacaggaggcggcggcggcggcggcggcgcccggctgcacggcatcgtnngcagccgccacaaacaccagcagctgcagcagcgccgccgttgtcgtcggctccttcgtcaaagtgagcatggacggcgccccgtacctgaggaaggtggacctgaggatgtacaggggctacagggagctccgggaggccctggaggccatgttcgtttcctccagcagcgccaacaacctgtcggagttcgccgtcacctacaggacaaggacggcgacctcatgctcgtcggagacgtgccgttcgagatgttcgctagcacctgcaagaagctgaggatcatgaagagatctgaagccacaggcctggggtcgtcgtcagcgaggcagcaatgaagatgatcccatctgatcgagaggacctgcatgcccggcaacgttgaacaacatgtcgatcgaacgtcatggtggccttattaattgtttctttcttttcttttcttccttttgtttaattatttttgctgttctggttggcgccgccgtggatcggagggatccccaagccgaaggatgagcttggctggcgcatcgaagcgcatgcaacggatgtgtgcggctttggttctgtaataggacaaccagtggtccttttttcgatctattagcggcacaaaaggagctagatgcatgctgaggttgtttc

SEQ ID NO: 40972 - protein, 208 aa, Zea mays subsp. mays
  peptide (1)..(208): Ceres Seq. ID no. 12424117
  misc_feature (7)..(94): Pfam Name: Pfam Description:  AUX/IAA family
  misc_feature (7)..(94): NCBI GI NO: 15219692 NR Description: putative auxin-induced protein AUX2-11
  misc_feature (133)..(168): NCBI GI NO: 15219692 NR Description: putative auxin-induced protein AUX2-11
  misc_feature (41)..(187): NCBI GI NO: 34897206 NR Description: putative auxin-induced protein
  misc_feature (7)..(90): NCBI GI NO: 416641 NR Description: Auxin-induced protein 22B
  misc_feature (133)..(187): NCBI GI NO: 416641 NR Description: Auxin-induced protein 22B
  misc_feature (7)..(96): NCBI GI NO: 11131103 NR Description: Auxin-induced protein 22D
  misc_feature (133)..(187): NCBI GI NO: 11131103 NR Description: Auxin-induced protein 22D
  misc_feature (7)..(110): NCBI GI NO: 34550779 NR Description: Gbiaa-Re [Gossypium barbadense]
  misc_feature (133)..(187): NCBI GI NO: 34550779 NR Description: Gbiaa-Re [Gossypium barbadense]
  misc_feature (7)..(91): NCBI GI NO: 1352057 NR Description: AUXIN-INDUCED PROTEIN IAA4
  misc_feature (116)..(116): Xaa is any aa, unknown or other
METVVGDLMATELRLGLPGTVDDCSQPQLVKATPPSTPRGKRRATADAVEEAAGAEEASKRDAETAPPAAKAPVVGWPPVRSYRKSCFQQASSKQAAAAKQEAAAAAAAPGCTASXAAATNTSSCSSAAVVVGSFVKVSMDGAPYLRKVDLRMYRGYRELREALEAMFVSSSSANNLSEFAVTYRTRTATSCSSETCRSRCSLAPARS

SEQ ID NO: 40973 - protein, 200 aa, Zea mays subsp. mays
  peptide (1)..(200): Ceres Seq. ID no. 12424118
  misc_feature (1)..(86): Pfam Name: Pfam Description:  AUX/IAA family
  misc_feature (1)..(86): NCBI GI NO: 15219692 NR Description: putative auxin-induced protein AUX2-11
  misc_feature (125)..(160): NCBI GI NO: 15219692 NR Description: putative auxin-induced protein AUX2-11
  misc_feature (33)..(179): NCBI GI NO: 34897206 NR Description: putative auxin-induced protein
  misc_feature (1)..(82): NCBI GI NO: 416641 NR Description: Auxin-induced protein 22B
  misc_feature (125)..(179): NCBI GI NO: 416641 NR Description: Auxin-induced protein 22B
  misc_feature (1)..(88): NCBI GI NO: 11131103 NR Description: Auxin-induced protein 22D
  misc_feature (125)..(179): NCBI GI NO: 11131103 NR Description: Auxin-induced protein 22D
  misc_feature (1)..(102): NCBI GI NO: 34550779 NR Description: Gbiaa-Re [Gossypium barbadense]
  misc_feature (125)..(179): NCBI GI NO: 34550779 NR Description: Gbiaa-Re [Gossypium barbadense]
  misc_feature (1)..(83): NCBI GI NO: 1352057 NR Description: AUXIN-INDUCED PROTEIN IAA4
  misc_feature (108)..(108): Xaa is any aa, unknown or other
MATELRLGLPGTVDDCSQPQLVKATPPSTPRGKRRATADAVEEAAGAEEASKRDAETAPPAAKAPVVGWPPVRSYRKSCFQQASSKQAAAAKQEAAAAAAAPGCTASXAAATNTSSCSSAAVVVGSFVKVSMDGAPYLRKVDLRMYRGYRELREALEAMFVSSSSANNLSEFAVTYRTRTATSCSSETCRSRCSLAPARS

SEQ ID NO: 40974 - DNA, 1489 bp, Zea mays subsp. mays
  misc_feature (1)..(1489): Ceres Seq. ID no. 12633927
  misc_feature (814)..(814): n is a, c, t, g, unknown, or other
  misc_feature (819)..(819): n is a, c, t, g, unknown, or other
  misc_feature (818)..(818): n is a, c, t, g, unknown, or other
  misc_feature (815)..(815): n is a, c, t, g, unknown, or other
gcacgagaccattacctagaacatcctaatcgaaaactatcttcctgcttcggacagttgagagagagagagagggatcgagagcgcggcggaggcgatggcgagcggagggaagggactcaacgcgactggggagttcttccggcggagggacgagtggaggaggcaccctatggcggggaaccagctgcgccacgccacacccgggctcggcatcgccatcgtcgccttcgggatctacctcgtcggcgaggccgcctacaaccgcctctaccgcccctccggcgtcgacttcactctctctcactcccaaaccaatctaccttccgcccatgggcccaccgccgcgccgccgccaactcctgctgtctctcgcgctgctcgccaccgcggccgcctgctgcgcggcgggggcggcgcccaggctgtcgcccaactactaccgccgcagctgcccgcgcgtggagcggatcgtgtcggacgccgtcgccgccaagcagcgcgccaacccgtccacggcggcgggcacgctgcggctcttcttccacgactgcttcgtcaacggctgcgacgcctcggtgctggtctcgccgctctcctccaccgacgccgcgccggagcgcgccgcggagatcaacctctccctgcccggggacgccttcgacgccgtggcccgcgccaaggcggcgctggaggccgcgtgcccgggcgtcgtctcctgcgccgacgcgctggcgctagcggcgcgcgacctcgtggccgccctgggcgggccccggttccccgtcgcgctgggccgccgcgactcccgccnntcnnacgcgcgcgacgtcgagggcaacctgccccgcaccaacatgtcggcgcgagccatggtgcgcctcttcgcccgcaagggcctcgcgccccgggagatggtggcgctggccggcgcccacaccgtcggcttctcccactgcgccgagttcgcgccccgcatctacggctaccggggcgccagccacgacccgcggctcaacccggagttcgcgcgcgcgctgcagcgctcctgcgcgggataccgcaccgaccccaccgtctccatcttcaacgacatcgtcacgccccgggacttcgacgagacctactacaagaacctgccccacggcctcggcctgctcgcctccgacgccgccatctgggagtacccgcccaccagggtcttcgcccagcgctacgccgccaaccgcaccgccttcttcgaggacttcgccgccgcgatgcagaggctcggcgccgtcggcgtcaagacggggcgccagggcgtcgtcaggcgccgctgcgacgcgctcgactgagtggcgtcgttcgacggcgttgcttattgtgctattgggtcggtcgatcgttggaaagcttcgaattcgattacgggatgtacttggaaaatggggcgtgtgctttttcagagtggtaactgaagtgatgaactgagggcaagctaattctg

SEQ ID NO: 40975 - protein, 452 aa, Zea mays subsp. mays
  peptide (1)..(452): Ceres Seq. ID no. 12633928
  misc_feature (83)..(367): Pfam Name: Pfam Description:  Herpesvirus alkaline exonuclease
  misc_feature (239)..(239): Xaa is any aa, unknown or other
  misc_feature (240)..(240): Xaa is any aa, unknown or other
  misc_feature (241)..(241): Xaa is any aa, unknown or other
MASGGKGLNATGEFFRRRDEWRRHPMAGNQLRHATPGLGIAIVAFGIYLVGEAAYNRLYRPSGVDFTLSHSQTNLPSAHGPTAAPPPTPAVSRAARHRGRLLRGGGGAQAVAQLLPPQLPARGADRVGRRRRQAARQPVHGGGHAAALLPRLLRQRLRRLGAGLAALLHRRRAGARRGDQPLPARGRLRRRGPRQGGAGGRVPGRRLLRRRAGASGARPRGRPGRAPVPRRAGPPRLPXXXRARRRGQPAPHQHVGASHGAPLRPQGPRAPGDGGAGRRPHRRLLPLRRVRAPHLRLPGRQPRPAAQPGVRARAAALLRGIPHRPHRLHLQRHRHAPGLRRDLLQEPAPRPRPARLRRRHLGVPAHQGLRPALRRQPHRLLRGLRRRDAEARRRRRQDGAPGRRQAPLRRARLSGVVRRRCLLCYWVGRSLESFEFDYGMYLENGACAFSEW

SEQ ID NO: 40976 - protein, 427 aa, Zea mays subsp. mays
  peptide (1)..(427): Ceres Seq. ID no. 12633929
  misc_feature (58)..(342): Pfam Name: Pfam Description:  Herpesvirus alkaline exonuclease
  misc_feature (214)..(214): Xaa is any aa, unknown or other
  misc_feature (215)..(215): Xaa is any aa, unknown or other
  misc_feature (216)..(216): Xaa is any aa, unknown or other
MAGNQLRHATPGLGIAIVAFGIYLVGEAAYNRLYRPSGVDFTLSHSQTNLPSAHGPTAAPPPTPAVSRAARHRGRLLRGGGGAQAVAQLLPPQLPARGADRVGRRRRQAARQPVHGGGHAAALLPRLLRQRLRRLGAGLAALLHRRRAGARRGDQPLPARGRLRRRGPRQGGAGGRVPGRRLLRRRAGASGARPRGRPGRAPVPRRAGPPRLPXXXRARRRGQPAPHQHVGASHGAPLRPQGPRAPGDGGAGRRPHRRLLPLRRVRAPHLRLPGRQPRPAAQPGVRARAAALLRGIPHRPHRLHLQRHRHAPGLRRDLLQEPAPRPRPARLRRRHLGVPAHQGLRPALRRQPHRLLRGLRRRDAEARRRRRQDGAPGRRQAPLRRARLSGVVRRRCLLCYWVGRSLESFEFDYGMYLENGACAFSEW

SEQ ID NO: 40977 - protein, 334 aa, Zea mays subsp. mays
  peptide (1)..(334): Ceres Seq. ID no. 12633930
  misc_feature (14)..(331): NCBI GI NO: 9759442 NR Description: peroxidase [Arabidopsis thaliana]
  misc_feature (14)..(331): NCBI GI NO: 18422742 NR Description: peroxidase, putative; protein id: At5g47000
  misc_feature (17)..(331): NCBI GI NO: 21593687 NR Description: peroxidase [Arabidopsis thaliana]
  misc_feature (30)..(331): NCBI GI NO: 15236620 NR Description: peroxidase, putative; protein id: At4g17690.1
  misc_feature (1)..(334): NCBI GI NO: 15242580 NR Description: peroxidase, putative; protein id: At5g40150.1
  misc_feature (28)..(334): NCBI GI NO: 15232929 NR Description: peroxidase, putative; protein id: At3g28200
  misc_feature (28)..(334): NCBI GI NO: 14334600 NR Description: putative peroxidase [Arabidopsis thaliana]
  misc_feature (14)..(331): NCBI GI NO: 15221670 NR Description: peroxidase, putative; protein id: At1g24110.1
  misc_feature (55)..(334): NCBI GI NO: 1890317 NR Description: peroxidase ATP26a [Arabidopsis thaliana]
  misc_feature (11)..(334): NCBI GI NO: 12056452 NR Description: peroxidase [Zea mays]
  misc_feature (161)..(161): Xaa is any aa, unknown or other
  misc_feature (162)..(162): Xaa is any aa, unknown or other
  misc_feature (163)..(163): Xaa is any aa, unknown or other
MGPPPRRRQLLLSLALLATAAACCAAGAAPRLSPNYYRRSCPRVERIVSDAVAAKQRANPSTAAGTLRLFFHDCFVNGCDASVLVSPLSSTDAAPERAAEINLSLPGDAFDAVARAKAALEAACPGVVSCADALALAARDLVAALGGPRFPVALGRRDSRXXXARDVEGNLPRTNMSARAMVRLFARKGLAPREMVALAGAHTVGFSHCAEFAPRIYGYRGASHDPRLNPEFARALQRSCAGYRTDPTVSIFNDIVTPRDFDETYYKNLPHGLGLLASDAAIWEYPPTRVFAQRYAANRTAFFEDFAAAMQRLGAVGVKTGRQGVVRRRCDALD

SEQ ID NO: 40978 - DNA, 1141 bp, Zea mays subsp. mays
  misc_feature (1)..(1141): Ceres Seq. ID no. 12375733
gcacgagaccattacctagaacatcctaatcgaaaaaaacacctcccaacccaatctcctcagtcctcactcctcagagagagccccaagccaagatctgcgcgggcaagtcaccaggcgaagcaccggctcccatggccgtggacctgatgggctgctacgccccgcgccgcgccaacgaccagctcgccatccaggaggcggcggcggccgggctccgcaacctggagctgctggtgacgtccctgtccacgcaggccgccgcgccgcacagggccgctgatcagccgttcggcgagatcgccggccgggccgtctccaagttccgcaaggtcatctccatcctcgaccgcacggggcacgcccgcttccgccgcgggcccgtcgagccgtcgccgccgccggcgcctcctgtcgtccccggtccgcccgtcagcgtggcgcagccgccgcagagcctgacgctggatttcacgaagccgaacctggccgtgtcggccgccacgtccgtcacctccacgtccttcttctcgtcggtcacggccggcgagggcagcgtctccaagggccggagcctcatgtcctccgggaagccgccgctgtctggccacaagcggaagccctgcgccggcgcccactccgaggccaccaccaacggcagccgttgccactgctccaagagaaggaagaaccgcgtgaagaggagcatcagagtgccggcgatcagctcgaaggtcgccgacatcccgccggacgagtactcgtggaggaagtacggccagaagcctatcaagggctccccttacccacgtggctactacaagtgcagcactgtgcggggatgcccggcgaggaagcacgtggagcgggccaccgacgacccggccatgctggtggtgacgtacgagggcgagcaccgccacacgccgggcgcggtccaggggccgagccccctggcgaccgcgtcgccggtgcccgtcgccgtctccgccggcaacgggctcgttgtctagtctactaaaagctaggattagcttctcgtcttctttgttttttttttttgtttgagctgatgtccgtgtaaaacaaggaagaaggttgtagaaagagggagaggaggacaccggaatttcgatgccgg

SEQ ID NO: 40979 - protein, 292 aa, Zea mays subsp. mays
  peptide (1)..(292): Ceres Seq. ID no. 12375734
  misc_feature (205)..(264): Pfam Name: Pfam Description:  WRKY DNA -binding domain
  misc_feature (1)..(291): NCBI GI NO: 38346908 NR Description: OSJNBb0015N08.8
  misc_feature (118)..(269): NCBI GI NO: 4760596 NR Description: DNA-binding protein NtWRKY3 [Nicotiana tabacum]
  misc_feature (1)..(118): NCBI GI NO: 4760596 NR Description: DNA-binding protein NtWRKY3 [Nicotiana tabacum]
  misc_feature (83)..(272): NCBI GI NO: 10798760 NR Description: WRKY transcription factor Nt-SubD48
  misc_feature (1)..(93): NCBI GI NO: 10798760 NR Description: WRKY transcription factor Nt-SubD48
  misc_feature (86)..(265): NCBI GI NO: 38175580 NR Description: putative DNA-binding protein NtWRKY3
  misc_feature (81)..(281): NCBI GI NO: 4894963 NR Description: DNA-binding protein WRKY3 [Avena sativa]
  misc_feature (1)..(39): NCBI GI NO: 4894963 NR Description: DNA-binding protein WRKY3 [Avena sativa]
  misc_feature (88)..(269): NCBI GI NO: 22329054 NR Description: WRKY family transcription factor
  misc_feature (88)..(269): NCBI GI NO: 30689072 NR Description: WRKY family transcription factor
MAVDLMGCYAPRRANDQLAIQEAAAAGLRNLELLVTSLSTQAAAPHRAADQPFGEIAGRAVSKFRKVISILDRTGHARFRRGPVEPSPPPAPPVVPGPPVSVAQPPQSLTLDFTKPNLAVSAATSVTSTSFFSSVTAGEGSVSKGRSLMSSGKPPLSGHKRKPCAGAHSEATTNGSRCHCSKRRKNRVKRSIRVPAISSKVADIPPDEYSWRKYGQKPIKGSPYPRGYYKCSTVRGCPARKHVERATDDPAMLVVTYEGEHRHTPGAVQGPSPLATASPVPVAVSAGNGLVV

SEQ ID NO: 40980 - protein, 287 aa, Zea mays subsp. mays
  peptide (1)..(287): Ceres Seq. ID no. 12375735
  misc_feature (200)..(259): Pfam Name: Pfam Description:  WRKY DNA -binding domain
  misc_feature (1)..(286): NCBI GI NO: 38346908 NR Description: OSJNBb0015N08.8
  misc_feature (113)..(264): NCBI GI NO: 4760596 NR Description: DNA-binding protein NtWRKY3 [Nicotiana tabacum]
  misc_feature (1)..(113): NCBI GI NO: 4760596 NR Description: DNA-binding protein NtWRKY3 [Nicotiana tabacum]
  misc_feature (78)..(267): NCBI GI NO: 10798760 NR Description: WRKY transcription factor Nt-SubD48
  misc_feature (1)..(88): NCBI GI NO: 10798760 NR Description: WRKY transcription factor Nt-SubD48
  misc_feature (81)..(260): NCBI GI NO: 38175580 NR Description: putative DNA-binding protein NtWRKY3
  misc_feature (76)..(276): NCBI GI NO: 4894963 NR Description: DNA-binding protein WRKY3 [Avena sativa]
  misc_feature (1)..(34): NCBI GI NO: 4894963 NR Description: DNA-binding protein WRKY3 [Avena sativa]
  misc_feature (83)..(264): NCBI GI NO: 22329054 NR Description: WRKY family transcription factor
  misc_feature (83)..(264): NCBI GI NO: 30689072 NR Description: WRKY family transcription factor
MGCYAPRRANDQLAIQEAAAAGLRNLELLVTSLSTQAAAPHRAADQPFGEIAGRAVSKFRKVISILDRTGHARFRRGPVEPSPPPAPPVVPGPPVSVAQPPQSLTLDFTKPNLAVSAATSVTSTSFFSSVTAGEGSVSKGRSLMSSGKPPLSGHKRKPCAGAHSEATTNGSRCHCSKRRKNRVKRSIRVPAISSKVADIPPDEYSWRKYGQKPIKGSPYPRGYYKCSTVRGCPARKHVERATDDPAMLVVTYEGEHRHTPGAVQGPSPLATASPVPVAVSAGNGLVV

SEQ ID NO: 40981 - DNA, 890 bp, Zea mays subsp. mays; identical to SEQ ID NO: 26277
  misc_feature (1)..(890): Ceres Seq. ID no. 12387086

SEQ ID NO: 40982 - protein, 193 aa, Zea mays subsp. mays; identical to SEQ ID NO: 26278
  peptide (1)..(193): Ceres Seq. ID no. 12387087
  misc_feature (31)..(191): Pfam Name: Pfam Description:  AhpC/TSA family
  misc_feature (1)..(193): NCBI GI NO: 34903114 NR Description: unnamed protein product
  misc_feature (11)..(193): NCBI GI NO: 7658343 NR Description: unknown protein; 13384-11892
  misc_feature (11)..(193): NCBI GI NO: 18397457 NR Description: expressed protein; protein id: At3g06050
  misc_feature (6)..(193): NCBI GI NO: 21553531 NR Description: unknown [Arabidopsis thaliana]
  misc_feature (48)..(193): NCBI GI NO: 17987739 NR Description: THIOL PEROXIDASE [Brucella melitensis]
  misc_feature (48)..(193): NCBI GI NO: 23501379 NR Description: ahpC/TSA family protein [Brucella suis 1330]
  misc_feature (62)..(193): NCBI GI NO: 15888122 NR Description: AGR_C_1423p [Agrobacterium tumefaciens]
  misc_feature (56)..(191): NCBI GI NO: 15964668 NR Description: HYPOTHETICAL PEROXIREDOXIN PROTEIN
  misc_feature (58)..(190): NCBI GI NO: 27367181 NR Description: Peroxiredoxin [Vibrio vulnificus CMCP6]
  misc_feature (61)..(193): NCBI GI NO: 27376428 NR Description: peroxiredoxin [Bradyrhizobium japonicum]

SEQ ID NO: 40983 - DNA, 1033 bp, Zea mays subsp. mays
  misc_feature (1)..(1033): Ceres Seq. ID no. 12420210
  misc_feature (1016)..(1016): n is a, c, t, g, unknown, or other
  misc_feature (653)..(653): n is a, c, t, g, unknown, or other
  misc_feature (733)..(733): n is a, c, t, g, unknown, or other
  misc_feature (800)..(800): n is a, c, t, g, unknown, or other
  misc_feature (1015)..(1015): n is a, c, t, g, unknown, or other
aagctagtggcgagagaggtcgtgcgcagtgcctggtgggtctagtctagtggcatcatggaggaggcggtggaggccgtggtcgcggccggagtggagccgttcccgacggtggacaagtgcgacgcgtcgggccgcggcgcgcacgccgtggtggcggacctggacggcgcgctgctgcgctcccgcagcgcgttcccgtactacgcgctggtggccttcgaggccggcggcgtgccgcgcctgctgctgctgctgctgctggccccgctggccgcggcgctgcgggcgctggcctcggagtcggctgcgcgcgcgtgctggtgttcgcggccacggcgggcgcccgggtgcgcgacatcgagtcggcggcgcgcgccgtgctcccgcgcttctacgccgccgacgtgcacccggccgcgtggcgggtgttctcggcctgcgcacggaggcgcgtcgtgctcacggccgcgcccaggatcatggccgagccgttcttcagggactgcctcggcgccgacgccgtcgcgggcaccgagctcgccacgtggcgcggccgcgccacgggcatggtggacagccgcaggggcgtcctcgtcggctggagcagggccgacgcgctgcgggagatattggccggcgacgacgacgangacgccgcgcccgacgtcggcctcgggaacagccgctccgactaccccttcatgagcatgtgcaaggcgtcaacaatcangtacgtctacacacacgcccacgggtttgggcggtagttgggaccgatgagccttcatgcatgtttngtatgcgttgcaagctaaaaaaggatctgcctagactgtcagcacacacgacacggcgcaaactcgtcgtgtgggcttgggacatcctgcatatgccaactgccccttggggttccttgttaacaagtcttgccggccggtacacctttgagggtgttagacatggttaaaggttttggaggcagagatttcctattcactaagtcacgcttatnnataaatcataaccacct

SEQ ID NO: 40984 - protein, 216 aa, Zea mays subsp. mays
  peptide (1)..(216): Ceres Seq. ID no. 12420211
  misc_feature (15)..(84): NCBI GI NO: 38000002 NR Description: unknown protein
  misc_feature (53)..(84): NCBI GI NO: 29788867 NR Description: hypothetical protein
  misc_feature (16)..(85): NCBI GI NO: 15224445 NR Description: unknown protein; protein id: At2g38110
  misc_feature (16)..(83): NCBI GI NO: 15223437 NR Description: hypothetical protein; protein id: At1g01610
  misc_feature (16)..(83): NCBI GI NO: 15236810 NR Description: putative protein; protein id: At4g00410.1
  misc_feature (16)..(83): NCBI GI NO: 17064780 NR Description: Unknown protein [Arabidopsis thaliana]
  misc_feature (3)..(85): NCBI GI NO: 37534314 NR Description: hypothetical protein
  misc_feature (23)..(79): NCBI GI NO: 15239924 NR Description: putative protein; protein id: At5g06090.1
  misc_feature (23)..(85): NCBI GI NO: 15229747 NR Description: unknown protein; protein id: At3g11430.1
  misc_feature (31)..(76): NCBI GI NO: 34912958 NR Description: B1158C05.6
  misc_feature (199)..(199): Xaa is any aa, unknown or other
MEEAVEAVVAAGVEPFPTVDKCDASGRGAHAVVADLDGALLRSRSAFPYYALVAFEAGGVPRLLLLLLLAPLAAALRALASESAARACWCSRPRRAPGCATSSRRRAPCSRASTPPTCTRPRGGCSRPAHGGASCSRPRPGSWPSRSSGTASAPTPSRAPSSPRGAAAPRAWWTAAGASSSAGAGPTRCGRYWPATTTXTPRPTSASGTAAPTTPS

SEQ ID NO: 40985 - DNA, 2102 bp, Zea mays subsp. mays
  misc_feature (1)..(2102): Ceres Seq. ID no. 13493251
taatcgaaaaataatcgacacacacctaacagagtaacagacaccaaacaacgcccatcactcgcgccgtacatcctgcctcctcccgcgcgcgcgcgtgcgtgcacgctagctagctgccggtcgcctcgccaccatggtgttcgacgcgagcggcagcaggtcggcggcggcggcgtcggggaaccctctccgcgtgatcctgacgcgcgggttcgcgcggcaggtgctcgtggggcggtggttgacggtgttcgcgagcctgctcatcatggcgtcctccggcgcgacgtacatcttcgggagctactccggcacgctcaagtcgtcgctcgggtacgaccagcgcacgctcaacaccgtgtccttcttcaaggacctcggcgccaacctgggcgtcttctcggggctcatcaacgaggtgaccccgccgtgggtggtgctggccatgggcgccgccatgaacctgtccgggtacctcatggtgtacctggccgtgtccgggcgcaccgcgccgccgccgctgtggctcgtctgcctctacttcttcgtgggcgccaactcgcagtcgttcgccaacaccggcgcgctggtgacctgcgtcaagaacttccccgacagccgcggggtggtgctcggcatcctcaagggcttcgtcggcctcagcggcgccgtgtacacgcagctgtacctggccctgtacggcggcgacgacgccgagtcgctgatcctcctcgtcgcctggctccccgcggcggtgtccgtcgtgttcgtccacaccatccggtacatgccgtacccgcgccgccgtgggcaggagacgagctccgactccgaccccttcttctgcttcctctacctctccatcgcgctggcgtgcttcctcctcgtcatgatcgtggtgcagaagcaggtgcccttctcccgcgccgcgtacggcgtggccgccacgccgctgctcatcctcctcctcatgcccctcggcgtcgtcgtcaagcaggagtacaagatctaccgggagcgccagctcgacgccgccgacccgccgccgccgaccatcgtctccgcgtcggcaacggacgccatcaagaaaacagagcagcagccggcgtcgtcgtcgttctgtgggtgcgtgaggaccatgttccgtccgccggctcgtggggaggactacacgatcctgcaggcgctggtgagcgtggacatgctggtgctgttcgtggcgacaatctgcggcgtgggcgggacgctgacggcgatcgacaacatggggcagatcggggagtcgctgggctacccagccaggagcgtcaacacgttcgtgtccctgatcagcatctggaactacgcggggcgcgtgacggcgggctacgcctcggaggcggcgctggcccggtaccgcgtgccgcggccgctgctgctgacgggggtgctggcgctggcgtgcgcggggcacgtgctgatcgcgctgggcgcgccgcggtccctgtacgcggcgtcggtggtcgtcgggttctgcttcggcgcgcagtggccgctggtgttcgccatcatctcggaggtgttcgggctcaagtactactccacgctctacaacttgggcggcatggccagccccgtgggctcctacatcctgaacgtgcgcgtggcggggcggctctacgacgcggcggccgcgcggcagcgcggccgcggcaggatctgcctcggggtggagtgctaccggcggtcgttcctgatcgtcacggcggaccacggtggtcggcgcgctggtgtcgctcgtgctggtgtggcggacgtggacgttctacaggggcgacatctacgcgaggttccgggacggagacgagggcccggggcgggacgggcgcctgccggtcgaccagaaacgggaggaggagcagagggagaaggcggcggccaacggcaggaaggcgtgaggtggtgagcgggagcgggaaggcatggtcagggacgacgacgagtggggtgtacttgtacatgtgaatatagtactttttttgttgcattcacccgtgatgaccgacccttgttacctttcaaatttaaatagcctaaaaaaagccttcttgtccgtttcc

SEQ ID NO: 40986 - protein, 603 aa, Zea mays subsp. mays
  peptide (1)..(603): Ceres Seq. ID no. 13493252
  misc_feature (35)..(191): Pfam Name: and other Pfam Description: Sugar
  misc_feature (1)..(538): NCBI GI NO: 34394606 NR Description: putative nodule-specific protein
  misc_feature (27)..(538): NCBI GI NO: 37531482 NR Description: hypothetical protein
  misc_feature (30)..(538): NCBI GI NO: 15225053 NR Description: nodulin-related protein [Arabidopsis thaliana]
  misc_feature (34)..(538): NCBI GI NO: 15226338 NR Description: nodulin-related protein [Arabidopsis thaliana]
  misc_feature (25)..(538): NCBI GI NO: 3329366 NR Description: nodule-specific protein Nlj70 [Lotus japonicus]
  misc_feature (5)..(328): NCBI GI NO: 34897160 NR Description: putative nodule-specific protein
  misc_feature (230)..(538): NCBI GI NO: 34897160 NR Description: putative nodule-specific protein
  misc_feature (28)..(287): NCBI GI NO: 15221898 NR Description: hypothetical protein [Arabidopsis thaliana]
  misc_feature (348)..(538): NCBI GI NO: 15221898 NR Description: hypothetical protein [Arabidopsis thaliana]
  misc_feature (24)..(286): NCBI GI NO: 18395988 NR Description: expressed protein [Arabidopsis thaliana]
MVFDASGSRSAAAASGNPLRVILTRGFARQVLVGRWLTVFASLLIMASSGATYIFGSYSGTLKSSLGYDQRTLNTVSFFKDLGANLGVFSGLINEVTPPWVVLAMGAAMNLSGYLMVYLAVSGRTAPPPLWLVCLYFFVGANSQSFANTGALVTCVKNFPDSRGVVLGILKGFVGLSGAVYTQLYLALYGGDDAESLILLVAWLPAAVSVVFVHTIRYMPYPRRRGQETSSDSDPFFCFLYLSIALACFLLVMIVVQKQVPFSRAAYGVAATPLLILLLMPLGVVVKQEYKIYRERQLDAADPPPPTIVSASATDAIKKTEQQPASSSFCGCVRTMFRPPARGEDYTILQALVSVDMLVLFVATICGVGGTLTAIDNMGQIGESLGYPARSVNTFVSLISIWNYAGRVTAGYASEAALARYRVPRPLLLTGVLALACAGHVLIALGAPRSLYAASVVVGFCFGAQWPLVFAIISEVFGLKYYSTLYNLGGMASPVGSYILNVRVAGRLYDAAAARQRGRGRICLGVECYRRSFLIVTADHGGRRAGVARAGVADVDVLQGRHLREVPGRRRGPGAGRAPAGRPETGGGAEGEGGGQRQEGVRW

SEQ ID NO: 40987 - protein, 558 aa, Zea mays subsp. mays
  peptide (1)..(558): Ceres Seq. ID no. 13493253
  misc_feature (1)..(146): Pfam Name: and other Pfam Description: Sugar
  misc_feature (1)..(493): NCBI GI NO: 34394606 NR Description: putative nodule-specific protein
  misc_feature (1)..(493): NCBI GI NO: 37531482 NR Description: hypothetical protein
  misc_feature (1)..(493): NCBI GI NO: 15225053 NR Description: nodulin-related protein [Arabidopsis thaliana]
  misc_feature (1)..(493): NCBI GI NO: 15226338 NR Description: nodulin-related protein [Arabidopsis thaliana]
  misc_feature (1)..(493): NCBI GI NO: 3329366 NR Description: nodule-specific protein Nlj70 [Lotus japonicus]
  misc_feature (1)..(283): NCBI GI NO: 34897160 NR Description: putative nodule-specific protein
  misc_feature (185)..(493): NCBI GI NO: 34897160 NR Description: putative nodule-specific protein
  misc_feature (1)..(242): NCBI GI NO: 15221898 NR Description: hypothetical protein [Arabidopsis thaliana]
  misc_feature (303)..(493): NCBI GI NO: 15221898 NR Description: hypothetical protein [Arabidopsis thaliana]
  misc_feature (1)..(241): NCBI GI NO: 18395988 NR Description: expressed protein [Arabidopsis thaliana]
MASSGATYIFGSYSGTLKSSLGYDQRTLNTVSFFKDLGANLGVFSGLINEVTPPWVVLAMGAAMNLSGYLMVYLAVSGRTAPPPLWLVCLYFFVGANSQSFANTGALVTCVKNFPDSRGVVLGILKGFVGLSGAVYTQLYLALYGGDDAESLILLVAWLPAAVSVVFVHTIRYMPYPRRRGQETSSDSDPFFCFLYLSIALACFLLVMIVVQKQVPFSRAAYGVAATPLLILLLMPLGVVVKQEYKIYRERQLDAADPPPPTIVSASATDAIKKTEQQPASSSFCGCVRTMFRPPARGEDYTILQALVSVDMLVLFVATICGVGGTLTAIDNMGQIGESLGYPARSVNTFVSLISIWNYAGRVTAGYASEAALARYRVPRPLLLTGVLALACAGHVLIALGAPRSLYAASVVVGFCFGAQWPLVFAIISEVFGLKYYSTLYNLGGMASPVGSYILNVRVAGRLYDAAAARQRGRGRICLGVECYRRSFLIVTADHGGRRAGVARAGVADVDVLQGRHLREVPGRRRGPGAGRAPAGRPETGGGAEGEGGGQRQEGVRW

SEQ ID NO: 40988 - protein, 499 aa, Zea mays subsp. mays
  peptide (1)..(499): Ceres Seq. ID no. 13493254
  misc_feature (1)..(87): Pfam Name: and other Pfam Description: Sugar
  misc_feature (1)..(434): NCBI GI NO: 34394606 NR Description: putative nodule-specific protein
  misc_feature (1)..(434): NCBI GI NO: 37531482 NR Description: hypothetical protein
  misc_feature (1)..(434): NCBI GI NO: 15225053 NR Description: nodulin-related protein [Arabidopsis thaliana]
  misc_feature (1)..(434): NCBI GI NO: 15226338 NR Description: nodulin-related protein [Arabidopsis thaliana]
  misc_feature (1)..(434): NCBI GI NO: 3329366 NR Description: nodule-specific protein Nlj70 [Lotus japonicus]
  misc_feature (1)..(224): NCBI GI NO: 34897160 NR Description: putative nodule-specific protein
  misc_feature (126)..(434): NCBI GI NO: 34897160 NR Description: putative nodule-specific protein
  misc_feature (1)..(183): NCBI GI NO: 15221898 NR Description: hypothetical protein [Arabidopsis thaliana]
  misc_feature (244)..(434): NCBI GI NO: 15221898 NR Description: hypothetical protein [Arabidopsis thaliana]
  misc_feature (1)..(182): NCBI GI NO: 18395988 NR Description: expressed protein [Arabidopsis thaliana]
MGAAMNLSGYLMVYLAVSGRTAPPPLWLVCLYFFVGANSQSFANTGALVTCVKNFPDSRGVVLGILKGFVGLSGAVYTQLYLALYGGDDAESLILLVAWLPAAVSVVFVHTIRYMPYPRRRGQETSSDSDPFFCFLYLSIALACFLLVMIVVQKQVPFSRAAYGVAATPLLILLLMPLGVVVKQEYKIYRERQLDAADPPPPTIVSASATDAIKKTEQQPASSSFCGCVRTMFRPPARGEDYTILQALVSVDMLVLFVATICGVGGTLTAIDNMGQIGESLGYPARSVNTFVSLISIWNYAGRVTAGYASEAALARYRVPRPLLLTGVLALACAGHVLIALGAPRSLYAASVVVGFCFGAQWPLVFAIISEVFGLKYYSTLYNLGGMASPVGSYILNVRVAGRLYDAAAARQRGRGRICLGVECYRRSFLIVTADHGGRRAGVARAGVADVDVLQGRHLREVPGRRRGPGAGRAPAGRPETGGGAEGEGGGQRQEGVRW

SEQ ID NO: 40989 - DNA, 1663 bp, Zea mays subsp. mays
  misc_feature (1)..(1663): Ceres Seq. ID no. 12381819
actactggtagaactagagcttagaagtgccggttttccacgaggcgagcgcgcggtcatggggtcactgtcgacggcggaggggcagcggccgcacgccgtgtgcatgccgtacccggcgcagggccacgtgacgcccatgctcaagctcgccaagctcctccacgcgcggggcttccagatcaccttcgtcaacaccgagttcaaccaccgccgcctgctccactcgcgcgggcccgacgcgctcgaccgcgtgcccgggttccgcttcgacgccattcccgacggcctcccgccgtccgacgccgacgccacgcaggacatccccgcgctctgctactccaccatgaccacctgcctcccgcacctcctcgcgctcctcgccagggtcgacgccgacgccgggtccccgccggtcacctgcctcgtcgtggacgccgtcatgtcgttcggcttcgacgccgccaggcagatcggcgtgcccgtcgccgcgctctggaccgccagcgcctgcgggttcatgggctaccggaactacagaaacctcatcgactggggcctcgtgccattcaagagcgccgcggacctccaggacaacgtcggcggcggccacctcgccaccgtggtcaccggcgcgcgcggcatgtgcgacggcgtgcagctgcgcgacttccccaacttcatccgcaccacggaccgcgcggacttcatgttcaacttcctcatgcgcgagtccgagcggctgtcgctccccgacggcgtcatcgtcaacaccttcgaggacctcgagggagccacgctggacgccatgcgcgctatcctcccgacggtgtaccccgtcggcccgctcctcctccgcgagcgcctggagatccccgctagcagcccgctcgcggtcctcggctccaacctctggaaggaggaggaaggcctcctggagtggctcgctggccgcgcgccgcgatccgtggtgtacgtgaactacggcagcatcacggtgatgaccaactcgcagctgctcgagttcgcgtggggcctggccaacagcgggtacccgttcgtgtggaacatccggccggacctggtgaagggcgactccgccgtgctgccgccggagttcgcgtccgccgtcgagggccgcgcgttgctgacgacgtggtgcccgcaggaggcggcgatccagcatgaggcggtcggggtgttcctgactcactccggctggaactccaccctggagagcctctgcgcgggggtgcccatgctgagctggcccttcttcgcggagcagcagaccaactgccggtacaagcgcacggagtggggagtcgggatggagatcggcggcgaggtgcggcgcgacgaggtgacggtcgttctaaaggaggccatggacggggagaaggggagggagatgcgccggcgcgcagaggagtggaaggagaaggccgtgaaggtgacgctgccgggtgggcctgcggagactaacctcgagagggtcatccacgaggtgctgctctcccagaaaaagggatagactgccaacgcgtgatcgtcgtgggagtatcatgttcgggagcatcatgccttgcccctcgctttgctgtgttttcttatttacgtgtgttagctttgaataattaattatctcaactttcagctctcg

SEQ ID NO: 40990 - protein, 510 aa, Zea mays subsp. mays
  peptide (1)..(510): Ceres Seq. ID no. 12381820
  misc_feature (32)..(507): Pfam Name: Pfam Description:  UDP-glucoronosyl and UDP-glucosyl transferase
  misc_feature (20)..(506): NCBI GI NO: 38344776 NR Description: OSJNBb0026L04.7
  misc_feature (20)..(506): NCBI GI NO: 38569139 NR Description: OSJNBb0033P05.7
  misc_feature (26)..(509): NCBI GI NO: 38569140 NR Description: OSJNBb0033P05.8
  misc_feature (36)..(509): NCBI GI NO: 38344775 NR Description: OSJNBb0026L04.6
  misc_feature (26)..(508): NCBI GI NO: 38347667 NR Description: OSJNBa0054D14.2
  misc_feature (29)..(507): NCBI GI NO: 17065006 NR Description: UDP-glucose glucosyltransferase
  misc_feature (29)..(507): NCBI GI NO: 15219870 NR Description: UDP-glucose glucosyltransferase
  misc_feature (29)..(504): NCBI GI NO: 19911203 NR Description: glucosyltransferase-10 [Vigna angularis]
  misc_feature (20)..(507): NCBI GI NO: 25286821 NR Description: T16E15.2 protein - Arabidopsis thaliana
  misc_feature (20)..(508): NCBI GI NO: 15219876 NR Description: UDP-glucose glucosyltransferase, putative
LLVELELRSAGFPRGERAVMGSLSTAEGQRPHAVCMPYPAQGHVTPMLKLAKLLHARGFQITFVNTEFNHRRLLHSRGPDALDRVPGFRFDAIPDGLPPSDADATQDIPALCYSTMTTCLPHLLALLARVDADAGSPPVTCLVVDAVMSFGFDAARQIGVPVAALWTASACGFMGYRNYRNLIDWGLVPFKSAADLQDNVGGGHLATVVTGARGMCDGVQLRDFPNFIRTTDRADFMFNFLMRESERLSLPDGVIVNTFEDLEGATLDAMRAILPTVYPVGPLLLRERLEIPASSPLAVLGSNLWKEEEGLLEWLAGRAPRSVVYVNYGSITVMTNSQLLEFAWGLANSGYPFVWNIRPDLVKGDSAVLPPEFASAVEGRALLTTWCPQEAAIQHEAVGVFLTHSGWNSTLESLCAGVPMLSWPFFAEQQTNCRYKRTEWGVGMEIGGEVRRDEVTVVLKEAMDGEKGREMRRRAEEWKEKAVKVTLPGGPAETNLERVIHEVLLSQKKG

SEQ ID NO: 40991 - protein, 491 aa, Zea mays subsp. mays
  peptide (1)..(491): Ceres Seq. ID no. 12381821
  misc_feature (13)..(488): Pfam Name: Pfam Description:  UDP-glucoronosyl and UDP-glucosyl transferase
  misc_feature (1)..(487): NCBI GI NO: 38344776 NR Description: OSJNBb0026L04.7
  misc_feature (1)..(487): NCBI GI NO: 38569139 NR Description: OSJNBb0033P05.7
  misc_feature (7)..(490): NCBI GI NO: 38569140 NR Description: OSJNBb0033P05.8
  misc_feature (17)..(490): NCBI GI NO: 38344775 NR Description: OSJNBb0026L04.6
  misc_feature (7)..(489): NCBI GI NO: 38347667 NR Description: OSJNBa0054D14.2
  misc_feature (10)..(488): NCBI GI NO: 17065006 NR Description: UDP-glucose glucosyltransferase
  misc_feature (10)..(488): NCBI GI NO: 15219870 NR Description: UDP-glucose glucosyltransferase
  misc_feature (10)..(485): NCBI GI NO: 19911203 NR Description: glucosyltransferase-10 [Vigna angularis]
  misc_feature (1)..(488): NCBI GI NO: 25286821 NR Description: T16E15.2 protein - Arabidopsis thaliana
  misc_feature (1)..(489): NCBI GI NO: 15219876 NR Description: UDP-glucose glucosyltransferase, putative
MGSLSTAEGQRPHAVCMPYPAQGHVTPMLKLAKLLHARGFQITFVNTEFNHRRLLHSRGPDALDRVPGFRFDAIPDGLPPSDADATQDIPALCYSTMTTCLPHLLALLARVDADAGSPPVTCLVVDAVMSFGFDAARQIGVPVAALWTASACGFMGYRNYRNLIDWGLVPFKSAADLQDNVGGGHLATVVTGARGMCDGVQLRDFPNFIRTTDRADFMFNFLMRESERLSLPDGVIVNTFEDLEGATLDAMRAILPTVYPVGPLLLRERLEIPASSPLAVLGSNLWKEEEGLLEWLAGRAPRSVVYVNYGSITVMTNSQLLEFAWGLANSGYPFVWNIRPDLVKGDSAVLPPEFASAVEGRALLTTWCPQEAAIQHEAVGVFLTHSGWNSTLESLCAGVPMLSWPFFAEQQTNCRYKRTEWGVGMEIGGEVRRDEVTVVLKEAMDGEKGREMRRRAEEWKEKAVKVTLPGGPAETNLERVIHEVLLSQKKG

SEQ ID NO: 40992 - protein, 475 aa, Zea mays subsp. mays
  peptide (1)..(475): Ceres Seq. ID no. 12381822
  misc_feature (1)..(472): Pfam Name: Pfam Description:  UDP-glucoronosyl and UDP-glucosyl transferase
  misc_feature (1)..(471): NCBI GI NO: 38344776 NR Description: OSJNBb0026L04.7
  misc_feature (1)..(471): NCBI GI NO: 38569139 NR Description: OSJNBb0033P05.7
  misc_feature (1)..(474): NCBI GI NO: 38569140 NR Description: OSJNBb0033P05.8
  misc_feature (1)..(474): NCBI GI NO: 38344775 NR Description: OSJNBb0026L04.6
  misc_feature (1)..(473): NCBI GI NO: 38347667 NR Description: OSJNBa0054D14.2
  misc_feature (1)..(472): NCBI GI NO: 17065006 NR Description: UDP-glucose glucosyltransferase
  misc_feature (1)..(472): NCBI GI NO: 15219870 NR Description: UDP-glucose glucosyltransferase
  misc_feature (1)..(469): NCBI GI NO: 19911203 NR Description: glucosyltransferase-10 [Vigna angularis]
  misc_feature (1)..(472): NCBI GI NO: 25286821 NR Description: T16E15.2 protein - Arabidopsis thaliana
  misc_feature (1)..(473): NCBI GI NO: 15219876 NR Description: UDP-glucose glucosyltransferase, putative
MPYPAQGHVTPMLKLAKLLHARGFQITFVNTEFNHRRLLHSRGPDALDRVPGFRFDAIPDGLPPSDADATQDIPALCYSTMTTCLPHLLALLARVDADAGSPPVTCLVVDAVMSFGFDAARQIGVPVAALWTASACGFMGYRNYRNLIDWGLVPFKSAADLQDNVGGGHLATVVTGARGMCDGVQLRDFPNFIRTTDRADFMFNFLMRESERLSLPDGVIVNTFEDLEGATLDAMRAILPTVYPVGPLLLRERLEIPASSPLAVLGSNLWKEEEGLLEWLAGRAPRSVVYVNYGSITVMTNSQLLEFAWGLANSGYPFVWNIRPDLVKGDSAVLPPEFASAVEGRALLTTWCPQEAAIQHEAVGVFLTHSGWNSTLESLCAGVPMLSWPFFAEQQTNCRYKRTEWGVGMEIGGEVRRDEVTVVLKEAMDGEKGREMRRRAEEWKEKAVKVTLPGGPAETNLERVIHEVLLSQKKG

SEQ ID NO: 40993 - DNA, 1230 bp, Zea mays subsp. mays
  misc_feature (1)..(1230): Ceres Seq. ID no. 12360571
gcacgagaccattacctagaacatcctaatcgaaaagggaactagaattcgacgccgctgtggactggtcatggcgtgctaccgcgcatccacggcgccgacggcccaccgaggtctaggaaaaatagaatggttggtatggtagggtaggtgaaccggtgaagattagagggactgagggagagggaccgtgacaccgtgtctagccagccaacctgctgctctagcccacctgcatggcggtgtcagcgccggtcactctctgcccctcggattctcgctccctctcttccgcgctcgtttcttcccgatccaacaagccttcttcacttgatgctgttcggtcacggcggttgaatttgggagattcagctatgccaacgcagatctccacaaggcagtctcttcggtttgctttaccttcgaacaatgcacgtccaatatcgactgcagcaagaatgacatgttttgctaagaagcaacatattgctgccgtgcccttatgtactttggaggccaaaaggtatgaacctatagtcaaaatgtgtggcattacatctgccttcgatgctgagatggctttgaaggctggagctaaattaattgggatgattctttggcccaagtccaaacgctctatcccattgtctgaagctaaagagatatccagagtggccaaatcttacggggctgaatcagtgggtgtgtttgtggatgatgatagtagtactatcttgacagcatctgattcatgcaacctcgatcttatccagcttcatggagatagctcccgagaactacttcctctgctttggaagaacaacaggattatatatgtgctaaatgctgatgaggatggtaaacttatcaatgctcctccaagtgaggaatatgttcttgattggtttttggtggacagtgcaaaaggtggaagttgcaaagggttcaactgggaaaaattccaaatgccaactgttaaaagcaagaacgggtggttattagcaggaggccttcatgcagataatgttcacgaagccgcttctgctctaaagccaaatggcctggatgttagcagtggcatatgttttcctgacggtttacggaaagacccgaagagaatgtgttccttcatgagcagtgtaaaaactttgaatctcctctaacatactagtgctttattggtcgtagtttcttggtgcagtatgtggaaactgaataaatggcagtcct

SEQ ID NO: 40994 - protein, 308 aa, Zea mays subsp. mays
  peptide (1)..(308): Ceres Seq. ID no. 12360572
  misc_feature (101)..(301): Pfam Name: 5'phosphoribosyl Pfam Description: N-
  misc_feature (99)..(306): NCBI GI NO: 619749 NR Description: phosphoribosylanthranilate isomerase
  misc_feature (93)..(306): NCBI GI NO: 5031256 NR Description: phosphoribosylanthranilate isomerase
  misc_feature (93)..(306): NCBI GI NO: 5031254 NR Description: phosphoribosylanthranilate isomerase
  misc_feature (93)..(306): NCBI GI NO: 5031258 NR Description: phosphoribosylanthranilate isomerase
  misc_feature (93)..(306): NCBI GI NO: 15223003 NR Description: phosphoribosylanthranilate isomerase
  misc_feature (93)..(306): NCBI GI NO: 25407008 NR Description: hypothetical protein
  misc_feature (93)..(306): NCBI GI NO: 10178136 NR Description: phosphoribosylanthranilate isomerase
  misc_feature (93)..(306): NCBI GI NO: 30681012 NR Description: phosphoribosylanthranilate isomerase (PAI2)
  misc_feature (93)..(306): NCBI GI NO: 1403670 NR Description: phosphoribosylanthranilate isomerase
  misc_feature (93)..(304): NCBI GI NO: 5031261 NR Description: phosphoribosylanthranilate isomerase
MAVSAPVTLCPSDSRSLSSALVSSRSNKPSSLDAVRSRRLNLGDSAMPTQISTRQSLRFALPSNNARPISTAARMTCFAKKQHIAAVPLCTLEAKRYEPIVKMCGITSAFDAEMALKAGAKLIGMILWPKSKRSIPLSEAKEISRVAKSYGAESVGVFVDDDSSTILTASDSCNLDLIQLHGDSSRELLPLLWKNNRIIYVLNADEDGKLINAPPSEEYVLDWFLVDSAKGGSCKGFNWEKFQMPTVKSKNGWLLAGGLHADNVHEAASALKPNGLDVSSGICFPDGLRKDPKRMCSFMSSVKTLNLL

SEQ ID NO: 40995 - protein, 262 aa, Zea mays subsp. mays
  peptide (1)..(262): Ceres Seq. ID no. 12360573
  misc_feature (55)..(255): Pfam Name: 5'phosphoribosyl Pfam Description: N-
  misc_feature (53)..(260): NCBI GI NO: 619749 NR Description: phosphoribosylanthranilate isomerase
  misc_feature (47)..(260): NCBI GI NO: 5031256 NR Description: phosphoribosylanthranilate isomerase
  misc_feature (47)..(260): NCBI GI NO: 5031254 NR Description: phosphoribosylanthranilate isomerase
  misc_feature (47)..(260): NCBI GI NO: 5031258 NR Description: phosphoribosylanthranilate isomerase
  misc_feature (47)..(260): NCBI GI NO: 15223003 NR Description: phosphoribosylanthranilate isomerase
  misc_feature (47)..(260): NCBI GI NO: 25407008 NR Description: hypothetical protein
  misc_feature (47)..(260): NCBI GI NO: 10178136 NR Description: phosphoribosylanthranilate isomerase
  misc_feature (47)..(260): NCBI GI NO: 30681012 NR Description: phosphoribosylanthranilate isomerase (PAI2)
  misc_feature (47)..(260): NCBI GI NO: 1403670 NR Description: phosphoribosylanthranilate isomerase
  misc_feature (47)..(258): NCBI GI NO: 5031261 NR Description: phosphoribosylanthranilate isomerase
MPTQISTRQSLRFALPSNNARPISTAARMTCFAKKQHIAAVPLCTLEAKRYEPIVKMCGITSAFDAEMALKAGAKLIGMILWPKSKRSIPLSEAKEISRVAKSYGAESVGVFVDDDSSTILTASDSCNLDLIQLHGDSSRELLPLLWKNNRIIYVLNADEDGKLINAPPSEEYVLDWFLVDSAKGGSCKGFNWEKFQMPTVKSKNGWLLAGGLHADNVHEAASALKPNGLDVSSGICFPDGLRKDPKRMCSFMSSVKTLNLL

SEQ ID NO: 40996 - protein, 234 aa, Zea mays subsp. mays
  peptide (1)..(234): Ceres Seq. ID no. 12360574
  misc_feature (27)..(227): Pfam Name: 5'phosphoribosyl Pfam Description: N-
  misc_feature (25)..(232): NCBI GI NO: 619749 NR Description: phosphoribosylanthranilate isomerase
  misc_feature (19)..(232): NCBI GI NO: 5031256 NR Description: phosphoribosylanthranilate isomerase
  misc_feature (19)..(232): NCBI GI NO: 5031254 NR Description: phosphoribosylanthranilate isomerase
  misc_feature (19)..(232): NCBI GI NO: 5031258 NR Description: phosphoribosylanthranilate isomerase
  misc_feature (19)..(232): NCBI GI NO: 15223003 NR Description: phosphoribosylanthranilate isomerase
  misc_feature (19)..(232): NCBI GI NO: 25407008 NR Description: hypothetical protein
  misc_feature (19)..(232): NCBI GI NO: 10178136 NR Description: phosphoribosylanthranilate isomerase
  misc_feature (19)..(232): NCBI GI NO: 30681012 NR Description: phosphoribosylanthranilate isomerase (PAI2)
  misc_feature (19)..(232): NCBI GI NO: 1403670 NR Description: phosphoribosylanthranilate isomerase
  misc_feature (19)..(230): NCBI GI NO: 5031261 NR Description: phosphoribosylanthranilate isomerase
MTCFAKKQHIAAVPLCTLEAKRYEPIVKMCGITSAFDAEMALKAGAKLIGMILWPKSKRSIPLSEAKEISRVAKSYGAESVGVFVDDDSSTILTASDSCNLDLIQLHGDSSRELLPLLWKNNRIIYVLNADEDGKLINAPPSEEYVLDWFLVDSAKGGSCKGFNWEKFQMPTVKSKNGWLLAGGLHADNVHEAASALKPNGLDVSSGICFPDGLRKDPKRMCSFMSSVKTLNLL

SEQ ID NO: 40997 - DNA, 912 bp, Zea mays subsp. mays
  misc_feature (1)..(912): Ceres Seq. ID no. 12375830
aatcccctcccgccgcgtcacatcgccgccgtcctcgtgccccgttacctctaaaaccctagcggggagccggggatgaagatccagtgcaacgcgtgcggggccgcggaggcgcgggtgctgtgctgcgcggacgaggccccgctctgcgtcgcctgcgacgaggaggtgcacgccgccaacaagctcgccgggaagcaccagcgggtgccgctcctgacggacgccgccgtcgctgccgccgcggcggccccggccgtgcccaagtgcgacatctgtcaggaggcttctggatacttcttctgcctagaggaccgtgcactactttgtagagactgtgatgttgctatacacacagtgaattcctttgtttcagtacatcagagattcctgctaactggagttcaggtgggtcttgatcctgctgatccagttccacctattgctgaaaagcacgttaatgctgctggtggatcagtaaatcaaccagtgagacatcagccaaagagaagcccgacagttcaattttcagttgaagggagtgcttctgttcctactaaaaatgtaacaaatggagattgttcaaggcagaattttgtcccaacagccaggggagaagtggttgattggactatgaataatagtacaattcggtcagtagaatctccgcctaagtacatttcagaggaaagcccgacacttctgcaatctagccagaccacaacagtcttctccaaccaaattaatggcaacagtgatggggcctaccacttgtcattctcaggtggtaatgtgacagacagcctaccagattggcccgtggatgagttcttcagtaactcagaatatggtccaaactttggcttctccgagaatggttcttctaagggtgataacgctaagctggggggc

SEQ ID NO: 40998 - protein, 279 aa, Zea mays subsp. mays
  peptide (1)..(279): Ceres Seq. ID no. 12375831
  misc_feature (60)..(107): Pfam Name: Pfam Description:  B-box zinc finger
  misc_feature (1)..(278): NCBI GI NO: 7489603 NR Description: zinc-finger protein R2931 [imported] - rice
  misc_feature (1)..(129): NCBI GI NO: 18412037 NR Description: CONSTANS B-box zinc finger family protein
  misc_feature (184)..(278): NCBI GI NO: 18412037 NR Description: CONSTANS B-box zinc finger family protein
  misc_feature (1)..(129): NCBI GI NO: 17433085 NR Description: Zinc finger protein constans-like 7
  misc_feature (184)..(271): NCBI GI NO: 17433085 NR Description: Zinc finger protein constans-like 7
  misc_feature (1)..(278): NCBI GI NO: 34903708 NR Description: putative zinc-finger protein
  misc_feature (1)..(214): NCBI GI NO: 3618310 NR Description: zinc finger protein
  misc_feature (1)..(130): NCBI GI NO: 38344979 NR Description: OSJNBa0011L07.9
  misc_feature (1)..(160): NCBI GI NO: 3618314 NR Description: zinc finger protein
  misc_feature (1)..(112): NCBI GI NO: 15234983 NR Description: CONSTANS B-box zinc finger family protein
MKIQCNACGAAEARVLCCADEAPLCVACDEEVHAANKLAGKHQRVPLLTDAAVAAAAAAPAVPKCDICQEASGYFFCLEDRALLCRDCDVAIHTVNSFVSVHQRFLLTGVQVGLDPADPVPPIAEKHVNAAGGSVNQPVRHQPKRSPTVQFSVEGSASVPTKNVTNGDCSRQNFVPTARGEVVDWTMNNSTIRSVESPPKYISEESPTLLQSSQTTTVFSNQINGNSDGAYHLSFSGGNVTDSLPDWPVDEFFSNSEYGPNFGFSENGSSKGDNAKLGG

SEQ ID NO: 40999 - DNA, 478 bp, Zea mays subsp. mays
  misc_feature (1)..(478): Ceres Seq. ID no. 5761353
accaacaggaaaaaaggcccagaggcagtgccgtgaccgattcgagacgcaagagaaggatcgagacgaggcggcggttttccggggcagcatcgtctcggccacgaagatgtcttactcaaggggctcawgtgaaaggtatggatctcgctcaccttactcgagaagcacaaggtaccgaagtcgctctaggagtgtcgactctagtgatgctgaaaaccctgggaacaacctgtatgtgactggtttgtcggctcgtgtaacggatcgagatctggagaagcacttctccactgagggtgaggtgattgatgcaagcgttgtgtatgatccttggacaagggaatcacgggggtttggttttgttaccatggctgctgttaaagatgcagatcgctgcatcaaatatctggaccgtttctgtgttgcaaggtcgggtcataactgttgagaaggcaaagagaagacgaggtagaac

SEQ ID NO: 41000 - protein, 149 aa, Zea mays subsp. mays
  peptide (1)..(149): Ceres Seq. ID no. 5761354
  misc_feature (78)..(138): Pfam Name: a.k.a. RRM, RBD, or RNP domain Pfam Description: RNA recognition motif.
  misc_feature (59)..(139): NCBI GI NO: 34902002 NR Description: putative transformer serine/arginine-richribonucleoprotein
  misc_feature (37)..(138): NCBI GI NO: 18390758 NR Description: transformer serine/arginine-rich ribonucleoprotein
  misc_feature (37)..(138): NCBI GI NO: 28973767 NR Description: putative transformer-SR ribonucleoprotein
  misc_feature (64)..(138): NCBI GI NO: 8778550 NR Description: F22G5.31 [Arabidopsis thaliana]
  misc_feature (37)..(138): NCBI GI NO: 30680096 NR Description: transformer serine/arginine-rich ribonucleoprotein
  misc_feature (35)..(139): NCBI GI NO: 11275253 NR Description: transformer-2-like protein - liverwort
  misc_feature (36)..(139): NCBI GI NO: 40253470 NR Description: putative transformer-SR ribonucleoprotein
  misc_feature (36)..(139): NCBI GI NO: 7489207 NR Description: transformer-SR ribonucleoprotein - common tobacco
  misc_feature (45)..(131): NCBI GI NO: 40738429 NR Description: hypothetical protein AN6676.2
  misc_feature (19)..(138): NCBI GI NO: 1350820 NR Description: 30 kDa ribonucleoprotein, chloroplast precursor
  misc_feature (44)..(44): Xaa is any aa, unknown or other
PTGKKAQRQCRDRFETQEKDRDEAAVFRGSIVSATKMSYSRGSXERYGSRSPYSRSTRYRSRSRSVDSSDAENPGNNLYVTGLSARVTDRDLEKHFSTEGEVIDASVVYDPWTRESRGFGFVTMAAVKDADRCIKYLDRFCVARSGHNC

SEQ ID NO: 41001 - protein, 113 aa, Zea mays subsp. mays
  peptide (1)..(113): Ceres Seq. ID no. 5761355
  misc_feature (42)..(102): Pfam Name: a.k.a. RRM, RBD, or RNP domain Pfam Description: RNA recognition motif.
  misc_feature (23)..(103): NCBI GI NO: 34902002 NR Description: putative transformer serine/arginine-richribonucleoprotein
  misc_feature (1)..(102): NCBI GI NO: 18390758 NR Description: transformer serine/arginine-rich ribonucleoprotein
  misc_feature (1)..(102): NCBI GI NO: 28973767 NR Description: putative transformer-SR ribonucleoprotein
  misc_feature (28)..(102): NCBI GI NO: 8778550 NR Description: F22G5.31 [Arabidopsis thaliana]
  misc_feature (1)..(102): NCBI GI NO: 30680096 NR Description: transformer serine/arginine-rich ribonucleoprotein
  misc_feature (1)..(103): NCBI GI NO: 11275253 NR Description: transformer-2-like protein - liverwort
  misc_feature (1)..(103): NCBI GI NO: 40253470 NR Description: putative transformer-SR ribonucleoprotein
  misc_feature (1)..(103): NCBI GI NO: 7489207 NR Description: transformer-SR ribonucleoprotein - common tobacco
  misc_feature (9)..(95): NCBI GI NO: 40738429 NR Description: hypothetical protein AN6676.2
  misc_feature (1)..(102): NCBI GI NO: 1350820 NR Description: 30 kDa ribonucleoprotein, chloroplast precursor
  misc_feature (8)..(8): Xaa is any aa, unknown or other
MSYSRGSXERYGSRSPYSRSTRYRSRSRSVDSSDAENPGNNLYVTGLSARVTDRDLEKHFSTEGEVIDASVVYDPWTRESRGFGFVTMAAVKDADRCIKYLDRFCVARSGHNC

SEQ ID NO: 41002 - protein, 79 aa, Zea mays subsp. mays
  peptide (1)..(79): Ceres Seq. ID no. 5761356
  misc_feature (43)..(43): Xaa is any aa, unknown or other
QQEKRPRGSAVTDSRRKRRIETRRRFSGAASSRPRRCLTQGAXVKGMDLAHLTREAQGTEVALGVSTLVMLKTLGTTCM

SEQ ID NO: 41003 - DNA, 1433 bp, Zea mays subsp. mays
  misc_feature (1)..(1433): Ceres Seq. ID no. 12382332
gcacgagaccattacctagaacatcctaatcgaaaagaaccatccagaagcagccgcctcctgctcttaaaaaactctcgtctctggtcatccattccacacacccaacatcacgaaaccacgcgcagatccaaacgaacccgagcccttccaaaccctaagctcgcctcccctcccccccaaacaccaccgcgcacctatggcgaagtacggcgagggcgacaagcggtggatcgtggaggagcgcgccgacggcaccaacgtccacaactggcactgggcggagcgcgactgcctggagtggtcccgcgcgcggctctcttccctgctcgcgggcctcaccatcctcgacggcgagggcggcctcagtctccgcaccgtcgcgctcgacaagcttgatggcgaggcctacgtcaacatccgcaagggcaaggtcatcccggggtacgagctctcgctcaccctctcctgggaggccgaggccgcctcggagtccggagctgcgaaggtcaccggcaccgctgaggttccctacctcgccgacgagaacgccgacgaggaccccgacctccgcgtcaccgtgcgcggcgacgagacgcccctcgcgctccgcgccaaggacgccttcctctcccgcgggaaacccatggtgctcgagaagatccgggagttcgtcgctgccatggccaagggtggaccggccaaggacgagctggactccaagaaaactcccacgaaggtcgccggctccgcaccggcgaaggaggcggtactggctcctgcgccggctgtggagaagaaaaaggccaaggggaaggacaaggagggcttcaagaccattgagatgacggagaagttctactgccgctcaaaggacatatatgagatcttgatggatgagaacagatggaaagggtttacgcagagcaatgcgaggatcagcagagaggttggaggggaatttagcctcttcgacgggtccatcactggcgtcaacgaggagctgcaggaagggaagctgattgcacaaaagtggcggtttggaagctggcctgacggcttgtactcctcggtccggttggtgtttgatgagcccgagtctggagttacaatcataaagctcaaacaaactgatgtgccagaggaagacaagtatggaaattcaactgtggtagagaacaccgagagaggctggagagaactcatattccagcggatacgcggagtgttcggttttgggatctaaagaatctaaagaggcgatttggcatgaagttagatttcaaatttttacggggtcagaccatgcacgtcatagcaatccatgttttattcacccatttgttttccatgtccttaaacacagaacactgcatatcgtggggggtttaaaaacatctgttattcgaacgctgcaatgttgcttgctcccg

SEQ ID NO: 41004 - protein, 348 aa, Zea mays subsp. mays
  peptide (1)..(348): Ceres Seq. ID no. 12382333
  misc_feature (209)..(348): Pfam Name: Pfam Description:  Aha1 domain
  misc_feature (1)..(348): NCBI GI NO: 21539453 NR Description: unknown protein [Arabidopsis thaliana]
  misc_feature (1)..(348): NCBI GI NO: 18399461 NR Description: expressed protein; protein id: At3g12050
  misc_feature (89)..(348): NCBI GI NO: 30682028 NR Description: expressed protein [Arabidopsis thaliana]
  misc_feature (1)..(54): NCBI GI NO: 30682028 NR Description: expressed protein [Arabidopsis thaliana]
  misc_feature (1)..(347): NCBI GI NO: 40786381 NR Description: Bm44 [Bombyx mori]
  misc_feature (1)..(347): NCBI GI NO: 22122515 NR Description: cDNA sequence BC023857
  misc_feature (1)..(347): NCBI GI NO: 27370976 NR Description: Similar to chromosome 14 open reading frame 3
  misc_feature (1)..(347): NCBI GI NO: 26345022 NR Description: unnamed protein product [Mus musculus]
  misc_feature (1)..(347): NCBI GI NO: 6912280 NR Description: chromosome 14 open reading frame 3 [Homo sapiens]
  misc_feature (1)..(347): NCBI GI NO: 24585720 NR Description: CG1416-PA [Drosophila melanogaster]
MAKYGEGDKRWIVEERADGTNVHNWHWAERDCLEWSRARLSSLLAGLTILDGEGGLSLRTVALDKLDGEAYVNIRKGKVIPGYELSLTLSWEAEAASESGAAKVTGTAEVPYLADENADEDPDLRVTVRGDETPLALRAKDAFLSRGKPMVLEKIREFVAAMAKGGPAKDELDSKKTPTKVAGSAPAKEAVLAPAPAVEKKKAKGKDKEGFKTIEMTEKFYCRSKDIYEILMDENRWKGFTQSNARISREVGGEFSLFDGSITGVNEELQEGKLIAQKWRFGSWPDGLYSSVRLVFDEPESGVTIIKLKQTDVPEEDKYGNSTVVENTERGWRELIFQRIRGVFGFGI

SEQ ID NO: 41005 - protein, 199 aa, Zea mays subsp. mays
  peptide (1)..(199): Ceres Seq. ID no. 12382334
  misc_feature (60)..(199): Pfam Name: Pfam Description:  Aha1 domain
  misc_feature (1)..(199): NCBI GI NO: 21539453 NR Description: unknown protein [Arabidopsis thaliana]
  misc_feature (1)..(199): NCBI GI NO: 18399461 NR Description: expressed protein; protein id: At3g12050
  misc_feature (1)..(199): NCBI GI NO: 30682028 NR Description: expressed protein [Arabidopsis thaliana]
  misc_feature (1)..(198): NCBI GI NO: 40786381 NR Description: Bm44 [Bombyx mori]
  misc_feature (1)..(198): NCBI GI NO: 22122515 NR Description: cDNA sequence BC023857
  misc_feature (1)..(198): NCBI GI NO: 27370976 NR Description: Similar to chromosome 14 open reading frame 3
  misc_feature (1)..(198): NCBI GI NO: 26345022 NR Description: unnamed protein product [Mus musculus]
  misc_feature (1)..(198): NCBI GI NO: 6912280 NR Description: chromosome 14 open reading frame 3 [Homo sapiens]
  misc_feature (1)..(198): NCBI GI NO: 24585720 NR Description: CG1416-PA [Drosophila melanogaster]
  misc_feature (1)..(198): NCBI GI NO: 33416591 NR Description: Unknown (protein for MGC:66167) [Danio rerio]
MVLEKIREFVAAMAKGGPAKDELDSKKTPTKVAGSAPAKEAVLAPAPAVEKKKAKGKDKEGFKTIEMTEKFYCRSKDIYEILMDENRWKGFTQSNARISREVGGEFSLFDGSITGVNEELQEGKLIAQKWRFGSWPDGLYSSVRLVFDEPESGVTIIKLKQTDVPEEDKYGNSTVVENTERGWRELIFQRIRGVFGFGI

SEQ ID NO: 41006 - protein, 187 aa, Zea mays subsp. mays
  peptide (1)..(187): Ceres Seq. ID no. 12382335
  misc_feature (48)..(187): Pfam Name: Pfam Description:  Aha1 domain
  misc_feature (1)..(187): NCBI GI NO: 21539453 NR Description: unknown protein [Arabidopsis thaliana]
  misc_feature (1)..(187): NCBI GI NO: 18399461 NR Description: expressed protein; protein id: At3g12050
  misc_feature (1)..(187): NCBI GI NO: 30682028 NR Description: expressed protein [Arabidopsis thaliana]
  misc_feature (1)..(186): NCBI GI NO: 40786381 NR Description: Bm44 [Bombyx mori]
  misc_feature (1)..(186): NCBI GI NO: 22122515 NR Description: cDNA sequence BC023857
  misc_feature (1)..(186): NCBI GI NO: 27370976 NR Description: Similar to chromosome 14 open reading frame 3
  misc_feature (1)..(186): NCBI GI NO: 26345022 NR Description: unnamed protein product [Mus musculus]
  misc_feature (1)..(186): NCBI GI NO: 6912280 NR Description: chromosome 14 open reading frame 3 [Homo sapiens]
  misc_feature (1)..(186): NCBI GI NO: 24585720 NR Description: CG1416-PA [Drosophila melanogaster]
  misc_feature (1)..(186): NCBI GI NO: 33416591 NR Description: Unknown (protein for MGC:66167) [Danio rerio]
MAKGGPAKDELDSKKTPTKVAGSAPAKEAVLAPAPAVEKKKAKGKDKEGFKTIEMTEKFYCRSKDIYEILMDENRWKGFTQSNARISREVGGEFSLFDGSITGVNEELQEGKLIAQKWRFGSWPDGLYSSVRLVFDEPESGVTIIKLKQTDVPEEDKYGNSTVVENTERGWRELIFQRIRGVFGFGI

SEQ ID NO: 41007 - DNA, 1211 bp, Zea mays subsp. mays
  misc_feature (1)..(1211): Ceres Seq. ID no. 12390281
gcacgagaccattacctagaacatcctaatcgaaaaacccaaacgaatattatagaagctggctgaaaagctgagtgtttggcagtccgcagtagcttttggtggccagtagcttttggaaatggactccattgtcggttgtcgcctctgaccgtaccacctctgttacctgcaccgccgctccgttaaatcgcggcccgatcgccgatgcctccccgccccgtcccactattctctcgcctgcgcttccgcctcccgagttgcgccgccgtctccatctccacccctccatcctccgcggcgcccctgcactacggccatcgcactcccctcgctagcccttttcctctgtccccaccttgcccgcgcatcctccgtgcggccgtcgcggtttcttcgctggatctgcgcccgatcaccggcgggttcgcgctattcagcatggctgctgcctcctccgccacctccgtccacgacttcaccgtcaaggatgctagcgggaaagatgtggaccttagcacctataaggggaaggttctgctcatagtcaatgttgcatctcagtgtggcttaaccaattccaactacacagagctgagccagttgtatgagaagtacaaggaccagggttttgagatccttgcattcccatgcaaccagttcggtgggcaggagcctggcactaatgaggagattgtccagtttgcttgtactcgcttcaaggctgagtatccaattttcgacaaggttgatgtcaatggtgacaatactgcacccatttacaagttcctgaagtccagcaaaggtagtctctttggcgataacataaaatggaacttctccaaattcttggttgacaaagaggggcatgttgtggagcggtatgcaccaacaacttccccactgagcatcgagaaggacatcaagaaactactagggagttattaaaccttgtaattggattcagtagccctaccaaactgctgctttgcatcgagcacctgatgcctcagtagcgttttaataaagttgtttttataaccgagatgttttgtatttcttctgtattccctgctttgtggtaaatgtcatgtaataaaaatgatgcaatccacgatttatcttgaaaggttatgtatccaggtcggttgttatgagatatttgagaaatgagttttggcatgggggcatatcttgcgtacctgcctacc

SEQ ID NO: 41008 - protein, 246 aa, Zea mays subsp. mays
  peptide (1)..(246): Ceres Seq. ID no. 12390282
  misc_feature (87)..(196): Pfam Name: Pfam Description:  Glutathione peroxidase
  misc_feature (1)..(245): NCBI GI NO: 6179600 NR Description: GPX12Hv, glutathione peroxidase-like protein
  misc_feature (79)..(246): NCBI GI NO: 22268405 NR Description: putative glutathione peroxidase [Zea mays]
  misc_feature (80)..(245): NCBI GI NO: 27544804 NR Description: phospholipid hydroperoxide glutathione peroxidase-like
  misc_feature (79)..(245): NCBI GI NO: 34334012 NR Description: cytosolic glutathione peroxidase
  misc_feature (79)..(243): NCBI GI NO: 6179604 NR Description: glutathione peroxidase-like protein GPX54Hv
  misc_feature (79)..(245): NCBI GI NO: 21360380 NR Description: glutathione peroxidase 1 [Oryza sativa]
  misc_feature (79)..(245): NCBI GI NO: 38345591 NR Description: OSJNBb0012E24.9
  misc_feature (78)..(244): NCBI GI NO: 30681827 NR Description: glutathione peroxidase, putative
  misc_feature (79)..(244): NCBI GI NO: 20138157 NR Description: Probable phospholipid hydroperoxide glutathioneperoxidase
  misc_feature (81)..(243): NCBI GI NO: 544437 NR Description: Probable phospholipid hydroperoxide glutathioneperoxidase
MPPRPVPLFSRLRFRLPSCAAVSISTPPSSAAPLHYGHRTPLASPFPLSPPCPRILRAAVAVSSLDLRPITGGFALFSMAAASSATSVHDFTVKDASGKDVDLSTYKGKVLLIVNVASQCGLTNSNYTELSQLYEKYKDQGFEILAFPCNQFGGQEPGTNEEIVQFACTRFKAEYPIFDKVDVNGDNTAPIYKFLKSSKGSLFGDNIKWNFSKFLVDKEGHVVERYAPTTSPLSIEKDIKKLLGSY

SEQ ID NO: 41009 - protein, 168 aa, Zea mays subsp. mays
  peptide (1)..(168): Ceres Seq. ID no. 12390283
  misc_feature (9)..(118): Pfam Name: Pfam Description:  Glutathione peroxidase
  misc_feature (1)..(167): NCBI GI NO: 6179600 NR Description: GPX12Hv, glutathione peroxidase-like protein
  misc_feature (1)..(168): NCBI GI NO: 22268405 NR Description: putative glutathione peroxidase [Zea mays]
  misc_feature (2)..(167): NCBI GI NO: 27544804 NR Description: phospholipid hydroperoxide glutathione peroxidase-like
  misc_feature (1)..(167): NCBI GI NO: 34334012 NR Description: cytosolic glutathione peroxidase
  misc_feature (1)..(165): NCBI GI NO: 6179604 NR Description: glutathione peroxidase-like protein GPX54Hv
  misc_feature (1)..(167): NCBI GI NO: 21360380 NR Description: glutathione peroxidase 1 [Oryza sativa]
  misc_feature (1)..(167): NCBI GI NO: 38345591 NR Description: OSJNBb0012E24.9
  misc_feature (1)..(166): NCBI GI NO: 30681827 NR Description: glutathione peroxidase, putative
  misc_feature (1)..(166): NCBI GI NO: 20138157 NR Description: Probable phospholipid hydroperoxide glutathioneperoxidase
  misc_feature (3)..(165): NCBI GI NO: 544437 NR Description: Probable phospholipid hydroperoxide glutathioneperoxidase
MAAASSATSVHDFTVKDASGKDVDLSTYKGKVLLIVNVASQCGLTNSNYTELSQLYEKYKDQGFEILAFPCNQFGGQEPGTNEEIVQFACTRFKAEYPIFDKVDVNGDNTAPIYKFLKSSKGSLFGDNIKWNFSKFLVDKEGHVVERYAPTTSPLSIEKDIKKLLGSY

SEQ ID NO: 41010 - DNA, 993 bp, Zea mays subsp. mays
  misc_feature (1)..(993): Ceres Seq. ID no. 12362418
attgatttagaaccgctcgcgatacggctgaagaatttggggacgcttacgccgtgcgcgcacgcgtccaagtcgccgtcatgacgccattgcctgccgtgccgtggcccgagatgtttcctacggccgggatcacaggtgtcgcgcgcaggccggaaaagggcaggcccccaaggactctgcgccggcaccgcgccaacaaaccccgtggctctggcgtgcggacggccggccggacgtgccgtcgagtcgaagcggcagcgctcgtctcgacccgtcgtcgaccccccgtgccgcagccagatcggcctgatgagttggaaagggtagaatcagcaggtggcagggtcattaactggatggggtaccgtgtcctgggtgtgcttgcgacatcaaggtcaattggtgactattacatgaagccattcatatcagcggaaccagaggtgactgtcacagagcgcacgcacagggacgagttcatcatcctggcgagcgacgggctgtgggacgtcatgtccaacgaggtggcctgcagggtcgcgaagagctgtctgtgcgggcgcgcggcttccaagtgccctgacaccatccgcgggagctcggccagtgatgccgccgcggtgctggtggagttcgccatgtcgcggggcagcactgacaacatcagcgtcgtggtggtggagctgaaacgtctgaagaggtggaagggtggcagtagacagaacggtcggacgtagcctggccctgtaggagtctccggctcgtcgcgaaatatatgcatggcgacggagctctagggaagcagccgagcatatgacggaatggtgtaaaaagaagaagaagaagaagaagagagggttctgactcttgagagctatacctatgctgtgaccaggtgagtgtaggagctgctcgtagctttgccgttgtattgcgttggttacttggttctttagttcaatcaatactaacaaaatggcgttccgggcc

SEQ ID NO: 41011 - protein, 219 aa, Zea mays subsp. mays
  peptide (1)..(219): Ceres Seq. ID no. 12362419
  misc_feature (73)..(195): Pfam Name: Pfam Description:  Protein phosphatase 2C
  misc_feature (73)..(204): NCBI GI NO: 4336434 NR Description: nodule-enhanced protein phosphatase type 2C
  misc_feature (73)..(158): NCBI GI NO: 34908256 NR Description: putative protein phosphatase 2C
  misc_feature (175)..(205): NCBI GI NO: 34908256 NR Description: putative protein phosphatase 2C
  misc_feature (73)..(213): NCBI GI NO: 15229745 NR Description: protein phosphatase 2C
  misc_feature (54)..(159): NCBI GI NO: 15222398 NR Description: protein phosphatase 2C
  misc_feature (54)..(159): NCBI GI NO: 21537020 NR Description: protein phosphatase 2C, putative
  misc_feature (171)..(208): NCBI GI NO: 15222398 NR Description: protein phosphatase 2C
  misc_feature (171)..(208): NCBI GI NO: 21537020 NR Description: protein phosphatase 2C, putative
  misc_feature (54)..(162): NCBI GI NO: 15237839 NR Description: protein phosphatase 2C
  misc_feature (54)..(162): NCBI GI NO: 16226419 NR Description: AT5g59220/mnc17_110 [Arabidopsis thaliana]
MTPLPAVPWPEMFPTAGITGVARRPEKGRPPRTLRRHRANKPRGSGVRTAGRTCRRVEAAALVSTRRRPPVPQPDRPDELERVESAGGRVINWMGYRVLGVLATSRSIGDYYMKPFISAEPEVTVTERTHRDEFIILASDGLWDVMSNEVACRVAKSCLCGRAASKCPDTIRGSSASDAAAVLVEFAMSRGSTDNISVVVVELKRLKRWKGGSRQNGRT

SEQ ID NO: 41012 - protein, 208 aa, Zea mays subsp. mays
  peptide (1)..(208): Ceres Seq. ID no. 12362420
  misc_feature (62)..(184): Pfam Name: Pfam Description:  Protein phosphatase 2C
  misc_feature (62)..(193): NCBI GI NO: 4336434 NR Description: nodule-enhanced protein phosphatase type 2C
  misc_feature (62)..(147): NCBI GI NO: 34908256 NR Description: putative protein phosphatase 2C
  misc_feature (164)..(194): NCBI GI NO: 34908256 NR Description: putative protein phosphatase 2C
  misc_feature (62)..(202): NCBI GI NO: 15229745 NR Description: protein phosphatase 2C
  misc_feature (43)..(148): NCBI GI NO: 15222398 NR Description: protein phosphatase 2C
  misc_feature (43)..(148): NCBI GI NO: 21537020 NR Description: protein phosphatase 2C, putative
  misc_feature (160)..(197): NCBI GI NO: 15222398 NR Description: protein phosphatase 2C
  misc_feature (160)..(197): NCBI GI NO: 21537020 NR Description: protein phosphatase 2C, putative
  misc_feature (43)..(151): NCBI GI NO: 15237839 NR Description: protein phosphatase 2C
  misc_feature (43)..(151): NCBI GI NO: 16226419 NR Description: AT5g59220/mnc17_110 [Arabidopsis thaliana]
MFPTAGITGVARRPEKGRPPRTLRRHRANKPRGSGVRTAGRTCRRVEAAALVSTRRRPPVPQPDRPDELERVESAGGRVINWMGYRVLGVLATSRSIGDYYMKPFISAEPEVTVTERTHRDEFIILASDGLWDVMSNEVACRVAKSCLCGRAASKCPDTIRGSSASDAAAVLVEFAMSRGSTDNISVVVVELKRLKRWKGGSRQNGRT

SEQ ID NO: 41013 - protein, 126 aa, Zea mays subsp. mays
  peptide (1)..(126): Ceres Seq. ID no. 12362421
  misc_feature (1)..(102): Pfam Name: Pfam Description:  Protein phosphatase 2C
  misc_feature (1)..(111): NCBI GI NO: 4336434 NR Description: nodule-enhanced protein phosphatase type 2C
  misc_feature (1)..(65): NCBI GI NO: 34908256 NR Description: putative protein phosphatase 2C
  misc_feature (82)..(112): NCBI GI NO: 34908256 NR Description: putative protein phosphatase 2C
  misc_feature (1)..(120): NCBI GI NO: 15229745 NR Description: protein phosphatase 2C
  misc_feature (1)..(66): NCBI GI NO: 15222398 NR Description: protein phosphatase 2C
  misc_feature (1)..(66): NCBI GI NO: 21537020 NR Description: protein phosphatase 2C, putative
  misc_feature (78)..(115): NCBI GI NO: 15222398 NR Description: protein phosphatase 2C
  misc_feature (78)..(115): NCBI GI NO: 21537020 NR Description: protein phosphatase 2C, putative
  misc_feature (1)..(69): NCBI GI NO: 15237839 NR Description: protein phosphatase 2C
  misc_feature (1)..(69): NCBI GI NO: 16226419 NR Description: AT5g59220/mnc17_110 [Arabidopsis thaliana]
MGYRVLGVLATSRSIGDYYMKPFISAEPEVTVTERTHRDEFIILASDGLWDVMSNEVACRVAKSCLCGRAASKCPDTIRGSSASDAAAVLVEFAMSRGSTDNISVVVVELKRLKRWKGGSRQNGRT

SEQ ID NO: 41014 - DNA, 477 bp, Zea mays subsp. mays
  misc_feature (1)..(477): Ceres Seq. ID no. 1853217
tcaccgtcccacaccagtgtcggcgagtccctcctgtgcctcgtcctccccctttcccctccgagtccagcccggcgccacccactcagccgcggatccgaggcgcagatccgatccggcgatggcgtccacggcggcgaggcggctgcgggagctgcaggcgcagacggggaacaagacctgcgtggactgcgcgcagcggaacccgcagtgggcgagcgtctcctatggggtgttcatgtgcctcgagtgctcgggcaagcaccggggcctcggcgtgcacatcagcttcgtgcgctcggtcaccatggactcctggaccgaggcgcagctccgcaagatggaggccggtggcaacgaccgactcaacgccttcctcacagctcgcggcgttcctaaggagacgccccacgtcgccaagtacaactccaacgccgcagccgcctaccgcgaccgcatcgccgcgctcgctgaggg

SEQ ID NO: 41015 - protein, 132 aa, Zea mays subsp. mays
  peptide (1)..(132): Ceres Seq. ID no. 1853218
SPSHTSVGESLLCLVLPLSPPSPARRHPLSRGSEAQIRSGDGVHGGEAAAGAAGADGEQDLRGLRAAEPAVGERLLWGVHVPRVLGQAPGPRRAHQLRALGHHGLLDRGAAPQDGGRWQRPTQRLPHSSRRS

SEQ ID NO: 41016 - protein, 158 aa, Zea mays subsp. mays
  peptide (1)..(158): Ceres Seq. ID no. 1853219
  misc_feature (46)..(157): Pfam Name: Pfam Description:  Putative GTPase activating protein for Arf
  misc_feature (45)..(157): NCBI GI NO: 15224315 NR Description: putative ADP ribosylation factor 1 GTPaseactivating protein
  misc_feature (45)..(157): NCBI GI NO: 10441356 NR Description: ARF GAP-like zinc finger-containing protein ZIGA2
  misc_feature (45)..(157): NCBI GI NO: 15231865 NR Description: putative protein; protein id: At3g53710.1
  misc_feature (41)..(157): NCBI GI NO: 31217790 NR Description: ENSANGP00000004294 [Anopheles gambiae]
  misc_feature (41)..(157): NCBI GI NO: 2286211 NR Description: putative ARF1 GTPase activating protein
  misc_feature (41)..(157): NCBI GI NO: 24663283 NR Description: GTPase-activating protein 69C CG4237-PA
  misc_feature (41)..(157): NCBI GI NO: 21489979 NR Description: ADP-ribosylation factor 1 GTPase activating
  misc_feature (41)..(157): NCBI GI NO: 26326517 NR Description: unnamed protein product [Mus musculus]
  misc_feature (41)..(157): NCBI GI NO: 31542139 NR Description: ADP-ribosylation factor GTPase activating protein1
  misc_feature (41)..(157): NCBI GI NO: 8922652 NR Description: ADP-ribosylation factor GTPase activating protein 1isoform a
HRPTPVSASPSCASSSPFPLRVQPGATHSAADPRRRSDPAMASTAARRLRELQAQTGNKTCVDCAQRNPQWASVSYGVFMCLECSGKHRGLGVHISFVRSVTMDSWTEAQLRKMEAGGNDRLNAFLTARGVPKETPHVAKYNSNAAAAYRDRIAALAE

SEQ ID NO: 41017 - protein, 158 aa, Zea mays subsp. mays
  peptide (1)..(158): Ceres Seq. ID no. 1853220
  misc_feature (44)..(157): Pfam Name: Pfam Description:  Cupin
TVPHQCRRVPPVPRPPPFPSESSPAPPTQPRIRGADPIRRWRPRRRGGCGSCRRRRGTRPAWTARSGTRSGRASPMGCSCASSARASTGASACTSASCARSPWTPGPRRSSARWRPVATTDSTPSSQLAAFLRRRPTSPSTTPTPQPPTATASPRSLR

SEQ ID NO: 41018 - protein, 118 aa, Zea mays subsp. mays
  peptide (1)..(118): Ceres Seq. ID no. 2059170
  misc_feature (6)..(117): Pfam Name: Pfam Description:  Putative GTPase activating protein for Arf
  misc_feature (5)..(117): NCBI GI NO: 15224315 NR Description: putative ADP ribosylation factor 1 GTPaseactivating protein
  misc_feature (5)..(117): NCBI GI NO: 10441356 NR Description: ARF GAP-like zinc finger-containing protein ZIGA2
  misc_feature (5)..(117): NCBI GI NO: 15231865 NR Description: putative protein; protein id: At3g53710.1
  misc_feature (1)..(117): NCBI GI NO: 31217790 NR Description: ENSANGP00000004294 [Anopheles gambiae]
  misc_feature (1)..(117): NCBI GI NO: 2286211 NR Description: putative ARF1 GTPase activating protein
  misc_feature (1)..(117): NCBI GI NO: 24663283 NR Description: GTPase-activating protein 69C CG4237-PA
  misc_feature (1)..(117): NCBI GI NO: 21489979 NR Description: ADP-ribosylation factor 1 GTPase activating
  misc_feature (1)..(117): NCBI GI NO: 26326517 NR Description: unnamed protein product [Mus musculus]
  misc_feature (1)..(117): NCBI GI NO: 31542139 NR Description: ADP-ribosylation factor GTPase activating protein1
  misc_feature (1)..(117): NCBI GI NO: 8922652 NR Description: ADP-ribosylation factor GTPase activating protein 1isoform a
MASTAARRLRELQAQTGNKTCVDCAQRNPQWASVSYGVFMCLECSGKHRGLGVHISFVRSVTMDSWTEAQLRKMEAGGNDRLNAFLTARGVPKETPHVAKYNSNAAAAYRDRIAALAE

SEQ ID NO: 41019 - DNA, 1355 bp, Zea mays subsp. mays
  misc_feature (1)..(1355): Ceres Seq. ID no. 15180828
gatagttacgcgaccaactggttcacaacattgcgcaaaacaaagcagagcatagcatcacagttcacagcagcgcgcggaggcaaggcgcacaacagcgtgcggtggcgcggcgtgcagagcagccgcgcgagcgaagctagtagcgccgcacggaatcgcagagaaggaagtggggagggttaccggcgtcgacgagcgagcaggctctaggtgcgatttactcgtgcagaagctccgacaactatttctgaattacctggactggtttgtgacgatatctctggagggcaagaaaacattccgattcctgccactaacttggttatgatccacctgttcctccatctggtttcacatacttgaagtctctaaaaattccaaaggacatcaagatcccatctagtattattggctgtgattgtgaaggagattgtgctagcaacaaaaattgttcatgtgctcagcgcaatggttctgatctgccttatgtatcatataagaacattggcaggttggtggagcccaaagcagttgtatttgaatgcggggctaactgcagctgcaaccatgattgtgtaaacagaacatctcaacagggttgcagtatcacttagaggtatttaagacagcttcaaaaggttggggagtcaggacttgggacactatcctccctggggctcccatctgtgagtacacgggggtgttgaggaggactgaagatctggatggttcacagaacaaccattgttttgacattgattgtcttcaaaccatgaaaggtttggatggaagggagaaaagagctggatctgaaatgcacctgcctaatctttatccagagaatgactcagatgcaccacctgcacctgagtactgcatagacggcagttccattggcaattttgcaagatttataaatcatagttgccaacctaaccttttcgtccagtgcgtcatgagctcacacaacgatgttaaactagcaaaagtgatgctttttgctgctgacacaatacttcctcttcaggagctatcctatgactacggttatcgcttggacagtgttgttgggcctgatggtaaaattgtgaagctgccatgccactgtggtgctccagattgccggaagcgcctctactagacctgcagtgtgtttccattttgattttgcaggaaacaacctatattgtaggaaagcattcatgttatttatgtagttggcatgctctgatatatagcgaaagaggagcaacttaatctccttttagagcattcttattttgtgataattggaggacatgctggtcatggtagcatattttgcaggaaatcaattaactgatatgtctggg

SEQ ID NO: 41020 - protein, 122 aa, Zea mays subsp. mays; identical to SEQ ID NO: 36383
  peptide (1)..(122): Ceres Seq. ID no. 15180829
  misc_feature (1)..(99): Pfam Name: Pfam Description:  SET domain
  misc_feature (1)..(122): NCBI GI NO: 22121716 NR Description: SET domain-containing protein SET118 [Zea mays]
  misc_feature (1)..(122): NCBI GI NO: 34907056 NR Description: putative SUVH4
  misc_feature (1)..(122): NCBI GI NO: 15240758 NR Description: SET-domain transcriptional regulator family
  misc_feature (1)..(122): NCBI GI NO: 27502110 NR Description: SET domain histone methyltransferase SUVH4
  misc_feature (1)..(122): NCBI GI NO: 13517749 NR Description: SUVH4 [Arabidopsis thaliana]
  misc_feature (1)..(122): NCBI GI NO: 25412134 NR Description: similar to mammalian MHC III region protein G9a
  misc_feature (1)..(122): NCBI GI NO: 17529178 NR Description: putative mammalian MHC III region protein G9a
  misc_feature (1)..(122): NCBI GI NO: 30681803 NR Description: SET-domain transcriptional regulator family
  misc_feature (1)..(118): NCBI GI NO: 18410265 NR Description: SET-domain transcriptional regulator family
  misc_feature (1)..(118): NCBI GI NO: 13517747 NR Description: SUVH3 [Arabidopsis thaliana]

SEQ ID NO: 41021 - protein, 108 aa, Zea mays subsp. mays
  peptide (1)..(108): Ceres Seq. ID no. 15180830
  misc_feature (1)..(85): Pfam Name: Pfam Description:  SET domain
  misc_feature (1)..(108): NCBI GI NO: 22121716 NR Description: SET domain-containing protein SET118 [Zea mays]
  misc_feature (1)..(108): NCBI GI NO: 34907056 NR Description: putative SUVH4
  misc_feature (1)..(108): NCBI GI NO: 15240758 NR Description: SET-domain transcriptional regulator family
  misc_feature (1)..(108): NCBI GI NO: 27502110 NR Description: SET domain histone methyltransferase SUVH4
  misc_feature (1)..(108): NCBI GI NO: 13517749 NR Description: SUVH4 [Arabidopsis thaliana]
  misc_feature (1)..(108): NCBI GI NO: 25412134 NR Description: similar to mammalian MHC III region protein G9a
  misc_feature (1)..(108): NCBI GI NO: 17529178 NR Description: putative mammalian MHC III region protein G9a
  misc_feature (1)..(108): NCBI GI NO: 30681803 NR Description: SET-domain transcriptional regulator family
  misc_feature (1)..(104): NCBI GI NO: 18410265 NR Description: SET-domain transcriptional regulator family
  misc_feature (1)..(104): NCBI GI NO: 13517747 NR Description: SUVH3 [Arabidopsis thaliana]
MHLPNLYPENDSDAPPAPEYCIDGSSIGNFARFINHSCQPNLFVQCVMSSHNDVKLAKVMLFAADTILPLQELSYDYGYRLDSVVGPDGKIVKLPCHCGAPDCRKRLY

SEQ ID NO: 41022 - protein, 70 aa, Zea mays subsp. mays
  peptide (1)..(70): Ceres Seq. ID no. 15180831
DSYATNWFTTLRKTKQSIASQFTAARGGKAHNSVRWRGVQSSRASEASSAARNRREGSGEGYRRRRASRL

SEQ ID NO: 41023 - DNA, 1824 bp, Zea mays subsp. mays
  misc_feature (1)..(1824): Ceres Seq. ID no. 12419130
aggccgccccgcctgccttgctctcccagcgcgctcgtgtagtcgtcgccatcttcgcttctcttctccacatttctgcgctatcccggcgtacggctgcgatccatacacgcccaatccaaaccctacctaaaactccgcctcgtgcctccgggctcacactcgtaggcacggagtgccgttccgtggtgggtggaatcaccaaaaatgccctccgtccaccaccacctcctcctcctgacgctcgccgccttggccgtggcggcagccaccgctagcgccggcggggacccgccggcaatcgaggcgcagttcgacgcctggtgcgcggagcacgggaaggcctacgccacgcccgaggagcgcgccgcgcggctggccgtgttcgcggacaacgccgccttcgtcgccgcgcacaacgcccgtgcaggcgccaacgccgctggcggcggcggcggcggcgccgcgcccccgtcctacacgctcgcgctcaacgccttcgcggacctcacgcacgaggagttccgcgccgcgcgcctcggccgcatcgcgccgggggcggcgctccggagccgcgccgcgcccgtgtactggggcctcggcggcggtgccgcggtgcctgatgcgctggactggaggaagagcggggccgtcaccaaggtcaaggaccaaggcagctgcggagcttgttggagtttttccgcaacaggtgctatggaaggaataaacaaaataaagacaggctctctggtcagtctttctgaacaggaactaattgactgtgacagatcttataatagtggctgtggtggtggcctcatggattatgcttataagtttgtgataaaaaatggtggaattgacacagaggaggactacccctatcgtgaagcagatgggacatgtaacaagaacaagctgaaaaagcgagttgtgactattgatggttacactgatgtaccttccaacaaagaagatttgttacttcaggctgttgcccagcaacctgttagtgtaggaatatgtggtagcgctagagcatttcagttatactaccagggtatctttgatggtccatgtccgacatctcttgatcatgctgtgttaatcgttggctatggttctgaaggtggcaaggattactggattgtgaaaaactcttggggtgaaagttggggaatgaagggctatatgcatatgcatcgaaacactggtgattccaagggtgtctgcggtataaacatgatggcatcatttcctaccaaaacaagcccgaatcctcctccttcaccaggcccaggtcctaccaaatgcagtctgctcacatactgtcctgagggatccacctgttgttgctcatggcgtgtcttgggcttttgcctttcctggagctgttgcgaactggacaatgcagtttgctgcaaggataaccggtactgctgccctcatgactatcctgtttgtgatacaggtcgcgggcagtgtctcaaggccagcggcaacttctctgctatagaaggaatcaggaggaaacagtctttctctaaagctccctcgtggactggctggctggagttgatggaccaatgagcgtataatcagacatggatagtagcttcatgcaagttgtgcgatccgtaggtcggtcattggccttgttccagtgccctgccacattcctgtacgcctactgcccgctgcgttgcaccgagatgcccttattttctctttattattgaaccctatggtgtaaagtttcacgattgtacatgtatgtcacacttgtattggcctatgcattagacgtctccattagtttacctt

SEQ ID NO: 41024 - protein, 460 aa, Zea mays subsp. mays
  peptide (1)..(460): Ceres Seq. ID no. 12419131
  misc_feature (137)..(351): Pfam Name: Pfam Description:  Papain family cysteine protease
  misc_feature (24)..(455): NCBI GI NO: 14600257 NR Description: papain-like cysteine peptidase XBCP3
  misc_feature (24)..(455): NCBI GI NO: 18391078 NR Description: cysteine protease XBCP3; protein id: At1g09850
  misc_feature (11)..(428): NCBI GI NO: 25289988 NR Description: cysteine proteinase (EC 3.4.22.-)
  misc_feature (90)..(443): NCBI GI NO: 18141285 NR Description: senescence-associated cysteine protease
  misc_feature (22)..(112): NCBI GI NO: 18141285 NR Description: senescence-associated cysteine protease
  misc_feature (38)..(441): NCBI GI NO: 1361974 NR Description: cysteine proteinase (EC 3
  misc_feature (8)..(451): NCBI GI NO: 6682829 NR Description: cysteine protease component of protease-inhibitorcomplex
  misc_feature (23)..(452): NCBI GI NO: 14517542 NR Description: F2G19.31/F2G19.31 [Arabidopsis thaliana]
  misc_feature (23)..(452): NCBI GI NO: 18401614 NR Description: cysteine proteinase RD21A; protein id: At1g47128
  misc_feature (32)..(441): NCBI GI NO: 30141019 NR Description: cysteine protease-1 [Helianthus annuus]
MPSVHHHLLLLTLAALAVAAATASAGGDPPAIEAQFDAWCAEHGKAYATPEERAARLAVFADNAAFVAAHNARAGANAAGGGGGGAAPPSYTLALNAFADLTHEEFRAARLGRIAPGAALRSRAAPVYWGLGGGAAVPDALDWRKSGAVTKVKDQGSCGACWSFSATGAMEGINKIKTGSLVSLSEQELIDCDRSYNSGCGGGLMDYAYKFVIKNGGIDTEEDYPYREADGTCNKNKLKKRVVTIDGYTDVPSNKEDLLLQAVAQQPVSVGICGSARAFQLYYQGIFDGPCPTSLDHAVLIVGYGSEGGKDYWIVKNSWGESWGMKGYMHMHRNTGDSKGVCGINMMASFPTKTSPNPPPSPGPGPTKCSLLTYCPEGSTCCCSWRVLGFCLSWSCCELDNAVCCKDNRYCCPHDYPVCDTGRGQCLKASGNFSAIEGIRRKQSFSKAPSWTGWLELMDQ

SEQ ID NO: 41025 - protein, 291 aa, Zea mays subsp. mays
  peptide (1)..(291): Ceres Seq. ID no. 12419132
  misc_feature (1)..(182): Pfam Name: Pfam Description:  Papain family cysteine protease
  misc_feature (1)..(286): NCBI GI NO: 14600257 NR Description: papain-like cysteine peptidase XBCP3
  misc_feature (1)..(286): NCBI GI NO: 18391078 NR Description: cysteine protease XBCP3; protein id: At1g09850
  misc_feature (1)..(259): NCBI GI NO: 25289988 NR Description: cysteine proteinase (EC 3.4.22.-)
  misc_feature (1)..(274): NCBI GI NO: 18141285 NR Description: senescence-associated cysteine protease
  misc_feature (1)..(272): NCBI GI NO: 1361974 NR Description: cysteine proteinase (EC 3
  misc_feature (1)..(282): NCBI GI NO: 6682829 NR Description: cysteine protease component of protease-inhibitorcomplex
  misc_feature (1)..(283): NCBI GI NO: 14517542 NR Description: F2G19.31/F2G19.31 [Arabidopsis thaliana]
  misc_feature (1)..(283): NCBI GI NO: 18401614 NR Description: cysteine proteinase RD21A; protein id: At1g47128
  misc_feature (1)..(272): NCBI GI NO: 30141019 NR Description: cysteine protease-1 [Helianthus annuus]
  misc_feature (1)..(281): NCBI GI NO: 18402225 NR Description: cysteine proteinase; protein id: At3g19390
MEGINKIKTGSLVSLSEQELIDCDRSYNSGCGGGLMDYAYKFVIKNGGIDTEEDYPYREADGTCNKNKLKKRVVTIDGYTDVPSNKEDLLLQAVAQQPVSVGICGSARAFQLYYQGIFDGPCPTSLDHAVLIVGYGSEGGKDYWIVKNSWGESWGMKGYMHMHRNTGDSKGVCGINMMASFPTKTSPNPPPSPGPGPTKCSLLTYCPEGSTCCCSWRVLGFCLSWSCCELDNAVCCKDNRYCCPHDYPVCDTGRGQCLKASGNFSAIEGIRRKQSFSKAPSWTGWLELMDQ

SEQ ID NO: 41026 - protein, 256 aa, Zea mays subsp. mays
  peptide (1)..(256): Ceres Seq. ID no. 12419133
  misc_feature (1)..(147): Pfam Name: Pfam Description:  Papain family cysteine protease
  misc_feature (1)..(251): NCBI GI NO: 14600257 NR Description: papain-like cysteine peptidase XBCP3
  misc_feature (1)..(251): NCBI GI NO: 18391078 NR Description: cysteine protease XBCP3; protein id: At1g09850
  misc_feature (1)..(224): NCBI GI NO: 25289988 NR Description: cysteine proteinase (EC 3.4.22.-)
  misc_feature (1)..(239): NCBI GI NO: 18141285 NR Description: senescence-associated cysteine protease
  misc_feature (1)..(237): NCBI GI NO: 1361974 NR Description: cysteine proteinase (EC 3
  misc_feature (1)..(247): NCBI GI NO: 6682829 NR Description: cysteine protease component of protease-inhibitorcomplex
  misc_feature (1)..(248): NCBI GI NO: 14517542 NR Description: F2G19.31/F2G19.31 [Arabidopsis thaliana]
  misc_feature (1)..(248): NCBI GI NO: 18401614 NR Description: cysteine proteinase RD21A; protein id: At1g47128
  misc_feature (1)..(237): NCBI GI NO: 30141019 NR Description: cysteine protease-1 [Helianthus annuus]
  misc_feature (1)..(246): NCBI GI NO: 18402225 NR Description: cysteine proteinase; protein id: At3g19390
MDYAYKFVIKNGGIDTEEDYPYREADGTCNKNKLKKRVVTIDGYTDVPSNKEDLLLQAVAQQPVSVGICGSARAFQLYYQGIFDGPCPTSLDHAVLIVGYGSEGGKDYWIVKNSWGESWGMKGYMHMHRNTGDSKGVCGINMMASFPTKTSPNPPPSPGPGPTKCSLLTYCPEGSTCCCSWRVLGFCLSWSCCELDNAVCCKDNRYCCPHDYPVCDTGRGQCLKASGNFSAIEGIRRKQSFSKAPSWTGWLELMDQ

SEQ ID NO: 41027 - DNA, 955 bp, Zea mays subsp. mays
  misc_feature (1)..(955): Ceres Seq. ID no. 12420073
agccttcttctagtagctacggagtaccattcatcatcagagctagcaagctcaaagaaaactgagctcgtgtgtagtgagcagcgagtgagtgactggtgagtggtgaccatttcaagaacagcgccgcagcagggagctaattcgttcgttcatcgtcgcatcatcagtttgatccttcgaccccatagcttcctgcatcttcgagctcgtcactaaacaaccatgggaggaggcacgctggagtacctgtcggatctgctgggcggcggcggccggcgccggtacaagaagaggaagcagttccagacggtggagctcaaggtgcgcatggactgcgacggctgcgagatgaaagtcaggaacgcgctctccagcatgaaaggggtgcactccgtggagatcaaccgcaagcagtacaaggtgacggtgcaggggtacgtggagccgcacaaggtggtcaagcgggtgcaggccacggggaagaaggccgagatctggccctacgtgccctacagcctcgtcgcgcacccttacgccgcgccggcctacgacaagaaggcgccgccgggctacgtgcgcagggtcgacgccgtcatgcccgtctcctccacctacggcgggcccacggcggcggccggcccgccgcaggaggagcggctcgccaccatgttcagcgacgacaaccccaacgcgtgctctgtcatgtagattagaattactttttcttttcccctacacaccaccgtgggtgcatggcgcagctctcttcgaccacagaaaatgtaaaccgtacgtggatgcatgtcaaaaccatagatgatcgcctcggttggatgtctatgtccatcacatgtgcatgtacgtacgtagctgtatgttgttgtatgctttgtatattattgtttgatggaaccaaaagagagcatgcatgcgtggcagagagattttcccc

SEQ ID NO: 41028 - protein, 161 aa, Zea mays subsp. mays
  peptide (1)..(161): Ceres Seq. ID no. 12420074
  misc_feature (32)..(91): Pfam Name: Pfam Description:  Heavy-metal-associated domain
  misc_feature (3)..(161): NCBI GI NO: 37573003 NR Description: putative farnesylated protein
  misc_feature (1)..(161): NCBI GI NO: 15235984 NR Description: copper chaperone
  misc_feature (7)..(161): NCBI GI NO: 15223925 NR Description: copper chaperone
  misc_feature (4)..(161): NCBI GI NO: 15219990 NR Description: copper chaperone
  misc_feature (18)..(161): NCBI GI NO: 38346843 NR Description: OSJNBa0091C12.3
  misc_feature (4)..(161): NCBI GI NO: 15233937 NR Description: copper chaperone
  misc_feature (18)..(161): NCBI GI NO: 23304411 NR Description: farnesylated protein 1
  misc_feature (4)..(161): NCBI GI NO: 21536547 NR Description: farnesylated protein (ATFP6)
  misc_feature (22)..(161): NCBI GI NO: 21397273 NR Description: Putative atfp6-like protein
  misc_feature (22)..(161): NCBI GI NO: 4097573 NR Description: GMFP7 [Glycine max]
MGGGTLEYLSDLLGGGGRRRYKKRKQFQTVELKVRMDCDGCEMKVRNALSSMKGVHSVEINRKQYKVTVQGYVEPHKVVKRVQATGKKAEIWPYVPYSLVAHPYAAPAYDKKAPPGYVRRVDAVMPVSSTYGGPTAAAGPPQEERLATMFSDDNPNACSVM

SEQ ID NO: 41029 - protein, 126 aa, Zea mays subsp. mays
  peptide (1)..(126): Ceres Seq. ID no. 12420075
  misc_feature (1)..(56): Pfam Name: Pfam Description:  Heavy-metal-associated domain
  misc_feature (1)..(126): NCBI GI NO: 37573003 NR Description: putative farnesylated protein
  misc_feature (1)..(126): NCBI GI NO: 15235984 NR Description: copper chaperone
  misc_feature (1)..(126): NCBI GI NO: 15223925 NR Description: copper chaperone
  misc_feature (1)..(126): NCBI GI NO: 15219990 NR Description: copper chaperone
  misc_feature (1)..(126): NCBI GI NO: 38346843 NR Description: OSJNBa0091C12.3
  misc_feature (1)..(126): NCBI GI NO: 15233937 NR Description: copper chaperone
  misc_feature (1)..(126): NCBI GI NO: 23304411 NR Description: farnesylated protein 1
  misc_feature (1)..(126): NCBI GI NO: 21536547 NR Description: farnesylated protein (ATFP6)
  misc_feature (1)..(126): NCBI GI NO: 21397273 NR Description: Putative atfp6-like protein
  misc_feature (1)..(126): NCBI GI NO: 4097573 NR Description: GMFP7 [Glycine max]
MDCDGCEMKVRNALSSMKGVHSVEINRKQYKVTVQGYVEPHKVVKRVQATGKKAEIWPYVPYSLVAHPYAAPAYDKKAPPGYVRRVDAVMPVSSTYGGPTAAAGPPQEERLATMFSDDNPNACSVM

SEQ ID NO: 41030 - protein, 119 aa, Zea mays subsp. mays
  peptide (1)..(119): Ceres Seq. ID no. 12420076
  misc_feature (1)..(49): Pfam Name: Pfam Description:  Heavy-metal-associated domain
  misc_feature (1)..(119): NCBI GI NO: 37573003 NR Description: putative farnesylated protein
  misc_feature (1)..(119): NCBI GI NO: 15235984 NR Description: copper chaperone
  misc_feature (1)..(119): NCBI GI NO: 15223925 NR Description: copper chaperone
  misc_feature (1)..(119): NCBI GI NO: 15219990 NR Description: copper chaperone
  misc_feature (1)..(119): NCBI GI NO: 38346843 NR Description: OSJNBa0091C12.3
  misc_feature (1)..(119): NCBI GI NO: 15233937 NR Description: copper chaperone
  misc_feature (1)..(119): NCBI GI NO: 23304411 NR Description: farnesylated protein 1
  misc_feature (1)..(119): NCBI GI NO: 21536547 NR Description: farnesylated protein (ATFP6)
  misc_feature (1)..(119): NCBI GI NO: 21397273 NR Description: Putative atfp6-like protein
  misc_feature (1)..(119): NCBI GI NO: 4097573 NR Description: GMFP7 [Glycine max]
MKVRNALSSMKGVHSVEINRKQYKVTVQGYVEPHKVVKRVQATGKKAEIWPYVPYSLVAHPYAAPAYDKKAPPGYVRRVDAVMPVSSTYGGPTAAAGPPQEERLATMFSDDNPNACSVM

SEQ ID NO: 41031 - DNA, 1379 bp, Zea mays subsp. mays
  misc_feature (1)..(1379): Ceres Seq. ID no. 12359162
acaacactcgcctgccctgccctctcatctcgcttcgcttccattccatcgcgccagtcgccagactcaccagggagacagggagagtagggggaaatatcaattagaaacaacgaggaactagcaaagaaagaaggataactcccataagaaaaatcgccaaatacgccattcatcttctccgcccgggtttcagaacgtgcggcagtttagccaggatggtggcgatcgagaaccagaaccagagccaggccgcttcccgaacggccgcgtcgaggagttcatccacgcaaggacattgtcagctgccgaccttcgcgatcctgaaatttcagctctggtggcttccaagctgagggagttccacaaccttgacatgcctggtcccaaatctgtgctcatttgggacagacttaggaactggctcagaactgccaagagcttgtgtccacctgaagaagccaaggaatttcggttggacagtctggagaaccagattactgcattggagaacgagtgttcaggtgattaccagtggattggtttctgtcacaatgatcttcagtatggcaatatcatgattgatgaagagaccaacgtgctgaccatcattgattatgagtatgcaagcttcaacccagttgcatatgacattgctaaccatttctgtgagatggcagcagactatcattcatcaaagcctcatatactggactacagcagatatccagatgttgatgagcagaagcgttttgttaagacctacctgaacatttctggtgaggaacctgatgcggaagttgtggagaacctgctccaaagcattgagaagcacacgctcgccagccatctagtatggggcctctggggaataatttcggatcatgttaacgacattgacttcgactacaaggagtatgcgaggcagagattcgagcagtactggcacaagtctgcgatcttaacatcttgaacatgtgtataaacacccgtacgtggtctcaggaactccctgagggcctgtggctgcacacacgaaattgtgcagtgccactgacacatagataagctgtgaaagaagaaatactgacgacgacgacgaataatcccgttttgggctcgggaggttatttctccgcaactcgatgagcttcaggcttcagcttcaggaaggaaggaaggagctatggggatttggctgcccgcttatgctgtaccaatgcaattaaaagataaagatccggtccggtgttgcgtgtgctatgtttagttttggctagcaccgccgagagccgtggtcctgttgtggtgtttctagtttctgtatgcttgatgttgttagtgtgctggataatttggttttgtgcttggggagtcct

SEQ ID NO: 41032 - protein, 198 aa, Zea mays subsp. mays
  peptide (1)..(198): Ceres Seq. ID no. 12359163
  misc_feature (1)..(180): Pfam Name: Pfam Description:  Choline/ethanolamine kinase
  misc_feature (1)..(198): NCBI GI NO: 33149685 NR Description: choline kinase
  misc_feature (1)..(180): NCBI GI NO: 34910612 NR Description: putative choline kinase
  misc_feature (1)..(196): NCBI GI NO: 7488654 NR Description: choline kinase (EC 2
  misc_feature (1)..(190): NCBI GI NO: 22330627 NR Description: putative choline kinase; protein id: At1g74320
  misc_feature (1)..(190): NCBI GI NO: 25348157 NR Description: protein choline kinase F1O17.1
  misc_feature (1)..(198): NCBI GI NO: 7488653 NR Description: choline kinase (EC 2.7.1.32) CK2 - soybean
  misc_feature (1)..(196): NCBI GI NO: 12311795 NR Description: choline kinase [Pisum sativum]
  misc_feature (1)..(198): NCBI GI NO: 15234032 NR Description: choline kinase GmCK2p -like protein
  misc_feature (1)..(198): NCBI GI NO: 21594823 NR Description: choline kinase GmCK2p-like protein
  misc_feature (1)..(198): NCBI GI NO: 21537276 NR Description: choline kinase GmCK2p-like protein
MPGPKSVLIWDRLRNWLRTAKSLCPPEEAKEFRLDSLENQITALENECSGDYQWIGFCHNDLQYGNIMIDEETNVLTIIDYEYASFNPVAYDIANHFCEMAADYHSSKPHILDYSRYPDVDEQKRFVKTYLNISGEEPDAEVVENLLQSIEKHTLASHLVWGLWGIISDHVNDIDFDYKEYARQRFEQYWHKSAILTS

SEQ ID NO: 41033 - protein, 131 aa, Zea mays subsp. mays
  peptide (1)..(131): Ceres Seq. ID no. 12359164
  misc_feature (1)..(113): Pfam Name: Pfam Description:  Choline/ethanolamine kinase
  misc_feature (1)..(131): NCBI GI NO: 33149685 NR Description: choline kinase
  misc_feature (1)..(113): NCBI GI NO: 34910612 NR Description: putative choline kinase
  misc_feature (1)..(129): NCBI GI NO: 7488654 NR Description: choline kinase (EC 2
  misc_feature (1)..(123): NCBI GI NO: 22330627 NR Description: putative choline kinase; protein id: At1g74320
  misc_feature (1)..(123): NCBI GI NO: 25348157 NR Description: protein choline kinase F1O17.1
  misc_feature (1)..(131): NCBI GI NO: 7488653 NR Description: choline kinase (EC 2.7.1.32) CK2 - soybean
  misc_feature (1)..(129): NCBI GI NO: 12311795 NR Description: choline kinase [Pisum sativum]
  misc_feature (1)..(131): NCBI GI NO: 15234032 NR Description: choline kinase GmCK2p -like protein
  misc_feature (1)..(131): NCBI GI NO: 21594823 NR Description: choline kinase GmCK2p-like protein
  misc_feature (1)..(131): NCBI GI NO: 21537276 NR Description: choline kinase GmCK2p-like protein
MIDEETNVLTIIDYEYASFNPVAYDIANHFCEMAADYHSSKPHILDYSRYPDVDEQKRFVKTYLNISGEEPDAEVVENLLQSIEKHTLASHLVWGLWGIISDHVNDIDFDYKEYARQRFEQYWHKSAILTS

SEQ ID NO: 41034 - protein, 99 aa, Zea mays subsp. mays
  peptide (1)..(99): Ceres Seq. ID no. 12359165
  misc_feature (1)..(81): Pfam Name: Pfam Description:  Choline/ethanolamine kinase
  misc_feature (1)..(99): NCBI GI NO: 33149685 NR Description: choline kinase
  misc_feature (1)..(81): NCBI GI NO: 34910612 NR Description: putative choline kinase
  misc_feature (1)..(97): NCBI GI NO: 7488654 NR Description: choline kinase (EC 2
  misc_feature (1)..(91): NCBI GI NO: 22330627 NR Description: putative choline kinase; protein id: At1g74320
  misc_feature (1)..(91): NCBI GI NO: 25348157 NR Description: protein choline kinase F1O17.1
  misc_feature (1)..(99): NCBI GI NO: 7488653 NR Description: choline kinase (EC 2.7.1.32) CK2 - soybean
  misc_feature (1)..(97): NCBI GI NO: 12311795 NR Description: choline kinase [Pisum sativum]
  misc_feature (1)..(99): NCBI GI NO: 15234032 NR Description: choline kinase GmCK2p -like protein
  misc_feature (1)..(99): NCBI GI NO: 21594823 NR Description: choline kinase GmCK2p-like protein
  misc_feature (1)..(99): NCBI GI NO: 21537276 NR Description: choline kinase GmCK2p-like protein
MAADYHSSKPHILDYSRYPDVDEQKRFVKTYLNISGEEPDAEVVENLLQSIEKHTLASHLVWGLWGIISDHVNDIDFDYKEYARQRFEQYWHKSAILTS

SEQ ID NO: 41035 - DNA, 665 bp, Zea mays subsp. mays
  misc_feature (1)..(665): Ceres Seq. ID no. 13568486
  misc_feature (532)..(532): n is a, c, t, g, unknown, or other
  misc_feature (499)..(499): n is a, c, t, g, unknown, or other
gcttgctcccaagatcaagcgcctcccgcctccagcactctaactcaggggacacgatcgccatggccgccacatcgaccgccgccgccgtgctgtccccgccgtccgtggccgggctccgcctggcgccgtctcccggccgggcgcgcgtgtcgttccgcgcggcgccgggcgccggcgcggcggtccgtggcggcgcgcgcggagctgagctcggcgctggtgatcagcctgagcacgggcgtgtcgctcttcctgggccgcttcgtcttcttcaacttccagcgggagaacgtggcgaagcaggtgcccgcgcagaacggcaagacgcacttcgacgccggcgacgagcgcgccaaggagttcgcggccctgctcaagtccaacgaccccgtgggcttcaacctcgtcgacgtcctccgcctggggctcgctcggccacatcgtcgcctactacatcctcgccacctccagcaacggatacgaccccaacttcttntgagcggtcgtcgaggatgtattctacagacanccgtgtgcgtgcgtgtgtgcttgtcatgtatccgatcaaagtttggttaatttggacaagtagtgcaactgcagaataattggtatttgtatagtgcaccatgccaacatgaatttgatctgtctctgtcttc

SEQ ID NO: 41036 - protein, 202 aa, Zea mays subsp. mays
  peptide (1)..(202): Ceres Seq. ID no. 13568487
  misc_feature (23)..(69): NCBI GI NO: 131192 NR Description: Photosystem I reaction center subunit V
  misc_feature (166)..(166): Xaa is any aa, unknown or other
  misc_feature (177)..(177): Xaa is any aa, unknown or other
LLPRSSASRLQHSNSGDTIAMAATSTAAAVLSPPSVAGLRLAPSPGRARVSFRAAPGAGAAVRGGARGAELGAGDQPEHGRVALPGPLRLLQLPAGERGEAGARAERQDALRRRRRARQGVRGPAQVQRPRGLQPRRRPPPGARSATSSPTTSSPPPATDTTPTSXERSSRMYSTDXRVRACVLVMYPIKVWLIWTSSATAE

SEQ ID NO: 41037 - protein, 193 aa, Zea mays subsp. mays
  peptide (1)..(193): Ceres Seq. ID no. 13568488
  misc_feature (70)..(143): Pfam Name: Pfam Description:  Photosystem I psaG / psaK
  misc_feature (38)..(143): NCBI GI NO: 131192 NR Description: Photosystem I reaction center subunit V
  misc_feature (53)..(143): NCBI GI NO: 131194 NR Description: Photosystem I reaction center subunit V
  misc_feature (63)..(143): NCBI GI NO: 15222757 NR Description: photosystem I subunit V precursor -related
  misc_feature (46)..(143): NCBI GI NO: 131191 NR Description: Photosystem I reaction center subunit V
  misc_feature (69)..(106): NCBI GI NO: 131193 NR Description: Photosystem I reaction center subunit V
  misc_feature (51)..(152): NCBI GI NO: 12831160 NR Description: PsaG-like protein [Dunaliella salina]
  misc_feature (167)..(167): Xaa is any aa, unknown or other
  misc_feature (178)..(178): Xaa is any aa, unknown or other
ACSQDQAPPASSTLTQGTRSPWPPHRPPPPCCPRRPWPGSAWRRLPAGRACRSARRRAPARRSVAARAELSSALVISLSTGVSLFLGRFVFFNFQRENVAKQVPAQNGKTHFDAGDERAKEFAALLKSNDPVGFNLVDVLRLGLARPHRRLLHPRHLQQRIRPQLLXSGRRGCILQTXVCVRVCLSCIRSKFG

SEQ ID NO: 41038 - protein, 182 aa, Zea mays subsp. mays
  peptide (1)..(182): Ceres Seq. ID no. 13568489
  misc_feature (3)..(49): NCBI GI NO: 131192 NR Description: Photosystem I reaction center subunit V
  misc_feature (146)..(146): Xaa is any aa, unknown or other
  misc_feature (157)..(157): Xaa is any aa, unknown or other
MAATSTAAAVLSPPSVAGLRLAPSPGRARVSFRAAPGAGAAVRGGARGAELGAGDQPEHGRVALPGPLRLLQLPAGERGEAGARAERQDALRRRRRARQGVRGPAQVQRPRGLQPRRRPPPGARSATSSPTTSSPPPATDTTPTSXERSSRMYSTDXRVRACVLVMYPIKVWLIWTSSATAE

SEQ ID NO: 41039 - DNA, 1172 bp, Zea mays subsp. mays
  misc_feature (1)..(1172): Ceres Seq. ID no. 12375730
gcacgagaccattacctagaacatcctaatcgaaaaatcgacagcctccgccgcacgttcacacacacagcaagcagaatccagctagctcagctctcactcgctcgctcactccagtgtccagtctcccttcacttcaggacgtcctcgattcgccgccgtctgtcaaccgagatggacgcgctgtggaatggttcgtcgtgcgattggccggcgccgacggtgatcatcagcgacgacgacgcggcggcagcggagctgcggcgggggccgtggacagtggacgaggacgcgctcctggcggcccacgtggccgcgcacggcgaggggcggtggaacgagctggcgcgcgacgcggggctacggcgcaccggcaagagctgccgcctccgctggctcaactacctccgccccggcgtgcgccgcgggggcttcaccccgcgggagcagctgctcatcctcgacctccactcgcgctggggcaaccgctggtccaagatcgcggcgcacctgccgggccgcacggacaacgaggtcaagaactactggaggacgcgggtgcagaagcacgccaagcagctgcactgcgacgtcggcagccgcaggttccacgacgccatgaggaacctctggatgccgcgcctgatcgagaggatccacgccgacgactcagccgccgtcgccgctaatgccaccggcgacgtctcccacttctactccgcgagcccatcgcatgagctgtcgtcgtcctcccagccggcgccggcgtaccgaaacgctgcgcccaacggcagctgcgcgcgtgcgccgtccccggacgcctcctgcgtcaccgggccgtcgtcgtggtcacgggaggcgtcgcccgcgtcgcagttccaatcgagcggctcgaccattgccggaccgtctacttccaccgagctgtgccagaacggatgctccagcgcgacgagcgttgacatgttcgacgagagctggtcggagcttcttgcgcgcgccaaccatgacgacacggatttcggattgggagaaactggagacaactggtggggtctggaggatatctgggaacaaccgctttaaactgatcgctccctacttttgtactactacatactacgtatgctgcccgagacgaaatgacagaattgttgtttctagtgttattg

SEQ ID NO: 41040 - protein, 361 aa, Zea mays subsp. mays
  peptide (1)..(361): Ceres Seq. ID no. 12375731
  misc_feature (142)..(187): Pfam Name: Pfam Description:  Myb-like DNA-binding domain
  misc_feature (68)..(359): NCBI GI NO: 34894466 NR Description: putative dehydration-induced myb-related proteinCpm7
  misc_feature (81)..(251): NCBI GI NO: 13177578 NR Description: Myb transcription factor JAMyb [Oryza sativa]
  misc_feature (84)..(232): NCBI GI NO: 19073328 NR Description: typical P-type R2R3 Myb protein [Sorghum bicolor]
  misc_feature (76)..(272): NCBI GI NO: 34898110 NR Description: putative typical P-type R2R3 Myb protein
  misc_feature (82)..(231): NCBI GI NO: 19073334 NR Description: typical P-type R2R3 Myb protein [Sorghum bicolor]
  misc_feature (79)..(348): NCBI GI NO: 7446183 NR Description: ABA-induced myb-related protein Cpm10 -Craterostigma plantagineum
  misc_feature (76)..(249): NCBI GI NO: 7446185 NR Description: dehydration-induced myb-related protein Cpm7 -Craterostigma plantagineum
  misc_feature (79)..(228): NCBI GI NO: 7446184 NR Description: myb-related protein Cpm5
  misc_feature (86)..(357): NCBI GI NO: 23476307 NR Description: myb-like transcription factor 5
  misc_feature (86)..(357): NCBI GI NO: 14249019 NR Description: recombinant myb-like transcription factor Myb 5
ARDHYLEHPNRKIDSLRRTFTHTASRIQLAQLSLARSLQCPVSLHFRTSSIRRRLSTEMDALWNGSSCDWPAPTVIISDDDAAAAELRRGPWTVDEDALLAAHVAAHGEGRWNELARDAGLRRTGKSCRLRWLNYLRPGVRRGGFTPREQLLILDLHSRWGNRWSKIAAHLPGRTDNEVKNYWRTRVQKHAKQLHCDVGSRRFHDAMRNLWMPRLIERIHADDSAAVAANATGDVSHFYSASPSHELSSSSQPAPAYRNAAPNGSCARAPSPDASCVTGPSSWSREASPASQFQSSGSTIAGPSTSTELCQNGCSSATSVDMFDESWSELLARANHDDTDFGLGETGDNWWGLEDIWEQPL

SEQ ID NO: 41041 - protein, 303 aa, Zea mays subsp. mays
  peptide (1)..(303): Ceres Seq. ID no. 12375732
  misc_feature (84)..(129): Pfam Name: Pfam Description:  Myb-like DNA-binding domain
  misc_feature (10)..(301): NCBI GI NO: 34894466 NR Description: putative dehydration-induced myb-related proteinCpm7
  misc_feature (23)..(193): NCBI GI NO: 13177578 NR Description: Myb transcription factor JAMyb [Oryza sativa]
  misc_feature (26)..(174): NCBI GI NO: 19073328 NR Description: typical P-type R2R3 Myb protein [Sorghum bicolor]
  misc_feature (18)..(214): NCBI GI NO: 34898110 NR Description: putative typical P-type R2R3 Myb protein
  misc_feature (24)..(173): NCBI GI NO: 19073334 NR Description: typical P-type R2R3 Myb protein [Sorghum bicolor]
  misc_feature (21)..(290): NCBI GI NO: 7446183 NR Description: ABA-induced myb-related protein Cpm10 -Craterostigma plantagineum
  misc_feature (18)..(191): NCBI GI NO: 7446185 NR Description: dehydration-induced myb-related protein Cpm7 -Craterostigma plantagineum
  misc_feature (21)..(170): NCBI GI NO: 7446184 NR Description: myb-related protein Cpm5
  misc_feature (28)..(299): NCBI GI NO: 23476307 NR Description: myb-like transcription factor 5
  misc_feature (28)..(299): NCBI GI NO: 14249019 NR Description: recombinant myb-like transcription factor Myb 5
MDALWNGSSCDWPAPTVIISDDDAAAAELRRGPWTVDEDALLAAHVAAHGEGRWNELARDAGLRRTGKSCRLRWLNYLRPGVRRGGFTPREQLLILDLHSRWGNRWSKIAAHLPGRTDNEVKNYWRTRVQKHAKQLHCDVGSRRFHDAMRNLWMPRLIERIHADDSAAVAANATGDVSHFYSASPSHELSSSSQPAPAYRNAAPNGSCARAPSPDASCVTGPSSWSREASPASQFQSSGSTIAGPSTSTELCQNGCSSATSVDMFDESWSELLARANHDDTDFGLGETGDNWWGLEDIWEQPL

SEQ ID NO: 41042 - DNA, 1137 bp, Zea mays subsp. mays
  misc_feature (1)..(1137): Ceres Seq. ID no. 12359166
accgcactccagcgttcagcattagacacgagagctcctagtagccagaccactagtcccgcgaccctgtcgagagaaacagacagagcaacatggcgcctgcattgtcattcccgatcatcgacatggggctgctcgccggggaggagaggccggcggcgatggagcggctgcaagatgcgtgcgagaactggggcttcttcgagattctgaaccacggcatctcgacggagctgatggacgaggtagagaagctgaccaaggagcactacaagcgggtgcgcgagcagaggttcctcgagttcgctagcaagacgctcggggacggccgcgtcaagatcccgatccagaaggacggcgagatccccatcccttacaagcccgacgtcgacgtggagaagatcaagttccaccacttctccttcgaggagaccaccgccacgctccacctcaagctcgagaacaagaacgacttcgacctcggcctcaacctgctcgagtacgagatgtggctcggcgacgacagcatcgcctccgccgagctcacgcagaccgccaagatcgagaagcaggggatcaccaggatgcaggtgccctttagcttcaggcccaaggacttcggatccgctgtctgggacatgatcagggggaggggcacgggatacaccatcaagggaaagatcgatgtcgacactcccttcggcaacatgaagctgcccataagcaaagagggtggaaccacccacctcaagaaggaggacgacgatgatgacgatgatgacaactgaaatgaggactgctggggggcgctgctgttacctttcacgaaacgcagtgaagcagaggatgcgggatcgtcgtcgtttgatctgatacccatacccttagcgctggttaatctcttgcctttagcttatggtgctctgttgttttgcattgtctgaacatcctctcacttcctgagtgtacgttcagtttgaggtttcctgtgttgtccgtctgaattccttcaaactttgcggttggaactggatgaagaataaaattccaacccgtcctggttcttttgtgggtctgtttggaatagatgctgcctgccaatggtcctgaaataagatttagtgaaaggctttattc

SEQ ID NO: 41043 - protein, 231 aa, Zea mays subsp. mays
  peptide (1)..(231): Ceres Seq. ID no. 12359167
  misc_feature (86)..(214): Pfam Name: Pfam Description:  Late embryogenesis abundant protein
  misc_feature (79)..(230): NCBI GI NO: 34394536 NR Description: late embryogenesis abundant proteins-like
  misc_feature (79)..(231): NCBI GI NO: 3264769 NR Description: late embryogenesis-like protein [Prunus armeniaca]
  misc_feature (79)..(230): NCBI GI NO: 15224810 NR Description: similar to late embryogenesis abundant proteins
  misc_feature (79)..(229): NCBI GI NO: 21592483 NR Description: similar to late embryogenesis abundant proteins
  misc_feature (1)..(79): NCBI GI NO: 2492612 NR Description: 1-aminocyclopropane-1-carboxylate oxidase 1
  misc_feature (1)..(79): NCBI GI NO: 12862572 NR Description: 1-aminocyclopropane-1-carboxylate oxidase
  misc_feature (12)..(79): NCBI GI NO: 2952326 NR Description: 1-aminocyclopropane-1-carboxylate oxidase
  misc_feature (6)..(79): NCBI GI NO: 1771345 NR Description: 1-aminocyclopropane-1-carboxylate oxidase
  misc_feature (6)..(76): NCBI GI NO: 25452785 NR Description: 1-aminocyclopropane-1-carboxylate oxidase 2
  misc_feature (6)..(124): NCBI GI NO: 398996 NR Description: 1-aminocyclopropane-1-carboxylate oxidase 1
MAPALSFPIIDMGLLAGEERPAAMERLQDACENWGFFEILNHGISTELMDEVEKLTKEHYKRVREQRFLEFASKTLGDGRVKIPIQKDGEIPIPYKPDVDVEKIKFHHFSFEETTATLHLKLENKNDFDLGLNLLEYEMWLGDDSIASAELTQTAKIEKQGITRMQVPFSFRPKDFGSAVWDMIRGRGTGYTIKGKIDVDTPFGNMKLPISKEGGTTHLKKEDDDDDDDDN

SEQ ID NO: 41044 - protein, 220 aa, Zea mays subsp. mays
  peptide (1)..(220): Ceres Seq. ID no. 12359168
  misc_feature (75)..(203): Pfam Name: Pfam Description:  Late embryogenesis abundant protein
  misc_feature (68)..(219): NCBI GI NO: 34394536 NR Description: late embryogenesis abundant proteins-like
  misc_feature (68)..(220): NCBI GI NO: 3264769 NR Description: late embryogenesis-like protein [Prunus armeniaca]
  misc_feature (68)..(219): NCBI GI NO: 15224810 NR Description: similar to late embryogenesis abundant proteins
  misc_feature (68)..(218): NCBI GI NO: 21592483 NR Description: similar to late embryogenesis abundant proteins
  misc_feature (1)..(68): NCBI GI NO: 2492612 NR Description: 1-aminocyclopropane-1-carboxylate oxidase 1
  misc_feature (1)..(68): NCBI GI NO: 12862572 NR Description: 1-aminocyclopropane-1-carboxylate oxidase
  misc_feature (1)..(68): NCBI GI NO: 2952326 NR Description: 1-aminocyclopropane-1-carboxylate oxidase
  misc_feature (1)..(68): NCBI GI NO: 1771345 NR Description: 1-aminocyclopropane-1-carboxylate oxidase
  misc_feature (1)..(65): NCBI GI NO: 25452785 NR Description: 1-aminocyclopropane-1-carboxylate oxidase 2
  misc_feature (1)..(113): NCBI GI NO: 398996 NR Description: 1-aminocyclopropane-1-carboxylate oxidase 1
MGLLAGEERPAAMERLQDACENWGFFEILNHGISTELMDEVEKLTKEHYKRVREQRFLEFASKTLGDGRVKIPIQKDGEIPIPYKPDVDVEKIKFHHFSFEETTATLHLKLENKNDFDLGLNLLEYEMWLGDDSIASAELTQTAKIEKQGITRMQVPFSFRPKDFGSAVWDMIRGRGTGYTIKGKIDVDTPFGNMKLPISKEGGTTHLKKEDDDDDDDDN

SEQ ID NO: 41045 - protein, 208 aa, Zea mays subsp. mays
  peptide (1)..(208): Ceres Seq. ID no. 12359169
  misc_feature (63)..(191): Pfam Name: Pfam Description:  Late embryogenesis abundant protein
  misc_feature (56)..(207): NCBI GI NO: 34394536 NR Description: late embryogenesis abundant proteins-like
  misc_feature (56)..(208): NCBI GI NO: 3264769 NR Description: late embryogenesis-like protein [Prunus armeniaca]
  misc_feature (56)..(207): NCBI GI NO: 15224810 NR Description: similar to late embryogenesis abundant proteins
  misc_feature (56)..(206): NCBI GI NO: 21592483 NR Description: similar to late embryogenesis abundant proteins
  misc_feature (1)..(56): NCBI GI NO: 2492612 NR Description: 1-aminocyclopropane-1-carboxylate oxidase 1
  misc_feature (1)..(56): NCBI GI NO: 12862572 NR Description: 1-aminocyclopropane-1-carboxylate oxidase
  misc_feature (1)..(56): NCBI GI NO: 2952326 NR Description: 1-aminocyclopropane-1-carboxylate oxidase
  misc_feature (1)..(56): NCBI GI NO: 1771345 NR Description: 1-aminocyclopropane-1-carboxylate oxidase
  misc_feature (1)..(53): NCBI GI NO: 25452785 NR Description: 1-aminocyclopropane-1-carboxylate oxidase 2
  misc_feature (1)..(101): NCBI GI NO: 398996 NR Description: 1-aminocyclopropane-1-carboxylate oxidase 1
MERLQDACENWGFFEILNHGISTELMDEVEKLTKEHYKRVREQRFLEFASKTLGDGRVKIPIQKDGEIPIPYKPDVDVEKIKFHHFSFEETTATLHLKLENKNDFDLGLNLLEYEMWLGDDSIASAELTQTAKIEKQGITRMQVPFSFRPKDFGSAVWDMIRGRGTGYTIKGKIDVDTPFGNMKLPISKEGGTTHLKKEDDDDDDDDN

SEQ ID NO: 41046 - DNA, 1467 bp, Zea mays subsp. mays; identical to SEQ ID NO: 35261
  misc_feature (1)..(1467): Ceres Seq. ID no. 12368243

SEQ ID NO: 41047 - protein, 242 aa, Zea mays subsp. mays; identical to SEQ ID NO: 35262
  peptide (1)..(242): Ceres Seq. ID no. 12368244
  misc_feature (1)..(242): Pfam Name: Pfam Description:  Class-II DAHP synthetase family
  misc_feature (1)..(242): NCBI GI NO: 34906844 NR Description: putative phospho-2-dehydro-3-deoxyheptonatealdolase 1
  misc_feature (1)..(242): NCBI GI NO: 2398679 NR Description: 3-deoxy-D-arabino-heptulosonate 7-phosphatesynthase
  misc_feature (1)..(242): NCBI GI NO: 2546988 NR Description: 2-dehydro-3-deoxyphosphoheptonate aldolase
  misc_feature (1)..(242): NCBI GI NO: 15219878 NR Description: 3-deoxy-D-arabino-heptulosonate 7-phosphate
  misc_feature (1)..(242): NCBI GI NO: 7488957 NR Description: probable 2-dehydro-3-deoxy-phosphoheptonatealdolase
  misc_feature (1)..(242): NCBI GI NO: 584777 NR Description: Phospho-2-dehydro-3-deoxyheptonate aldolase 1
  misc_feature (1)..(242): NCBI GI NO: 24745903 NR Description: 3-deoxy-D-arabino-heptulosonate 7-phosphatesynthase
  misc_feature (1)..(242): NCBI GI NO: 2398681 NR Description: 3-deoxy-D-arabino-heptulosonate 7-phosphatesynthase
  misc_feature (1)..(242): NCBI GI NO: 584778 NR Description: Phospho-2-dehydro-3-deoxyheptonate aldolase 2
  misc_feature (1)..(242): NCBI GI NO: 114193 NR Description: Phospho-2-dehydro-3-deoxyheptonate aldolase 1

SEQ ID NO: 41048 - protein, 217 aa, Zea mays subsp. mays; identical to SEQ ID NO: 35263
  peptide (1)..(217): Ceres Seq. ID no. 12368245
  misc_feature (1)..(217): Pfam Name: Pfam Description:  Class-II DAHP synthetase family
  misc_feature (1)..(217): NCBI GI NO: 34906844 NR Description: putative phospho-2-dehydro-3-deoxyheptonatealdolase 1
  misc_feature (1)..(217): NCBI GI NO: 2398679 NR Description: 3-deoxy-D-arabino-heptulosonate 7-phosphatesynthase
  misc_feature (1)..(217): NCBI GI NO: 2546988 NR Description: 2-dehydro-3-deoxyphosphoheptonate aldolase
  misc_feature (1)..(217): NCBI GI NO: 15219878 NR Description: 3-deoxy-D-arabino-heptulosonate 7-phosphate
  misc_feature (1)..(217): NCBI GI NO: 7488957 NR Description: probable 2-dehydro-3-deoxy-phosphoheptonatealdolase
  misc_feature (1)..(217): NCBI GI NO: 584777 NR Description: Phospho-2-dehydro-3-deoxyheptonate aldolase 1
  misc_feature (1)..(217): NCBI GI NO: 24745903 NR Description: 3-deoxy-D-arabino-heptulosonate 7-phosphatesynthase
  misc_feature (1)..(217): NCBI GI NO: 2398681 NR Description: 3-deoxy-D-arabino-heptulosonate 7-phosphatesynthase
  misc_feature (1)..(217): NCBI GI NO: 584778 NR Description: Phospho-2-dehydro-3-deoxyheptonate aldolase 2
  misc_feature (1)..(217): NCBI GI NO: 114193 NR Description: Phospho-2-dehydro-3-deoxyheptonate aldolase 1

SEQ ID NO: 41049 - protein, 206 aa, Zea mays subsp. mays; identical to SEQ ID NO: 35264
  peptide (1)..(206): Ceres Seq. ID no. 12368246
  misc_feature (1)..(206): Pfam Name: Pfam Description:  Class-II DAHP synthetase family
  misc_feature (1)..(206): NCBI GI NO: 34906844 NR Description: putative phospho-2-dehydro-3-deoxyheptonatealdolase 1
  misc_feature (1)..(206): NCBI GI NO: 2398679 NR Description: 3-deoxy-D-arabino-heptulosonate 7-phosphatesynthase
  misc_feature (1)..(206): NCBI GI NO: 2546988 NR Description: 2-dehydro-3-deoxyphosphoheptonate aldolase
  misc_feature (1)..(206): NCBI GI NO: 15219878 NR Description: 3-deoxy-D-arabino-heptulosonate 7-phosphate
  misc_feature (1)..(206): NCBI GI NO: 7488957 NR Description: probable 2-dehydro-3-deoxy-phosphoheptonatealdolase
  misc_feature (1)..(206): NCBI GI NO: 584777 NR Description: Phospho-2-dehydro-3-deoxyheptonate aldolase 1
  misc_feature (1)..(206): NCBI GI NO: 24745903 NR Description: 3-deoxy-D-arabino-heptulosonate 7-phosphatesynthase
  misc_feature (1)..(206): NCBI GI NO: 2398681 NR Description: 3-deoxy-D-arabino-heptulosonate 7-phosphatesynthase
  misc_feature (1)..(206): NCBI GI NO: 584778 NR Description: Phospho-2-dehydro-3-deoxyheptonate aldolase 2
  misc_feature (1)..(206): NCBI GI NO: 114193 NR Description: Phospho-2-dehydro-3-deoxyheptonate aldolase 1

SEQ ID NO: 41050 - DNA, 993 bp, Zea mays subsp. mays
  misc_feature (1)..(993): Ceres Seq. ID no. 12364374
gcacgagaccattacctagaacatcctaatcaaaaaacaggagctagataatctagcgaggttgccagagctccagtacctcacgctatatggtctcagctggcctccaaggtatactgttggcccagacgacttcaggaatctgaggttctgcgaagtgggcacaacgttcgagtttcgtaagggcgccatgccaaggcttgaagtgctgcaatttggagtttatgcagggtactggagttgggtatgcaatggtatgccgttcgagcagttcccaacgaaggatgtgatcgaagatcttgacttggacctggataacgtccttttacttcagcaagtaatagtcaaagtcaactgctcaggtgctactgccgcacaagtggatgaggtggaggccgtggtcatgcgtgccgtggaaaatcatgccaaccgtccaaccataaaaatggatcgagaatatgaagaaaatatcttatctgatgaaaagtgggagactctgcttcggcgacacattgaaaaggattgctgcgtgcgcatgatgaaggataaatctgatgctttcttcctcagccagctgcggtcgtatcgatatcttcaggaagccattattttcatcgactgttcgggtgccagcatgtgtgaggtgcagaaagtggaagcagcttatagacatgcagccgaggttcatcctaaccatccaagtattgaacttatcagaacaaacaccgacggaatggcctcctcctcatccgaccatcccaacacagagcccaggaattgatgactcggtttgttagatccttccaacccagcagcaggtaaatgtgagttgcttaagtaccaaagagagaggtcctgttcagctagatgattagaagcattggcatggcttgttaattacattcgtggttcttagtctaaaatcacattgaagagggagacggacccaagtgatgcagttcatgtgttatctgtatcaatctctatttttat

SEQ ID NO: 41051 - protein, 196 aa, Zea mays subsp. mays
  peptide (1)..(196): Ceres Seq. ID no. 12364375
  misc_feature (1)..(182): NCBI GI NO: 40253772 NR Description: putative RGH1A
MPRLEVLQFGVYAGYWSWVCNGMPFEQFPTKDVIEDLDLDLDNVLLLQQVIVKVNCSGATAAQVDEVEAVVMRAVENHANRPTIKMDREYEENILSDEKWETLLRRHIEKDCCVRMMKDKSDAFFLSQLRSYRYLQEAIIFIDCSGASMCEVQKVEAAYRHAAEVHPNHPSIELIRTNTDGMASSSSDHPNTEPRN

SEQ ID NO: 41052 - protein, 174 aa, Zea mays subsp. mays
  peptide (1)..(174): Ceres Seq. ID no. 12364376
  misc_feature (1)..(160): NCBI GI NO: 40253772 NR Description: putative RGH1A
MPFEQFPTKDVIEDLDLDLDNVLLLQQVIVKVNCSGATAAQVDEVEAVVMRAVENHANRPTIKMDREYEENILSDEKWETLLRRHIEKDCCVRMMKDKSDAFFLSQLRSYRYLQEAIIFIDCSGASMCEVQKVEAAYRHAAEVHPNHPSIELIRTNTDGMASSSSDHPNTEPRN

SEQ ID NO: 41053 - protein, 125 aa, Zea mays subsp. mays
  peptide (1)..(125): Ceres Seq. ID no. 12364377
  misc_feature (1)..(111): NCBI GI NO: 40253772 NR Description: putative RGH1A
MRAVENHANRPTIKMDREYEENILSDEKWETLLRRHIEKDCCVRMMKDKSDAFFLSQLRSYRYLQEAIIFIDCSGASMCEVQKVEAAYRHAAEVHPNHPSIELIRTNTDGMASSSSDHPNTEPRN

SEQ ID NO: 41054 - DNA, 1375 bp, Zea mays subsp. mays
  misc_feature (1)..(1375): Ceres Seq. ID no. 12375696
  misc_feature (837)..(837): n is a, c, t, g, unknown, or other
gcacgagaccattacctagaacatcctaatcgaaaagccgttcaactcgatcacttctttcccttccacacaggcacacaggcacacagcacacagctcactcaactcccctcccgcttcgtcagctcaccatcataaaccaaacagagagctctctccctctcggtcgttccattccaggatgctgcttaacccggcgtccatgctggacaccatccggcagcacctcctggaggagccaccagcggcggccgacgagagcttcgggatcctggtggcggaccagtggagcgactcgctcccgttccgcaccgacgacgccgacgacatggtggtgttcggggcgctgcaggacgccttcgcctacggctggctacccgacggctccttcgcgcacgtgaagcccgagccggtgcggtcccccgactcctcctactactcctacgacggctcctgcttcggcggcctcccgtacccggagcagccactgacgcccggcagcgagggcgaggcggccgccacgcccagccccaggagggaggaggccgcggcggccgtggccaggggcaagcactacaggggcgtcaggcagcgcccgtggggcaagttcgcggcggagatcagggacccggccaagaacggcgcgcgcgtctggctcggcacctacgacaccgccgaggacgccgcgctcgcctacgaccgcgccgcctaccgcatgcgcggctcgcgcgcgctcctcaacttcccgctccgcatcgcctccgagatcgccgccgcggccgccggcgacaagcggccgttggcgttgcccgagcccgccacctcctcggactcgtnctccaccggcggctcgcccaagaggcggaagcgaggcgaagccgccgccgccaacatggccatggcgctggtgcccccgccttcccagcttagccggccggcccagccatggttccctgccgccgcgccggtcgagcaggcggcgatgccgccgcgcgtggagcagctcgtcatctagctagccccgcgcgttaaaccggactcgcggcgagacaatgaggcgtgcaagtgcaacgacgggtgagccggcggaaggcggaggaaaacaggacgaggcccttgcgcgaatgcgacggcgcgcggaatgcgataagctcgggagcaattgggggtccggatgccgctgttgctccgtgcaactcgcgcaagtggaaagaagctgtctgtgtgtagattcatccaagtgtcttgtctgcaaacggattttcggtatatgcgtccttgtcacctgtcagggtggtgtggtgtgagggcttgggcttgtgctgctgataagtttggagatctgtacaaagaaaaaacgtagggagaagatgag

SEQ ID NO: 41055 - protein, 277 aa, Zea mays subsp. mays
  peptide (1)..(277): Ceres Seq. ID no. 12375697
  misc_feature (129)..(194): Pfam Name: Pfam Description:  AP2 domain
  misc_feature (1)..(224): NCBI GI NO: 38346167 NR Description: OSJNBa0079A21.14
  misc_feature (9)..(276): NCBI GI NO: 14140141 NR Description: putative AP2-related transcription factor
  misc_feature (99)..(234): NCBI GI NO: 7489113 NR Description: DNA binding protein EREBP-2 - common tobacco
  misc_feature (14)..(77): NCBI GI NO: 7489113 NR Description: DNA binding protein EREBP-2 - common tobacco
  misc_feature (99)..(234): NCBI GI NO: 8809571 NR Description: ethylene-responsive element binding factor
  misc_feature (32)..(77): NCBI GI NO: 8809571 NR Description: ethylene-responsive element binding factor
  misc_feature (100)..(234): NCBI GI NO: 28274828 NR Description: ethylene response factor 1
  misc_feature (18)..(77): NCBI GI NO: 28274828 NR Description: ethylene response factor 1
  misc_feature (108)..(230): NCBI GI NO: 7489077 NR Description: transcription factor Pti4 - tomato (fragment)
  misc_feature (20)..(84): NCBI GI NO: 7489077 NR Description: transcription factor Pti4 - tomato (fragment)
  misc_feature (219)..(219): Xaa is any aa, unknown or other
MLLNPASMLDTIRQHLLEEPPAAADESFGILVADQWSDSLPFRTDDADDMVVFGALQDAFAYGWLPDGSFAHVKPEPVRSPDSSYYSYDGSCFGGLPYPEQPLTPGSEGEAAATPSPRREEAAAAVARGKHYRGVRQRPWGKFAAEIRDPAKNGARVWLGTYDTAEDAALAYDRAAYRMRGSRALLNFPLRIASEIAAAAAGDKRPLALPEPATSSDSXSTGGSPKRRKRGEAAAANMAMALVPPPSQLSRPAQPWFPAAAPVEQAAMPPRVEQLVI

SEQ ID NO: 41056 - protein, 270 aa, Zea mays subsp. mays
  peptide (1)..(270): Ceres Seq. ID no. 12375698
  misc_feature (122)..(187): Pfam Name: Pfam Description:  AP2 domain
  misc_feature (1)..(217): NCBI GI NO: 38346167 NR Description: OSJNBa0079A21.14
  misc_feature (2)..(269): NCBI GI NO: 14140141 NR Description: putative AP2-related transcription factor
  misc_feature (92)..(227): NCBI GI NO: 7489113 NR Description: DNA binding protein EREBP-2 - common tobacco
  misc_feature (7)..(70): NCBI GI NO: 7489113 NR Description: DNA binding protein EREBP-2 - common tobacco
  misc_feature (92)..(227): NCBI GI NO: 8809571 NR Description: ethylene-responsive element binding factor
  misc_feature (25)..(70): NCBI GI NO: 8809571 NR Description: ethylene-responsive element binding factor
  misc_feature (93)..(227): NCBI GI NO: 28274828 NR Description: ethylene response factor 1
  misc_feature (11)..(70): NCBI GI NO: 28274828 NR Description: ethylene response factor 1
  misc_feature (101)..(223): NCBI GI NO: 7489077 NR Description: transcription factor Pti4 - tomato (fragment)
  misc_feature (13)..(77): NCBI GI NO: 7489077 NR Description: transcription factor Pti4 - tomato (fragment)
  misc_feature (212)..(212): Xaa is any aa, unknown or other
MLDTIRQHLLEEPPAAADESFGILVADQWSDSLPFRTDDADDMVVFGALQDAFAYGWLPDGSFAHVKPEPVRSPDSSYYSYDGSCFGGLPYPEQPLTPGSEGEAAATPSPRREEAAAAVARGKHYRGVRQRPWGKFAAEIRDPAKNGARVWLGTYDTAEDAALAYDRAAYRMRGSRALLNFPLRIASEIAAAAAGDKRPLALPEPATSSDSXSTGGSPKRRKRGEAAAANMAMALVPPPSQLSRPAQPWFPAAAPVEQAAMPPRVEQLVI

SEQ ID NO: 41057 - protein, 228 aa, Zea mays subsp. mays
  peptide (1)..(228): Ceres Seq. ID no. 12375699
  misc_feature (80)..(145): Pfam Name: Pfam Description:  AP2 domain
  misc_feature (1)..(175): NCBI GI NO: 38346167 NR Description: OSJNBa0079A21.14
  misc_feature (1)..(227): NCBI GI NO: 14140141 NR Description: putative AP2-related transcription factor
  misc_feature (50)..(185): NCBI GI NO: 7489113 NR Description: DNA binding protein EREBP-2 - common tobacco
  misc_feature (1)..(28): NCBI GI NO: 7489113 NR Description: DNA binding protein EREBP-2 - common tobacco
  misc_feature (50)..(185): NCBI GI NO: 8809571 NR Description: ethylene-responsive element binding factor
  misc_feature (1)..(28): NCBI GI NO: 8809571 NR Description: ethylene-responsive element binding factor
  misc_feature (51)..(185): NCBI GI NO: 28274828 NR Description: ethylene response factor 1
  misc_feature (1)..(28): NCBI GI NO: 28274828 NR Description: ethylene response factor 1
  misc_feature (59)..(181): NCBI GI NO: 7489077 NR Description: transcription factor Pti4 - tomato (fragment)
  misc_feature (1)..(35): NCBI GI NO: 7489077 NR Description: transcription factor Pti4 - tomato (fragment)
  misc_feature (170)..(170): Xaa is any aa, unknown or other
MVVFGALQDAFAYGWLPDGSFAHVKPEPVRSPDSSYYSYDGSCFGGLPYPEQPLTPGSEGEAAATPSPRREEAAAAVARGKHYRGVRQRPWGKFAAEIRDPAKNGARVWLGTYDTAEDAALAYDRAAYRMRGSRALLNFPLRIASEIAAAAAGDKRPLALPEPATSSDSXSTGGSPKRRKRGEAAAANMAMALVPPPSQLSRPAQPWFPAAAPVEQAAMPPRVEQLVI

SEQ ID NO: 41058 - DNA, 1892 bp, Zea mays subsp. mays
  misc_feature (1)..(1892): Ceres Seq. ID no. 12364555
gcacgagaccattacctagaacatcctaatcgaaaaactcgttagtcgttactcccaacaccgggaatccatggagccggcctatgtcgtcaccctctccttcctcttcctcttcttgctccaccatctcctcggccgccaccgccgcaggaccaacggcaagaacaagagaacgcagctgccaccgagccctcccgccatcccggtcttgggtcacctccacctcttacggaagcctatccacgcggcgctcgctcgcctcgcggagcgctacgggccggtgttcttcctccggctcggctcgcggcaagccgtggtggtgtcgtccgcggcttgcgccacggagtgcttcaccgagaatgacgtctgcttcgcgaaccgcccgcggttccccacgctcctgctggtttccttcggcggcgccacgctcccaatgtgccgctacggcccgtactggcgcaacctccgccgcgtcgccacggtgcagctcctgtccgcgcaccgcgtcagctgcatgctccccgtcatatccgccgaggtgcgcgcaatggcgcggaggatgtaccaatccgccgccgccgcccccgccggcgccgcgagggtcgagctgaagcggaggctgttcgagctctcccacagcgccctgatggagaccatcgcgcgaaccaagacgtcccgtgccgtggcggacgacgacacggacatgtctccggaggcccaggaattcatgaaggcgctggacgtgttccttccgcttctcagcggggccaacgcgtgggactacctgccggtgctacggtggctcgacgtgttcggcgtgaggaacaagatcctgcgcgcggtgagcgcaagggacgcgttcctacggcggctcatcgacgcggagcggcggaggctggaggagggcggcgagaacaacgataagaagagcatgattggcgttctgctctcactgcagaagtcagaaccggaggtgtacacggataccatgatcatggctctgtgctcgagcatgttcgctgggggttctgaaacaacagcgacgacggcggaatgggcgatgtcgctgctgctaagccaccccgatgttctgaagaaagcgcaggcggagattgacgcgtccgtggggcactcccggctgctcggcgccgacgacctgccgcgcctcggctacctccactgcatcgtcagcgagaccctgcggctgtacccggtcgtgccgacgctggtcccgcacgagtccaccgccgactgcacggtcggcggccaccgtgtgccgagcgggacgatgctcctcgtcaacgtgtacgccatccacagggaccccgcgatatgggcggacccagccgcgttcaggccggagcggttcgaggacggccgtgccgacgggctgttcgtgatgccgttcgggatgggaaggcggaaatgccccggagaggccctcgcgctgcggacgctggggctggtcctggggacgttgatccagtgcttcgactgggacacggtcggcggcgccgaggtcgatatggccgaagggggcggaatcacgctcccgagggctgtccctctggaggccatctgcaagccgcgccatgctatgcttggcgtcctcaagggactgtgagcgccatgctatgccttgatacataagtaagctttttttctttagtaaagcagtcatcttgcgtctcaagcagttgcttgctttattgcttgaaactcactttcttcctggagtgtagccgccgcagtgtaagcgcgcggggttcaaatgttatttcattcacagccatcagccatgtatatgttgaactagcaatgtgaatgtgacccacgtaaaatcgcatgggtttactagttttttttttcagttatagcatttgtgttttttt

SEQ ID NO: 41059 - protein, 517 aa, Zea mays subsp. mays
  peptide (1)..(517): Ceres Seq. ID no. 12364556
  misc_feature (1)..(517): NCBI GI NO: 13661746 NR Description: putative cytochrome P450 [Lolium rigidum]
  misc_feature (1)..(517): NCBI GI NO: 13661748 NR Description: putative cytochrome P450 [Lolium rigidum]
  misc_feature (1)..(517): NCBI GI NO: 13661744 NR Description: putative cytochrome P450 [Lolium rigidum]
  misc_feature (1)..(517): NCBI GI NO: 14488353 NR Description: putative cytochrome P450
  misc_feature (1)..(517): NCBI GI NO: 14488355 NR Description: putative cytochrome P450
  misc_feature (1)..(515): NCBI GI NO: 14488358 NR Description: putative cytochrome P450
  misc_feature (1)..(517): NCBI GI NO: 14488373 NR Description: putative cytochrome P450
  misc_feature (1)..(517): NCBI GI NO: 7430635 NR Description: cytochrome P450 (EC 1
  misc_feature (10)..(517): NCBI GI NO: 3059131 NR Description: cytochrome P450 [Helianthus tuberosus]
  misc_feature (1)..(517): NCBI GI NO: 38344454 NR Description: OSJNBa0017P10.2
MEPAYVVTLSFLFLFLLHHLLGRHRRRTNGKNKRTQLPPSPPAIPVLGHLHLLRKPIHAALARLAERYGPVFFLRLGSRQAVVVSSAACATECFTENDVCFANRPRFPTLLLVSFGGATLPMCRYGPYWRNLRRVATVQLLSAHRVSCMLPVISAEVRAMARRMYQSAAAAPAGAARVELKRRLFELSHSALMETIARTKTSRAVADDDTDMSPEAQEFMKALDVFLPLLSGANAWDYLPVLRWLDVFGVRNKILRAVSARDAFLRRLIDAERRRLEEGGENNDKKSMIGVLLSLQKSEPEVYTDTMIMALCSSMFAGGSETTATTAEWAMSLLLSHPDVLKKAQAEIDASVGHSRLLGADDLPRLGYLHCIVSETLRLYPVVPTLVPHESTADCTVGGHRVPSGTMLLVNVYAIHRDPAIWADPAAFRPERFEDGRADGLFVMPFGMGRRKCPGEALALRTLGLVLGTLIQCFDWDTVGGAEVDMAEGGGITLPRAVPLEAICKPRHAMLGVLKGL

SEQ ID NO: 41060 - protein, 396 aa, Zea mays subsp. mays
  peptide (1)..(396): Ceres Seq. ID no. 12364557
  misc_feature (1)..(396): NCBI GI NO: 13661746 NR Description: putative cytochrome P450 [Lolium rigidum]
  misc_feature (1)..(396): NCBI GI NO: 13661748 NR Description: putative cytochrome P450 [Lolium rigidum]
  misc_feature (1)..(396): NCBI GI NO: 13661744 NR Description: putative cytochrome P450 [Lolium rigidum]
  misc_feature (1)..(396): NCBI GI NO: 14488353 NR Description: putative cytochrome P450
  misc_feature (1)..(396): NCBI GI NO: 14488355 NR Description: putative cytochrome P450
  misc_feature (1)..(394): NCBI GI NO: 14488358 NR Description: putative cytochrome P450
  misc_feature (1)..(396): NCBI GI NO: 14488373 NR Description: putative cytochrome P450
  misc_feature (1)..(396): NCBI GI NO: 7430635 NR Description: cytochrome P450 (EC 1
  misc_feature (1)..(396): NCBI GI NO: 3059131 NR Description: cytochrome P450 [Helianthus tuberosus]
  misc_feature (1)..(396): NCBI GI NO: 38344454 NR Description: OSJNBa0017P10.2
MCRYGPYWRNLRRVATVQLLSAHRVSCMLPVISAEVRAMARRMYQSAAAAPAGAARVELKRRLFELSHSALMETIARTKTSRAVADDDTDMSPEAQEFMKALDVFLPLLSGANAWDYLPVLRWLDVFGVRNKILRAVSARDAFLRRLIDAERRRLEEGGENNDKKSMIGVLLSLQKSEPEVYTDTMIMALCSSMFAGGSETTATTAEWAMSLLLSHPDVLKKAQAEIDASVGHSRLLGADDLPRLGYLHCIVSETLRLYPVVPTLVPHESTADCTVGGHRVPSGTMLLVNVYAIHRDPAIWADPAAFRPERFEDGRADGLFVMPFGMGRRKCPGEALALRTLGLVLGTLIQCFDWDTVGGAEVDMAEGGGITLPRAVPLEAICKPRHAMLGVLKGL

SEQ ID NO: 41061 - protein, 369 aa, Zea mays subsp. mays
  peptide (1)..(369): Ceres Seq. ID no. 12364558
  misc_feature (1)..(369): NCBI GI NO: 13661746 NR Description: putative cytochrome P450 [Lolium rigidum]
  misc_feature (1)..(369): NCBI GI NO: 13661748 NR Description: putative cytochrome P450 [Lolium rigidum]
  misc_feature (1)..(369): NCBI GI NO: 13661744 NR Description: putative cytochrome P450 [Lolium rigidum]
  misc_feature (1)..(369): NCBI GI NO: 14488353 NR Description: putative cytochrome P450
  misc_feature (1)..(369): NCBI GI NO: 14488355 NR Description: putative cytochrome P450
  misc_feature (1)..(367): NCBI GI NO: 14488358 NR Description: putative cytochrome P450
  misc_feature (1)..(369): NCBI GI NO: 14488373 NR Description: putative cytochrome P450
  misc_feature (1)..(369): NCBI GI NO: 7430635 NR Description: cytochrome P450 (EC 1
  misc_feature (1)..(369): NCBI GI NO: 3059131 NR Description: cytochrome P450 [Helianthus tuberosus]
  misc_feature (1)..(369): NCBI GI NO: 38344454 NR Description: OSJNBa0017P10.2
MLPVISAEVRAMARRMYQSAAAAPAGAARVELKRRLFELSHSALMETIARTKTSRAVADDDTDMSPEAQEFMKALDVFLPLLSGANAWDYLPVLRWLDVFGVRNKILRAVSARDAFLRRLIDAERRRLEEGGENNDKKSMIGVLLSLQKSEPEVYTDTMIMALCSSMFAGGSETTATTAEWAMSLLLSHPDVLKKAQAEIDASVGHSRLLGADDLPRLGYLHCIVSETLRLYPVVPTLVPHESTADCTVGGHRVPSGTMLLVNVYAIHRDPAIWADPAAFRPERFEDGRADGLFVMPFGMGRRKCPGEALALRTLGLVLGTLIQCFDWDTVGGAEVDMAEGGGITLPRAVPLEAICKPRHAMLGVLKGL

SEQ ID NO: 41062 - DNA, 1108 bp, Zea mays subsp. mays
  misc_feature (1)..(1108): Ceres Seq. ID no. 13577820
  misc_feature (553)..(553): n is a, c, t, g, unknown, or other
attaatcccccacgttccccttccctttctctcccgccgccgcacgcccctctcaaacctccgcgctcccgcccagctagggtttccccgatctcccctccttctcaaccgccgccgtcgccgagagcgccgccacgatgttggagctgcggcttgtgcaggggagctcggggaaaccctagctgggcgggcgctgaaggcgttgcgggggctggtgaagctgcaggcgctggtccggggcaacatcgtgcggcggcggcggcggaaaccaccaccaccagcaccaccagtcgccgtgctcgacgacgatgggctccgagcagaacagccggagctacgcgaccatgccggagtcgccgtccaaggactcgacgaccgcgcagcagtcggtgccgagcccgccgtcggtgggcatggccgaggaggaggccctgagcccgctgcgcgtgcccgtgcccgcggacgtggccgagctctgcgacagcccccagttcttctcggccacgtcgtcgcggcccgggagctcgaggcggggcccgttcacgccgacggncaagagcgagtgctcgcgcagcctcttcggcggctactcccgactacccgaaactacatggccaacacggagtcgttccgcgccaaggcgcggtcgcagagcgcgccgaagcagaggccgcagtacgagcggtccagctccctacgcagggcgtcggcggcgcagaggtcggcggcggcggcggcctcctccctgcacgccaagttcaccaacaaggcgtacccgggctctggcaggctggatcggcttggcttgccggccaggtactgatactgagcctgcctaattcgcgtcaggatgatgtgctgccgctgtgtctcgagcgaggaggacgacgacgaagaagtgcaatcgactagtggtagttaggttcccccgtgccttggttgtgctattaccatcaacagttttttctgtttcttgctttgtgtagctagccatgtctaaagttgctggtagctgtaatgatgctataatgcgtgcttaactgctgacgaacctttttcctctacatttccgtggtatatatatatgtgccgtcaaatcatgcctggg

SEQ ID NO: 41063 - protein, 273 aa, Zea mays subsp. mays
  peptide (1)..(273): Ceres Seq. ID no. 13577821
  misc_feature (43)..(86): NCBI GI NO: 38567921 NR Description: OSJNBa0088I22.17
  misc_feature (202)..(273): NCBI GI NO: 38567921 NR Description: OSJNBa0088I22.17
  misc_feature (202)..(273): NCBI GI NO: 15235911 NR Description: expressed protein [Arabidopsis thaliana]
  misc_feature (60)..(86): NCBI GI NO: 15235911 NR Description: expressed protein [Arabidopsis thaliana]
  misc_feature (198)..(239): NCBI GI NO: 30682982 NR Description: expressed protein [Arabidopsis thaliana]
  misc_feature (60)..(86): NCBI GI NO: 30682982 NR Description: expressed protein [Arabidopsis thaliana]
  misc_feature (198)..(239): NCBI GI NO: 19347818 NR Description: unknown protein [Arabidopsis thaliana]
  misc_feature (60)..(86): NCBI GI NO: 19347818 NR Description: unknown protein [Arabidopsis thaliana]
  misc_feature (202)..(267): NCBI GI NO: 15241692 NR Description: expressed protein [Arabidopsis thaliana]
  misc_feature (202)..(267): NCBI GI NO: 21594016 NR Description: unknown [Arabidopsis thaliana]
  misc_feature (184)..(184): Xaa is any aa, unknown or other
LIPHVPLPFLSRRRTPLSNLRAPAQLGFPRSPLLLNRRRRRERRHDVGAAACAGELGETLAGRALKALRGLVKLQALVRGNIVRRRRRKPPPPAPPVAVLDDDGLRAEQPELRDHAGVAVQGLDDRAAVGAEPAVGGHGRGGGPEPAARARARGRGRALRQPPVLLGHVVAARELEAGPVHADXQERVLAQPLRRLLPTTRNYMANTESFRAKARSQSAPKQRPQYERSSSLRRASAAQRSAAAAASSLHAKFTNKAYPGSGRLDRLGLPARY

SEQ ID NO: 41064 - protein, 176 aa, Zea mays subsp. mays
  peptide (1)..(176): Ceres Seq. ID no. 13577822
  misc_feature (1)..(120): NCBI GI NO: 38567921 NR Description: OSJNBa0088I22.17
  misc_feature (82)..(82): Xaa is any aa, unknown or other
MGSEQNSRSYATMPESPSKDSTTAQQSVPSPPSVGMAEEEALSPLRVPVPADVAELCDSPQFFSATSSRPGSSRRGPFTPTXKSECSRSLFGGYSRLPETTWPTRSRSAPRRGRRARRSRGRSTSGPAPYAGRRRRRGRRRRRPPPCTPSSPTRRTRALAGWIGLACRPGTDTEPA

SEQ ID NO: 41065 - protein, 164 aa, Zea mays subsp. mays
  peptide (1)..(164): Ceres Seq. ID no. 13577823
  misc_feature (1)..(108): NCBI GI NO: 38567921 NR Description: OSJNBa0088I22.17
  misc_feature (70)..(70): Xaa is any aa, unknown or other
MPESPSKDSTTAQQSVPSPPSVGMAEEEALSPLRVPVPADVAELCDSPQFFSATSSRPGSSRRGPFTPTXKSECSRSLFGGYSRLPETTWPTRSRSAPRRGRRARRSRGRSTSGPAPYAGRRRRRGRRRRRPPPCTPSSPTRRTRALAGWIGLACRPGTDTEPA

SEQ ID NO: 41066 - DNA, 985 bp, Zea mays subsp. mays; identical to SEQ ID NO: 25925
  misc_feature (1)..(985): Ceres Seq. ID no. 13495278

SEQ ID NO: 41067 - protein, 327 aa, Zea mays subsp. mays; identical to SEQ ID NO: 25926
  peptide (1)..(327): Ceres Seq. ID no. 13495279
  misc_feature (93)..(326): NCBI GI NO: 14517362 NR Description: AT3g61130/T20K12_30 [Arabidopsis thaliana]
  misc_feature (93)..(326): NCBI GI NO: 15233046 NR Description: glycosyltransferase family 8
  misc_feature (87)..(326): NCBI GI NO: 7271113 NR Description: 68 kDa protein [Cicer arietinum]
  misc_feature (120)..(326): NCBI GI NO: 7485958 NR Description: hypothetical protein F22I13
  misc_feature (120)..(326): NCBI GI NO: 30691875 NR Description: glycosyltransferase family 8
  misc_feature (111)..(326): NCBI GI NO: 15227235 NR Description: glycosyltransferase family 8
  misc_feature (172)..(326): NCBI GI NO: 10177914 NR Description: emb|CAB71043
  misc_feature (172)..(326): NCBI GI NO: 18422837 NR Description: glycosyltransferase family 8
  misc_feature (105)..(326): NCBI GI NO: 37533460 NR Description: hypothetical protein
  misc_feature (172)..(326): NCBI GI NO: 38423965 NR Description: putative glycosyltransferase

SEQ ID NO: 41068 - protein, 284 aa, Zea mays subsp. mays; identical to SEQ ID NO: 25927
  peptide (1)..(284): Ceres Seq. ID no. 13495280
  misc_feature (50)..(283): NCBI GI NO: 14517362 NR Description: AT3g61130/T20K12_30 [Arabidopsis thaliana]
  misc_feature (50)..(283): NCBI GI NO: 15233046 NR Description: glycosyltransferase family 8
  misc_feature (44)..(283): NCBI GI NO: 7271113 NR Description: 68 kDa protein [Cicer arietinum]
  misc_feature (77)..(283): NCBI GI NO: 7485958 NR Description: hypothetical protein F22I13
  misc_feature (77)..(283): NCBI GI NO: 30691875 NR Description: glycosyltransferase family 8
  misc_feature (68)..(283): NCBI GI NO: 15227235 NR Description: glycosyltransferase family 8
  misc_feature (129)..(283): NCBI GI NO: 10177914 NR Description: emb|CAB71043
  misc_feature (129)..(283): NCBI GI NO: 18422837 NR Description: glycosyltransferase family 8
  misc_feature (62)..(283): NCBI GI NO: 37533460 NR Description: hypothetical protein
  misc_feature (129)..(283): NCBI GI NO: 38423965 NR Description: putative glycosyltransferase

SEQ ID NO: 41069 - protein, 233 aa, Zea mays subsp. mays; identical to SEQ ID NO: 25928
  peptide (1)..(233): Ceres Seq. ID no. 13495281
  misc_feature (1)..(232): NCBI GI NO: 14517362 NR Description: AT3g61130/T20K12_30 [Arabidopsis thaliana]
  misc_feature (1)..(232): NCBI GI NO: 15233046 NR Description: glycosyltransferase family 8
  misc_feature (1)..(232): NCBI GI NO: 7271113 NR Description: 68 kDa protein [Cicer arietinum]
  misc_feature (26)..(232): NCBI GI NO: 7485958 NR Description: hypothetical protein F22I13
  misc_feature (26)..(232): NCBI GI NO: 30691875 NR Description: glycosyltransferase family 8
  misc_feature (17)..(232): NCBI GI NO: 15227235 NR Description: glycosyltransferase family 8
  misc_feature (78)..(232): NCBI GI NO: 10177914 NR Description: emb|CAB71043
  misc_feature (78)..(232): NCBI GI NO: 18422837 NR Description: glycosyltransferase family 8
  misc_feature (11)..(232): NCBI GI NO: 37533460 NR Description: hypothetical protein
  misc_feature (78)..(232): NCBI GI NO: 38423965 NR Description: putative glycosyltransferase

SEQ ID NO: 41070 - DNA, 2629 bp, Zea mays subsp. mays
  misc_feature (1)..(2629): Ceres Seq. ID no. 12375783
gcacgagaccattacctagaacatcctaatcgaaaaacagtgcagtgcattcaatctcaaataaaaagccctgctacagtgctagcagtactcggatccacgaccttctccctccctccgctgctgctccgtcaaggaagggaggaaagaaagggcaggggaatggaggtggaggaagacggccgagccgcccgagtgctgctgagctcccagtgtctctgtctctgatgagatgactggacttatttgatgctcttgccgttctcgacttggggcgcgagccgatggatctcctccggatgaaacttctcctgccctccttcatcagctgccttcttctgatgcaggcagcactatgtgatggcgccgccgccaccaccaccaccaccggcgaaaacggaacggcaaactggacatgtgtgtgcgcagctcatcctctcggtgaaccagactccaacagcagcttgctgtccaattgctcttcctcctgccattgccaccgagatgagaacggcggcggcggcggcggcggcgcaggctcgtggaactgcacgtgtgcctctggtgatgagggccttcagaaggaagagcatgctgagctacgtgacgggagctgtttcacttcctgcaactgcacgtcgggtactggaacttcagaggaagggagaaagcgtgtctcaagcaaaacagtcatagctacgctcctggtctgcgtggttctcaccaccaccgctttcctcgtcaccaccgtatactacttccgccgcaaggacgccctctctccgcgatcgcagatatactccttcgatagatacactactagctggagcagcaggtcgaacctcgtcagcagtcgatcgtctccgcttccccagatgaaacccaaaccaaagcttggtggtctgaaagagtttctgtgcagctgcaatcttgtcatctgtgggggagagagcggcgcattccccggtgtcgtcgcccggttctcgtacgcagagctggagcaagcgaccgggagattctcggacgaccaccttatcggagtcggtgggtcaagcaaggtgtaccgcggccagctcggcgatggcagagtcgttgccgtgaagaagcttaggccgctaggaggcacggacgaagacttggagttcctgtcagagatcgagctgctgtcgaggctgaaccactgccacgtggtgccgttgctggggtactgctcggagagccagggccggcagctggagcggctgctggtgttcgagtgcatggccaacggcaacctgagggactgcctagacctgaagcgagggaggaagcccatggactggcagacgcgggtgagcgtcgcgctcggcgccgcgagggggctggagtacctgcacgaggcggcggcgccgcgcatcctccaccgcgacatcaagtccaccaacatcctcctggacgacaagttcagagccaagatcactgacctcggcatggccaagtgcctgatgaacgacggcgtgaccagctgctcgagctccccggcgcggatgctgggcacgttcggctacttcgcaccggagtacgccatcgtgggcaaggcgtcgctcaagtccgacgtcttcagcttcggcgtcgttgtgctggagctcatcaccggccggcagcccatccacaagtcgtcgtcgacgagggccgacgagagcctcgtactctgggcgacgtcgcggctgcgggacagcgggctggtggtcacggagctgccggacccgacgctgcagggcaagttcccggcggaggagatgcagatcatggcgcacctggcgcgggagtgcctgcagtgggaccccgaggccaggcccaccatgacggaggtcgtgcacatcctcgccaccatcgcaccactccagcacggcgccaagcgtcggaaccttcccatcgccaccgccttcaacctcacgccatcgccgcacgtcgggcggtgtgacccggagcctaaagacgacgacatcgagaggcagatgcagcagcaggagtgctcgccgacgacggctgtccagtggcaacaacaacaagcgcgctgcacccacgcgccaacgggccgcgcgtcgtggcccggcgacagggggaacgttgtgagcagaggcgcggcggtgtcgggcgagctggtgaacgggacggtgctgatgaacccccacgggcggggcagctggcggcggccgccgccgcttggcgacgaggaggcagtggacgtggatctgacggagccccggatggaggcgttcacgcagccggcggcgtttcagcctttcaggtgacggaaggattaggatcaggtggtggtggttctgattggtgcggcggcggcgggtgctgctgtacatcttcttgttcgtgcctccacgatccacaccaggatcatctgcttctgcatctgcgttcatgaatgtacagtacaggcaaatacatctagattggcaacgggaaaagaaaagaaaggcatcgagatcgttatgggatataggacctagattgaacacgagatcaatgcatgaatctgaatccacggcgcgcgtcattggacacatcactgttgtacacaagcaaacagacaatgagtgttcacagaagcaaaaaatataagaccgagttc

SEQ ID NO: 41071 - protein, 669 aa, Zea mays subsp. mays
  peptide (1)..(669): Ceres Seq. ID no. 12375784
  misc_feature (57)..(548): NCBI GI NO: 30683822 NR Description: protein kinase family [Arabidopsis thaliana]
  misc_feature (82)..(550): NCBI GI NO: 25407968 NR Description: probable protein kinase
  misc_feature (123)..(530): NCBI GI NO: 15240947 NR Description: putative protein; protein id: At5g38560
  misc_feature (220)..(523): NCBI GI NO: 34896634 NR Description: putative protein kinase [Oryza sativa]
  misc_feature (233)..(555): NCBI GI NO: 11358842 NR Description: serine/threonine-specific protein kinase-likeprotein
  misc_feature (232)..(530): NCBI GI NO: 34902828 NR Description: unnamed protein product
  misc_feature (222)..(531): NCBI GI NO: 15221470 NR Description: protein kinase, putative; protein id: At1g68690
  misc_feature (233)..(531): NCBI GI NO: 34894174 NR Description: putative protein kinase
  misc_feature (220)..(530): NCBI GI NO: 7488203 NR Description: probable serine/threonine-specific protein kinase
  misc_feature (220)..(530): NCBI GI NO: 30679031 NR Description: protein kinase family [Arabidopsis thaliana]
MDLLRMKLLLPSFISCLLLMQAALCDGAAATTTTTGENGTANWTCVCAAHPLGEPDSNSSLLSNCSSSCHCHRDENGGGGGGGAGSWNCTCASGDEGLQKEEHAELRDGSCFTSCNCTSGTGTSEEGRKRVSSKTVIATLLVCVVLTTTAFLVTTVYYFRRKDALSPRSQIYSFDRYTTSWSSRSNLVSSRSSPLPQMKPKPKLGGLKEFLCSCNLVICGGESGAFPGVVARFSYAELEQATGRFSDDHLIGVGGSSKVYRGQLGDGRVVAVKKLRPLGGTDEDLEFLSEIELLSRLNHCHVVPLLGYCSESQGRQLERLLVFECMANGNLRDCLDLKRGRKPMDWQTRVSVALGAARGLEYLHEAAAPRILHRDIKSTNILLDDKFRAKITDLGMAKCLMNDGVTSCSSSPARMLGTFGYFAPEYAIVGKASLKSDVFSFGVVVLELITGRQPIHKSSSTRADESLVLWATSRLRDSGLVVTELPDPTLQGKFPAEEMQIMAHLARECLQWDPEARPTMTEVVHILATIAPLQHGAKRRNLPIATAFNLTPSPHVGRCDPEPKDDDIERQMQQQECSPTTAVQWQQQQARCTHAPTGRASWPGDRGNVVSRGAAVSGELVNGTVLMNPHGRGSWRRPPPLGDEEAVDVDLTEPRMEAFTQPAAFQPFR

SEQ ID NO: 41072 - protein, 664 aa, Zea mays subsp. mays
  peptide (1)..(664): Ceres Seq. ID no. 12375785
  misc_feature (52)..(543): NCBI GI NO: 30683822 NR Description: protein kinase family [Arabidopsis thaliana]
  misc_feature (77)..(545): NCBI GI NO: 25407968 NR Description: probable protein kinase
  misc_feature (118)..(525): NCBI GI NO: 15240947 NR Description: putative protein; protein id: At5g38560
  misc_feature (215)..(518): NCBI GI NO: 34896634 NR Description: putative protein kinase [Oryza sativa]
  misc_feature (228)..(550): NCBI GI NO: 11358842 NR Description: serine/threonine-specific protein kinase-likeprotein
  misc_feature (227)..(525): NCBI GI NO: 34902828 NR Description: unnamed protein product
  misc_feature (217)..(526): NCBI GI NO: 15221470 NR Description: protein kinase, putative; protein id: At1g68690
  misc_feature (228)..(526): NCBI GI NO: 34894174 NR Description: putative protein kinase
  misc_feature (215)..(525): NCBI GI NO: 7488203 NR Description: probable serine/threonine-specific protein kinase
  misc_feature (215)..(525): NCBI GI NO: 30679031 NR Description: protein kinase family [Arabidopsis thaliana]
MKLLLPSFISCLLLMQAALCDGAAATTTTTGENGTANWTCVCAAHPLGEPDSNSSLLSNCSSSCHCHRDENGGGGGGGAGSWNCTCASGDEGLQKEEHAELRDGSCFTSCNCTSGTGTSEEGRKRVSSKTVIATLLVCVVLTTTAFLVTTVYYFRRKDALSPRSQIYSFDRYTTSWSSRSNLVSSRSSPLPQMKPKPKLGGLKEFLCSCNLVICGGESGAFPGVVARFSYAELEQATGRFSDDHLIGVGGSSKVYRGQLGDGRVVAVKKLRPLGGTDEDLEFLSEIELLSRLNHCHVVPLLGYCSESQGRQLERLLVFECMANGNLRDCLDLKRGRKPMDWQTRVSVALGAARGLEYLHEAAAPRILHRDIKSTNILLDDKFRAKITDLGMAKCLMNDGVTSCSSSPARMLGTFGYFAPEYAIVGKASLKSDVFSFGVVVLELITGRQPIHKSSSTRADESLVLWATSRLRDSGLVVTELPDPTLQGKFPAEEMQIMAHLARECLQWDPEARPTMTEVVHILATIAPLQHGAKRRNLPIATAFNLTPSPHVGRCDPEPKDDDIERQMQQQECSPTTAVQWQQQQARCTHAPTGRASWPGDRGNVVSRGAAVSGELVNGTVLMNPHGRGSWRRPPPLGDEEAVDVDLTEPRMEAFTQPAAFQPFR

SEQ ID NO: 41073 - protein, 650 aa, Zea mays subsp. mays
  peptide (1)..(650): Ceres Seq. ID no. 12375786
  misc_feature (38)..(529): NCBI GI NO: 30683822 NR Description: protein kinase family [Arabidopsis thaliana]
  misc_feature (63)..(531): NCBI GI NO: 25407968 NR Description: probable protein kinase
  misc_feature (104)..(511): NCBI GI NO: 15240947 NR Description: putative protein; protein id: At5g38560
  misc_feature (201)..(504): NCBI GI NO: 34896634 NR Description: putative protein kinase [Oryza sativa]
  misc_feature (214)..(536): NCBI GI NO: 11358842 NR Description: serine/threonine-specific protein kinase-likeprotein
  misc_feature (213)..(511): NCBI GI NO: 34902828 NR Description: unnamed protein product
  misc_feature (203)..(512): NCBI GI NO: 15221470 NR Description: protein kinase, putative; protein id: At1g68690
  misc_feature (214)..(512): NCBI GI NO: 34894174 NR Description: putative protein kinase
  misc_feature (201)..(511): NCBI GI NO: 7488203 NR Description: probable serine/threonine-specific protein kinase
  misc_feature (201)..(511): NCBI GI NO: 30679031 NR Description: protein kinase family [Arabidopsis thaliana]
MQAALCDGAAATTTTTGENGTANWTCVCAAHPLGEPDSNSSLLSNCSSSCHCHRDENGGGGGGGAGSWNCTCASGDEGLQKEEHAELRDGSCFTSCNCTSGTGTSEEGRKRVSSKTVIATLLVCVVLTTTAFLVTTVYYFRRKDALSPRSQIYSFDRYTTSWSSRSNLVSSRSSPLPQMKPKPKLGGLKEFLCSCNLVICGGESGAFPGVVARFSYAELEQATGRFSDDHLIGVGGSSKVYRGQLGDGRVVAVKKLRPLGGTDEDLEFLSEIELLSRLNHCHVVPLLGYCSESQGRQLERLLVFECMANGNLRDCLDLKRGRKPMDWQTRVSVALGAARGLEYLHEAAAPRILHRDIKSTNILLDDKFRAKITDLGMAKCLMNDGVTSCSSSPARMLGTFGYFAPEYAIVGKASLKSDVFSFGVVVLELITGRQPIHKSSSTRADESLVLWATSRLRDSGLVVTELPDPTLQGKFPAEEMQIMAHLARECLQWDPEARPTMTEVVHILATIAPLQHGAKRRNLPIATAFNLTPSPHVGRCDPEPKDDDIERQMQQQECSPTTAVQWQQQQARCTHAPTGRASWPGDRGNVVSRGAAVSGELVNGTVLMNPHGRGSWRRPPPLGDEEAVDVDLTEPRMEAFTQPAAFQPFR

SEQ ID NO: 41074 - DNA, 799 bp, Zea mays subsp. mays
  misc_feature (1)..(799): Ceres Seq. ID no. 12364546
gcacgagaccattacctagaacatcctaatcgaaaaagtttccactgtgctccttctcgccgactccgccatgaccgcctcgccctacccgacgacgccgtggctgcggccaccgcctcctatggcatttctgagtctcctcctcctccttggctgcctctccccgtcgatctcactggcgggtgcggaggcggcgggggttctgagacaagtggttggtggggacgacggcgggacattcttcgagccgttcaacgtgacctacgaccaccgcgcgcttatccttggcgggaagcgcaggatgctcgtctctgcggggctccactacccgcgtgccacgcccgagatgtggccgagtttgattgcaaagtgcaaggagggcggcgtggatgtaattgagacatatgtgttttggaatgggcatgagccggccaaaggccagtggtttcccagtttggttgcgcgatgtccctggggatagaattccgcactgacaatgaaccctacaaggctgaaatgcagatttttgtgacaaaaattgtagatatcatgaaagaggagaagctttattcttggcaaggtggtcccattatactgcagcagattgaaaatgaatacggtaacattcaaggccattatggtcaagcagggaaatagagaatggagaagatggtagtgctgctgctgactgttgtagatattgagacaggcacaatagagaatagagtgacacttggtatggccataaatcgctactttttccactagagcgaatagcattctccgtgtacatctgttg

SEQ ID NO: 41075 - protein, 136 aa, Zea mays subsp. mays
  peptide (1)..(136): Ceres Seq. ID no. 12364547
  misc_feature (55)..(125): Pfam Name: Pfam Description:  Glycosyl hydrolases family 35
  misc_feature (55)..(125): NCBI GI NO: 7488064 NR Description: probable beta-galactosidase (EC 3
  misc_feature (55)..(125): NCBI GI NO: 18403090 NR Description: glycosyl hydrolase family 35
  misc_feature (55)..(125): NCBI GI NO: 7939617 NR Description: beta-galactosidase [Lycopersicon esculentum]
  misc_feature (62)..(125): NCBI GI NO: 25326167 NR Description: probable beta-galactosidase
  misc_feature (62)..(125): NCBI GI NO: 6686888 NR Description: putative beta-galactosidase [Arabidopsis thaliana]
  misc_feature (62)..(125): NCBI GI NO: 30683905 NR Description: glycosyl hydrolase family 35 (beta-galactosidase)
  misc_feature (33)..(125): NCBI GI NO: 14970841 NR Description: beta-galactosidase [Fragaria x ananassa]
  misc_feature (63)..(126): NCBI GI NO: 24417238 NR Description: unknown [Arabidopsis thaliana]
  misc_feature (63)..(126): NCBI GI NO: 6686876 NR Description: putative beta-galactosidase [Arabidopsis thaliana]
  misc_feature (63)..(126): NCBI GI NO: 15231696 NR Description: glycosyl hydrolase family 35
MTASPYPTTPWLRPPPPMAFLSLLLLLGCLSPSISLAGAEAAGVLRQVVGGDDGGTFFEPFNVTYDHRALILGGKRRMLVSAGLHYPRATPEMWPSLIAKCKEGGVDVIETYVFWNGHEPAKGQWFPSLVARCPWG

SEQ ID NO: 41076 - protein, 132 aa, Zea mays subsp. mays
  peptide (1)..(132): Ceres Seq. ID no. 12364548
ARDHYLEHPNRKSFHCAPSRRLRHDRLALPDDAVAAATASYGISESPPPPWLPLPVDLTGGCGGGGGSETSGWWGRRRDILRAVQRDLRPPRAYPWREAQDARLCGAPLPACHARDVAEFDCKVQGGRRGCN

SEQ ID NO: 41077 - protein, 119 aa, Zea mays subsp. mays
  peptide (1)..(119): Ceres Seq. ID no. 12364549
  misc_feature (38)..(108): Pfam Name: Pfam Description:  Glycosyl hydrolases family 35
  misc_feature (38)..(108): NCBI GI NO: 7488064 NR Description: probable beta-galactosidase (EC 3
  misc_feature (38)..(108): NCBI GI NO: 18403090 NR Description: glycosyl hydrolase family 35
  misc_feature (38)..(108): NCBI GI NO: 7939617 NR Description: beta-galactosidase [Lycopersicon esculentum]
  misc_feature (45)..(108): NCBI GI NO: 25326167 NR Description: probable beta-galactosidase
  misc_feature (45)..(108): NCBI GI NO: 6686888 NR Description: putative beta-galactosidase [Arabidopsis thaliana]
  misc_feature (45)..(108): NCBI GI NO: 30683905 NR Description: glycosyl hydrolase family 35 (beta-galactosidase)
  misc_feature (16)..(108): NCBI GI NO: 14970841 NR Description: beta-galactosidase [Fragaria x ananassa]
  misc_feature (46)..(109): NCBI GI NO: 24417238 NR Description: unknown [Arabidopsis thaliana]
  misc_feature (46)..(109): NCBI GI NO: 6686876 NR Description: putative beta-galactosidase [Arabidopsis thaliana]
  misc_feature (46)..(109): NCBI GI NO: 15231696 NR Description: glycosyl hydrolase family 35
MAFLSLLLLLGCLSPSISLAGAEAAGVLRQVVGGDDGGTFFEPFNVTYDHRALILGGKRRMLVSAGLHYPRATPEMWPSLIAKCKEGGVDVIETYVFWNGHEPAKGQWFPSLVARCPWG

SEQ ID NO: 41078 - DNA, 1435 bp, Zea mays subsp. mays
  misc_feature (1)..(1435): Ceres Seq. ID no. 12436094
aacattgcaccgcatcgtctaagctcgcctgccctttacagcagcttactactacaaagacgacaacacagcgcgcgcgcgccaagctgagctcagctcgtcacgacacgccagcatggtggtgccttccacgacgccggtggtgcgccaagaaacgccaccgccgtcccacgacggcataggcataccgacggtggacctgtcggcgccgggcggccgcggcgcgctgtcgcggcaggtggcgcgcgcgtgcgcgcagcacggcttcttccgggccgtgaaccacggcgtggcgccaggccccgccgcacggctggacgccgccgccaggacgttcttcgcgctggcgccgcacaacaagcagcgcgccggcccgcccagcccactcggatacggctgccgcagcatcggcttcaacggcgacgccggggagctcgagtacctgctgctccacgccaacccggccgccgtcgcgcacagggccagatccatcgacactgatgacccctcgcgcttcagcaatgtggtgaacgagtatgtgggagcgatgaggcagctcgcatgtgagatcctggacctgctcggagaggggctagggctcaaggaccccagatccttcagcaggctcatcgctgacacagacagcgactcactcctgcggataaaccactaccctccaccatgcgccattcacaagcttgaccacgacagtcagtgcaggatgaagaacagtttcaggatcgtggcaggcaatggcgcgaaccagtcggcaggtgcacggatcggattcggggagcactcagacccgcagatccttagcttgctccgatcaaacgatgttgacggccttcaggtgcttctgaacagcgacggcagagaggtgtgggttcaggtgccagccgatccatcagcgttctttgtcaatgttggtgatctcctccaggccttcacaaatgggaaggtgataagcgtccggcacagggtaattgcaagctcgagcagggcgaggctgtcaacgatctacttcgctgcgccgccactgcatgcacgaattttggccctcccagagacagtcacagccaactcacccaggcagtaccggcccttcacctgggccgagtacaagaagacaatgtactccctccgcctcagccacagccgcctcaacctcttccacatcggccatgatgaccacggcaaaggagaacaagaatagggagaaagtggctgaactgcaggcagagagtttatgttggaggcttaggtaggtagaattgtccccaaaattttggctctctggcctccacagccagataatgtctagcagtatgctggttctgccaagtgccaatgggtaatagtatttagcattgtacacaagtccttgttgtatggaactgatgtactattgcctgttttagcagtttgttgtctc

SEQ ID NO: 41079 - protein, 366 aa, Zea mays subsp. mays
  peptide (1)..(366): Ceres Seq. ID no. 12436095
  misc_feature (177)..(307): Pfam Name: II Pfam Description: 2OG-Fe
  misc_feature (1)..(359): NCBI GI NO: 13568428 NR Description: OsGA2ox1 [Oryza sativa]
  misc_feature (21)..(363): NCBI GI NO: 23491590 NR Description: putative gibberellin 2-oxidase
  misc_feature (145)..(363): NCBI GI NO: 34894880 NR Description: putative OsGA2ox1
  misc_feature (21)..(160): NCBI GI NO: 34894880 NR Description: putative OsGA2ox1
  misc_feature (22)..(201): NCBI GI NO: 37544101 NR Description: gibberellin 2-oxidase
  misc_feature (222)..(355): NCBI GI NO: 37544101 NR Description: gibberellin 2-oxidase
  misc_feature (1)..(192): NCBI GI NO: 15217753 NR Description: dioxygenase, putative; protein id: At1g02400.1
  misc_feature (218)..(353): NCBI GI NO: 15217753 NR Description: dioxygenase, putative; protein id: At1g02400.1
  misc_feature (1)..(355): NCBI GI NO: 5579092 NR Description: gibberellin 2-oxidase-like protein [Pisum sativum]
  misc_feature (1)..(188): NCBI GI NO: 27261179 NR Description: gibberellin 2-oxidase 2 [Spinacia oleracea]
MVVPSTTPVVRQETPPPSHDGIGIPTVDLSAPGGRGALSRQVARACAQHGFFRAVNHGVAPGPAARLDAAARTFFALAPHNKQRAGPPSPLGYGCRSIGFNGDAGELEYLLLHANPAAVAHRARSIDTDDPSRFSNVVNEYVGAMRQLACEILDLLGEGLGLKDPRSFSRLIADTDSDSLLRINHYPPPCAIHKLDHDSQCRMKNSFRIVAGNGANQSAGARIGFGEHSDPQILSLLRSNDVDGLQVLLNSDGREVWVQVPADPSAFFVNVGDLLQAFTNGKVISVRHRVIASSSRARLSTIYFAAPPLHARILALPETVTANSPRQYRPFTWAEYKKTMYSLRLSHSRLNLFHIGHDDHGKGEQE

SEQ ID NO: 41080 - protein, 222 aa, Zea mays subsp. mays
  peptide (1)..(222): Ceres Seq. ID no. 12436096
  misc_feature (33)..(163): Pfam Name: II Pfam Description: 2OG-Fe
  misc_feature (1)..(215): NCBI GI NO: 13568428 NR Description: OsGA2ox1 [Oryza sativa]
  misc_feature (1)..(219): NCBI GI NO: 23491590 NR Description: putative gibberellin 2-oxidase
  misc_feature (1)..(219): NCBI GI NO: 34894880 NR Description: putative OsGA2ox1
  misc_feature (1)..(16): NCBI GI NO: 34894880 NR Description: putative OsGA2ox1
  misc_feature (1)..(57): NCBI GI NO: 37544101 NR Description: gibberellin 2-oxidase
  misc_feature (78)..(211): NCBI GI NO: 37544101 NR Description: gibberellin 2-oxidase
  misc_feature (1)..(48): NCBI GI NO: 15217753 NR Description: dioxygenase, putative; protein id: At1g02400.1
  misc_feature (74)..(209): NCBI GI NO: 15217753 NR Description: dioxygenase, putative; protein id: At1g02400.1
  misc_feature (1)..(211): NCBI GI NO: 5579092 NR Description: gibberellin 2-oxidase-like protein [Pisum sativum]
  misc_feature (1)..(44): NCBI GI NO: 27261179 NR Description: gibberellin 2-oxidase 2 [Spinacia oleracea]
MRQLACEILDLLGEGLGLKDPRSFSRLIADTDSDSLLRINHYPPPCAIHKLDHDSQCRMKNSFRIVAGNGANQSAGARIGFGEHSDPQILSLLRSNDVDGLQVLLNSDGREVWVQVPADPSAFFVNVGDLLQAFTNGKVISVRHRVIASSSRARLSTIYFAAPPLHARILALPETVTANSPRQYRPFTWAEYKKTMYSLRLSHSRLNLFHIGHDDHGKGEQE

SEQ ID NO: 41081 - DNA, 1300 bp, Zea mays subsp. mays
  misc_feature (1)..(1300): Ceres Seq. ID no. 12418940
acggcacggccacagctgactgactcctcctgcgttggctgataatcatggctagagctccgctgctcctcgcgctactgtgcgcgtgcgccgccaatgcggcggggaggaagatggtcggcgtgtacgagctcaaggcgggcgatttctccgtcggcgtcaccaactggggcgccaccatcacctccgttgtgctgccggactccaaaggggatttgtctgacgtcgtgcttggctacgacaccattggaggatacgtgagtggtaaaagctacttcggagcgcttgtcggacgagtggccaacaggatcgccaacgcgcgcttcgtgctcgacggaaaggcttaccatcttttcaagaacgatggcaacaacacgcttcatggtggccatagggggttcagtcaggttgtatggacggttaaagagttcgtcggtggcggtgactcgccctacatcacgttgtactaccacagcttcgatggagaacaaggtttcccaggcgacctggacgtgtacgtgacgtaccagctggcggccccctacgtgctgcgggtgcacatgaacgcgacggccgtgaacaaggcgaccccggtgaacctggcgcagcacacgtactggaacctgggcgggcagggcagcggcgacgtcctccgcaacacggtgcagctgttcgcgtcccggtacacgcccgtgggcggcggcctcatcccgacgggcgcggtggcgcccgtggccggcacgccctacgacttcctcgcgccggccgcggtgggctcgcgcatccgccaggtctccggcggcaaggccggcgtctacggctacgacaccaactacgccgtggacggggagcccggcgcgctgcggaaggtggccgtcgtccgggacggcgcgtccggccgggcgctggagctgtgggccaaccagcctggggtgcagttctacacgggcaacttcctccaggacgtcaaggggaagggcggcaaggtgtaccagcagtacggcgcgctgtgcctcgagacgcaggggttcccggacgccgtcaaccaccctaatttcccctcccagatcgtcaggccggggcaggtgtacaagcacgacatggtgttcaagttctccttctagctgatctgtataggcaacaccctggtccctggctaatcaatctactagtacctgttatgattgccactggcaaagtggcaactgggccttattgggactggagagacacgttacatgattccaagtcaatttgttttgcggaccgtaattaatgtttatcgcaaagattatgtatt

SEQ ID NO: 41082 - protein, 358 aa, Zea mays subsp. mays
  peptide (1)..(358): Ceres Seq. ID no. 12418941
  misc_feature (25)..(354): Pfam Name: Pfam Description:  Aldose 1-epimerase
  misc_feature (112)..(358): NCBI GI NO: 38567883 NR Description: OSJNBa0036B21.18
  misc_feature (1)..(121): NCBI GI NO: 38567883 NR Description: OSJNBa0036B21.18
  misc_feature (1)..(358): NCBI GI NO: 38567884 NR Description: OSJNBa0036B21.19
  misc_feature (1)..(357): NCBI GI NO: 40882679 NR Description: putative aldose 1-epimerase
  misc_feature (6)..(357): NCBI GI NO: 15824567 NR Description: non-cell-autonomous protein pathway2
  misc_feature (6)..(357): NCBI GI NO: 15824565 NR Description: non-cell-autonomous protein pathway1
  misc_feature (6)..(357): NCBI GI NO: 21537069 NR Description: aldose 1-epimerase-like protein
  misc_feature (6)..(357): NCBI GI NO: 15228261 NR Description: aldose 1-epimerase - like protein
  misc_feature (15)..(357): NCBI GI NO: 7430313 NR Description: probable aldose 1-epimerase (EC 5
  misc_feature (21)..(357): NCBI GI NO: 15242223 NR Description: putative aldose 1-epimerase - like protein
MARAPLLLALLCACAANAAGRKMVGVYELKAGDFSVGVTNWGATITSVVLPDSKGDLSDVVLGYDTIGGYVSGKSYFGALVGRVANRIANARFVLDGKAYHLFKNDGNNTLHGGHRGFSQVVWTVKEFVGGGDSPYITLYYHSFDGEQGFPGDLDVYVTYQLAAPYVLRVHMNATAVNKATPVNLAQHTYWNLGGQGSGDVLRNTVQLFASRYTPVGGGLIPTGAVAPVAGTPYDFLAPAAVGSRIRQVSGGKAGVYGYDTNYAVDGEPGALRKVAVVRDGASGRALELWANQPGVQFYTGNFLQDVKGKGGKVYQQYGALCLETQGFPDAVNHPNFPSQIVRPGQVYKHDMVFKFSF

SEQ ID NO: 41083 - protein, 336 aa, Zea mays subsp. mays
  peptide (1)..(336): Ceres Seq. ID no. 12418942
  misc_feature (3)..(332): Pfam Name: Pfam Description:  Aldose 1-epimerase
  misc_feature (90)..(336): NCBI GI NO: 38567883 NR Description: OSJNBa0036B21.18
  misc_feature (1)..(99): NCBI GI NO: 38567883 NR Description: OSJNBa0036B21.18
  misc_feature (1)..(336): NCBI GI NO: 38567884 NR Description: OSJNBa0036B21.19
  misc_feature (1)..(335): NCBI GI NO: 40882679 NR Description: putative aldose 1-epimerase
  misc_feature (1)..(335): NCBI GI NO: 15824567 NR Description: non-cell-autonomous protein pathway2
  misc_feature (1)..(335): NCBI GI NO: 15824565 NR Description: non-cell-autonomous protein pathway1
  misc_feature (1)..(335): NCBI GI NO: 21537069 NR Description: aldose 1-epimerase-like protein
  misc_feature (1)..(335): NCBI GI NO: 15228261 NR Description: aldose 1-epimerase - like protein
  misc_feature (1)..(335): NCBI GI NO: 7430313 NR Description: probable aldose 1-epimerase (EC 5
  misc_feature (1)..(335): NCBI GI NO: 15242223 NR Description: putative aldose 1-epimerase - like protein
MVGVYELKAGDFSVGVTNWGATITSVVLPDSKGDLSDVVLGYDTIGGYVSGKSYFGALVGRVANRIANARFVLDGKAYHLFKNDGNNTLHGGHRGFSQVVWTVKEFVGGGDSPYITLYYHSFDGEQGFPGDLDVYVTYQLAAPYVLRVHMNATAVNKATPVNLAQHTYWNLGGQGSGDVLRNTVQLFASRYTPVGGGLIPTGAVAPVAGTPYDFLAPAAVGSRIRQVSGGKAGVYGYDTNYAVDGEPGALRKVAVVRDGASGRALELWANQPGVQFYTGNFLQDVKGKGGKVYQQYGALCLETQGFPDAVNHPNFPSQIVRPGQVYKHDMVFKFSF

SEQ ID NO: 41084 - protein, 187 aa, Zea mays subsp. mays
  peptide (1)..(187): Ceres Seq. ID no. 12418943
  misc_feature (1)..(183): Pfam Name: Pfam Description:  Aldose 1-epimerase
  misc_feature (1)..(187): NCBI GI NO: 38567883 NR Description: OSJNBa0036B21.18
  misc_feature (1)..(187): NCBI GI NO: 38567884 NR Description: OSJNBa0036B21.19
  misc_feature (1)..(186): NCBI GI NO: 40882679 NR Description: putative aldose 1-epimerase
  misc_feature (1)..(186): NCBI GI NO: 15824567 NR Description: non-cell-autonomous protein pathway2
  misc_feature (1)..(186): NCBI GI NO: 15824565 NR Description: non-cell-autonomous protein pathway1
  misc_feature (1)..(186): NCBI GI NO: 21537069 NR Description: aldose 1-epimerase-like protein
  misc_feature (1)..(186): NCBI GI NO: 15228261 NR Description: aldose 1-epimerase - like protein
  misc_feature (1)..(186): NCBI GI NO: 7430313 NR Description: probable aldose 1-epimerase (EC 5
  misc_feature (1)..(186): NCBI GI NO: 15242223 NR Description: putative aldose 1-epimerase - like protein
  misc_feature (1)..(186): NCBI GI NO: 37531218 NR Description: putative aldose 1-epimerase - like protein
MNATAVNKATPVNLAQHTYWNLGGQGSGDVLRNTVQLFASRYTPVGGGLIPTGAVAPVAGTPYDFLAPAAVGSRIRQVSGGKAGVYGYDTNYAVDGEPGALRKVAVVRDGASGRALELWANQPGVQFYTGNFLQDVKGKGGKVYQQYGALCLETQGFPDAVNHPNFPSQIVRPGQVYKHDMVFKFSF

SEQ ID NO: 41085 - DNA, 2127 bp, Zea mays subsp. mays
  misc_feature (1)..(2127): Ceres Seq. ID no. 12436087
  misc_feature (1508)..(1508): n is a, c, t, g, unknown, or other
  misc_feature (1105)..(1105): n is a, c, t, g, unknown, or other
  misc_feature (1051)..(1051): n is a, c, t, g, unknown, or other
accacgtctcccctcacctggctctccccctgccacctcacgcgcgcccctgctctgtctcttttggctccgctgaggccgagcacacacaacaaattctctctctcctctctcactctctctctctctcacacacactctgctccctgtgcggaggacgggccggccgcatggggtgggggtggacggcgctggcggcggccgcgatggcgtacgtggcggtgaagctgatggaggtgctgtggtggcggccgcggcggctggagcagcacttcgcgcggcaggggatcaggggcccccgctaccgcttcttcgtcggctgcgtccgcgagatggtggcgctcatggtggccgcctccgccaagccaatgccgcgtccctaccgctcccacaacgtcctcccgcgcgtcctcgccttctaccaccactggaagaaaatctacggttccacgttcctgatatggttcggcccgacgccgaggctcgccgtcgccgacccggacctcatccgggagatcctcctgtcccgcgccgaccaattcgaccgctacgagtcgcacccgatggtgcgccagctcgagggcgaggggctcgtcagcctgcgcggcgacaagtgggcgcaccgccgcaaggtgctcacgccggcgttccacatggagaacctcaagctgctgctgccgttcgtcgggaggacggtggtcgacgtggtggacaagtggcacgacatggccgccgcggcgtccggcgaggtcgagatcgacgtgtccgagtggttccaggtggtgacggaggacgccatcacccgtacggcgttcggccggagctacgaggacggcaaggccgttttcaagctccagacccagctcatggccttcgcctccgaggcgtttcgcaaggtcttcatccctggatacaggttcctgccgaccaagaagaacacgacctcgtggaagctggacaaggagatcaggaagaacctggcgacgctgatcggccggcggcaggaagccgcggacgacgagaagctcagcggctgtgccaaggacctccncggcctcctgatcaacgcgggcagcaacggcggcaaggtgagccccatcaccgngaacgacatagtggaggagtgcaagacgttcttcttcgcgggcaagcagaccacgtcgaacctcctgacatggaccacagtcctgctcgccatgcaccccgagtggcaggagctcgcccgtcaggaggtgctccaagtctgcggggcgcgtgacatcccttcccgcgagcagctcaccaagctcaagacactcgggatgatcctgaacgagacgctgcggctgtacccgccggcggtggcgacggtgcgtcgcgccaaggcggacgtggagctgggcgggtgcctgatcccgcgcggcacggagctgctgatcccgatcatggccatgcaccacgacgcgcggctgtgggggccggacgccacgcagttcaacccggcgcggttcgccaggggcgcggcgcangcggccaggcaccccacggcgttcatcccgttcgggctgggcgcgcggatgtgcatcggccagaacctggcgctcctggagtccaagctcacgctggccatcgtcctccagcggttcgacttccggctgtcgcccagctacctccacgcgccgacggtgctgatgctcctccacccgcagtacggggcgcccgtggtcttccggccgcgaccgtctgagccgtccgattccgattgcgacagtagggatgtgtgaggagatgacggagctcgtactaaccttgtcagtgtcaattgcgcctggcatgatgaccaataaccacctccgcagcatgctgctttgccctcaagggcaaacgagcagagcagccgccgccacgccgccaccgccaccgcccagcaccaccggaggaacaagtgactagaaggagcaccaccgtaccgtactaagtactaacaaatatatcctgctgaaggtgccagcagcagcttagactagtagagcagagtagaaggcttgaccagtgcctcccaatttttcagtcatttgggttgatgatttccttccttccatgaggttttgccaggtgtggttggtgtatgaaggattgcaaaattgt

SEQ ID NO: 41086 - protein, 586 aa, Zea mays subsp. mays
  peptide (1)..(586): Ceres Seq. ID no. 12436088
  misc_feature (148)..(582): NCBI GI NO: 34896248 NR Description: OSJNBb0008D07.14
  misc_feature (57)..(149): NCBI GI NO: 34896248 NR Description: OSJNBb0008D07.14
  misc_feature (69)..(570): NCBI GI NO: 15225777 NR Description: cytochrome P450, putative; protein id: At2g26710.1
  misc_feature (59)..(574): NCBI GI NO: 34898914 NR Description: putative cytochrome P450
  misc_feature (62)..(567): NCBI GI NO: 21805645 NR Description: cytochrome P450 monooxygenase CYP72A5
  misc_feature (63)..(567): NCBI GI NO: 34912882 NR Description: putative cytochrome P450
  misc_feature (61)..(570): NCBI GI NO: 13661772 NR Description: putative cytochrome P450 [Lolium rigidum]
  misc_feature (61)..(570): NCBI GI NO: 13661774 NR Description: putative cytochrome P450 [Lolium rigidum]
  misc_feature (63)..(567): NCBI GI NO: 21842133 NR Description: cytochrome P450 monooxygenase CYP72A16
  misc_feature (61)..(570): NCBI GI NO: 13661766 NR Description: putative cytochrome P450 [Lolium rigidum]
  misc_feature (350)..(350): Xaa is any aa, unknown or other
  misc_feature (368)..(368): Xaa is any aa, unknown or other
  misc_feature (502)..(502): Xaa is any aa, unknown or other
HVSPHLALPLPPHARPCSVSFGSAEAEHTQQILSLLSHSLSLSHTLCSLCGGRAGRMGWGWTALAAAAMAYVAVKLMEVLWWRPRRLEQHFARQGIRGPRYRFFVGCVREMVALMVAASAKPMPRPYRSHNVLPRVLAFYHHWKKIYGSTFLIWFGPTPRLAVADPDLIREILLSRADQFDRYESHPMVRQLEGEGLVSLRGDKWAHRRKVLTPAFHMENLKLLLPFVGRTVVDVVDKWHDMAAAASGEVEIDVSEWFQVVTEDAITRTAFGRSYEDGKAVFKLQTQLMAFASEAFRKVFIPGYRFLPTKKNTTSWKLDKEIRKNLATLIGRRQEAADDEKLSGCAKDLXGLLINAGSNGGKVSPITXNDIVEECKTFFFAGKQTTSNLLTWTTVLLAMHPEWQELARQEVLQVCGARDIPSREQLTKLKTLGMILNETLRLYPPAVATVRRAKADVELGGCLIPRGTELLIPIMAMHHDARLWGPDATQFNPARFARGAAXAARHPTAFIPFGLGARMCIGQNLALLESKLTLAIVLQRFDFRLSPSYLHAPTVLMLLHPQYGAPVVFRPRPSEPSDSDCDSRDV

SEQ ID NO: 41087 - protein, 530 aa, Zea mays subsp. mays
  peptide (1)..(530): Ceres Seq. ID no. 12436089
  misc_feature (92)..(526): NCBI GI NO: 34896248 NR Description: OSJNBb0008D07.14
  misc_feature (1)..(93): NCBI GI NO: 34896248 NR Description: OSJNBb0008D07.14
  misc_feature (13)..(514): NCBI GI NO: 15225777 NR Description: cytochrome P450, putative; protein id: At2g26710.1
  misc_feature (3)..(518): NCBI GI NO: 34898914 NR Description: putative cytochrome P450
  misc_feature (6)..(511): NCBI GI NO: 21805645 NR Description: cytochrome P450 monooxygenase CYP72A5
  misc_feature (7)..(511): NCBI GI NO: 34912882 NR Description: putative cytochrome P450
  misc_feature (5)..(514): NCBI GI NO: 13661772 NR Description: putative cytochrome P450 [Lolium rigidum]
  misc_feature (5)..(514): NCBI GI NO: 13661774 NR Description: putative cytochrome P450 [Lolium rigidum]
  misc_feature (7)..(511): NCBI GI NO: 21842133 NR Description: cytochrome P450 monooxygenase CYP72A16
  misc_feature (5)..(514): NCBI GI NO: 13661766 NR Description: putative cytochrome P450 [Lolium rigidum]
  misc_feature (294)..(294): Xaa is any aa, unknown or other
  misc_feature (312)..(312): Xaa is any aa, unknown or other
  misc_feature (446)..(446): Xaa is any aa, unknown or other
MGWGWTALAAAAMAYVAVKLMEVLWWRPRRLEQHFARQGIRGPRYRFFVGCVREMVALMVAASAKPMPRPYRSHNVLPRVLAFYHHWKKIYGSTFLIWFGPTPRLAVADPDLIREILLSRADQFDRYESHPMVRQLEGEGLVSLRGDKWAHRRKVLTPAFHMENLKLLLPFVGRTVVDVVDKWHDMAAAASGEVEIDVSEWFQVVTEDAITRTAFGRSYEDGKAVFKLQTQLMAFASEAFRKVFIPGYRFLPTKKNTTSWKLDKEIRKNLATLIGRRQEAADDEKLSGCAKDLXGLLINAGSNGGKVSPITXNDIVEECKTFFFAGKQTTSNLLTWTTVLLAMHPEWQELARQEVLQVCGARDIPSREQLTKLKTLGMILNETLRLYPPAVATVRRAKADVELGGCLIPRGTELLIPIMAMHHDARLWGPDATQFNPARFARGAAXAARHPTAFIPFGLGARMCIGQNLALLESKLTLAIVLQRFDFRLSPSYLHAPTVLMLLHPQYGAPVVFRPRPSEPSDSDCDSRDV

SEQ ID NO: 41088 - protein, 518 aa, Zea mays subsp. mays
  peptide (1)..(518): Ceres Seq. ID no. 12436090
  misc_feature (80)..(514): NCBI GI NO: 34896248 NR Description: OSJNBb0008D07.14
  misc_feature (1)..(81): NCBI GI NO: 34896248 NR Description: OSJNBb0008D07.14
  misc_feature (1)..(502): NCBI GI NO: 15225777 NR Description: cytochrome P450, putative; protein id: At2g26710.1
  misc_feature (1)..(506): NCBI GI NO: 34898914 NR Description: putative cytochrome P450
  misc_feature (1)..(499): NCBI GI NO: 21805645 NR Description: cytochrome P450 monooxygenase CYP72A5
  misc_feature (1)..(499): NCBI GI NO: 34912882 NR Description: putative cytochrome P450
  misc_feature (1)..(502): NCBI GI NO: 13661772 NR Description: putative cytochrome P450 [Lolium rigidum]
  misc_feature (1)..(502): NCBI GI NO: 13661774 NR Description: putative cytochrome P450 [Lolium rigidum]
  misc_feature (1)..(499): NCBI GI NO: 21842133 NR Description: cytochrome P450 monooxygenase CYP72A16
  misc_feature (1)..(502): NCBI GI NO: 13661766 NR Description: putative cytochrome P450 [Lolium rigidum]
  misc_feature (282)..(282): Xaa is any aa, unknown or other
  misc_feature (300)..(300): Xaa is any aa, unknown or other
  misc_feature (434)..(434): Xaa is any aa, unknown or other
MAYVAVKLMEVLWWRPRRLEQHFARQGIRGPRYRFFVGCVREMVALMVAASAKPMPRPYRSHNVLPRVLAFYHHWKKIYGSTFLIWFGPTPRLAVADPDLIREILLSRADQFDRYESHPMVRQLEGEGLVSLRGDKWAHRRKVLTPAFHMENLKLLLPFVGRTVVDVVDKWHDMAAAASGEVEIDVSEWFQVVTEDAITRTAFGRSYEDGKAVFKLQTQLMAFASEAFRKVFIPGYRFLPTKKNTTSWKLDKEIRKNLATLIGRRQEAADDEKLSGCAKDLXGLLINAGSNGGKVSPITXNDIVEECKTFFFAGKQTTSNLLTWTTVLLAMHPEWQELARQEVLQVCGARDIPSREQLTKLKTLGMILNETLRLYPPAVATVRRAKADVELGGCLIPRGTELLIPIMAMHHDARLWGPDATQFNPARFARGAAXAARHPTAFIPFGLGARMCIGQNLALLESKLTLAIVLQRFDFRLSPSYLHAPTVLMLLHPQYGAPVVFRPRPSEPSDSDCDSRDV

SEQ ID NO: 41089 - DNA, 448 bp, Zea mays subsp. mays
  misc_feature (1)..(448): Ceres Seq. ID no. 4616522
gcgtccattccacctgcttggtccatcagcagcgagcgaacagggaaaaaggagaggccgagaagcgctttagcgataagactggtgcacccgtagcggcacggcatggcggccacggcgtactccgtggcgctcctcggcggcgcacgcctgccggccgccctcctccctcggcgcagcagcgtgtgccaccagcagcttcgcctccaagacgcgccgaggctctccctgcaccgtgccagggccgcttccgaggacacgtcggcctccggcggcgacgagctcatcgaagacctcaaggcaaagtgggacgccgttgaggacaagcccaccgtcctcctgtacggcggcggcgccgtcgtggcgctatggttgacgtccgttgttgtcggcgccatcaacgccgtgccgctgctccccaagatcctggagctcgtcggcctcgtct

SEQ ID NO: 41090 - protein, 114 aa, Zea mays subsp. mays
  peptide (1)..(114): Ceres Seq. ID no. 4616523
  misc_feature (39)..(113): NCBI GI NO: 18411555 NR Description: expressed protein; protein id: At4g01150
  misc_feature (39)..(113): NCBI GI NO: 687677 NR Description: unknown
  misc_feature (1)..(113): NCBI GI NO: 38175474 NR Description: unknown protein
  misc_feature (46)..(113): NCBI GI NO: 7485852 NR Description: hypothetical protein F20D10
  misc_feature (46)..(113): NCBI GI NO: 18420175 NR Description: expressed protein; protein id: At4g38100
MAATAYSVALLGGARLPAALLPRRSSVCHQQLRLQDAPRLSLHRARAASEDTSASGGDELIEDLKAKWDAVEDKPTVLLYGGGAVVALWLTSVVVGAINAVPLLPKILELVGLV

SEQ ID NO: 41091 - protein, 105 aa, Zea mays subsp. mays
  peptide (1)..(105): Ceres Seq. ID no. 4616524
VHSTCLVHQQRANREKGEAEKRFSDKTGAPVAARHGGHGVLRGAPRRRTPAGRPPPSAQQRVPPAASPPRRAEALPAPCQGRFRGHVGLRRRRAHRRPQGKVGRR

SEQ ID NO: 41092 - DNA, 1649 bp, Zea mays subsp. mays
  misc_feature (1)..(1649): Ceres Seq. ID no. 12364563
gcacgagaccattacctagaacatcctaatcaaaaagacttgagttcaccggtactatttatgtaccgtacataaagtaaagtttaacgaaaagaaaagcacgggagacgggacgggaccgctgggcgcgccgggccgcgccgagccgagcgagtcgtccactctccactccgcccgccacgcccacgccccgtcctcgcttccgtctcccacaatccaaggacaccgagcagcaggcggcggaagcaacccgctgtgggggcggcgtggagtccagttttgctcggctcgtcgctgggatccgccggccggcgaagcggggaagggaagaggagcggagattggagagtacaagcaggggaagatgtcagacgcgctgatcaacggcctcgccggcgccggcggcgggatcatcgcccagctccttacctacccgctccagaccgtgaacgcgcggcaacagacggagcgcgacccctccaagccggcgttcaaggacggcgccgctcgccagttgtatctggttgtgaagaacgaggggtgggagcgcctgtatggcgggcttatgccctctctcgtcggcaccgctgcctcccagggtgtctactactacttctaccaaatattccggaacagggccgaggcaagggcccttgagcgatccaggagagggcttggcgatgggtctgtcggcatgctccagtctctcactgtcgctgccctgtctggctgtgtcaatgtactgctcacaaacccgatttgggttgttgttacacgaatgcaaactcacagaaaggcaaacaaacagcaaagacctcagggtttgaattgtgctcttgataagccccttgaagctgctacagctgaaaacgctccatacaaaacgattgatgtttttcaggaactctacaaagaatctggagttcttggcttctggaaaggggtaattccggctcttatcatggttagcaatcccgcaattcagttcatgctatatgagactcttctgaagaaattgaagaagagacgagcctctaattttaagggagctgatggattgactgctcttgaaatttttcttcttggtgctgttgcgaaacttggtgcaaccgtcgttacgtatccccttctagttgttaaggcaagacttcaggcaaagcacatgattaacgatgacaagaggcatcgctacaaaggtacacttgatgcgttcacaaagatggtacgatatgagggtctgtcagggatgtacaaaggaatgggcacaaaaattgtgcaaagtgtttttgcttctgctttgctttttatgattaaggaggagctggtgaagggtgctcgactattggtaactggtaacactagtctggttaagaaactaccatcaaagtcatcaagatgaactacgggcatcgcaagcgttagtatatcatcctaaaaagccatttattatccgcataaaccgtaaacaaggtcgacaagctatagagctcgcctctgctttggatatgtcaactgtaggttacacaatagccagtatgattcacgtagggaccaaagactatgttggatagatatttgtatcattcatgtagaatgtatcgtggaagatcgaaacagaagaaaataaataagtatgataatttgaactc

SEQ ID NO: 41093 - protein, 344 aa, Zea mays subsp. mays
  peptide (1)..(344): Ceres Seq. ID no. 12364564
  misc_feature (1)..(344): NCBI GI NO: 34901996 NR Description: unknown protein
  misc_feature (1)..(334): NCBI GI NO: 21593883 NR Description: putative peroxisomal membrane carrier protein
  misc_feature (1)..(333): NCBI GI NO: 15225602 NR Description: 36kDa-peroxisomal membrane protein
  misc_feature (169)..(321): NCBI GI NO: 28828484 NR Description: hypothetical protein [Dictyostelium discoideum]
  misc_feature (3)..(140): NCBI GI NO: 28828484 NR Description: hypothetical protein [Dictyostelium discoideum]
  misc_feature (2)..(320): NCBI GI NO: 38105196 NR Description: hypothetical protein MG03247.4
  misc_feature (54)..(320): NCBI GI NO: 40739628 NR Description: hypothetical protein AN4280.2
  misc_feature (162)..(320): NCBI GI NO: 19921888 NR Description: CG8026-PB [Drosophila melanogaster]
  misc_feature (9)..(158): NCBI GI NO: 19921888 NR Description: CG8026-PB [Drosophila melanogaster]
  misc_feature (169)..(320): NCBI GI NO: 34222684 NR Description: Mitochondrial folate transporter/carrier
MSDALINGLAGAGGGIIAQLLTYPLQTVNARQQTERDPSKPAFKDGAARQLYLVVKNEGWERLYGGLMPSLVGTAASQGVYYYFYQIFRNRAEARALERSRRGLGDGSVGMLQSLTVAALSGCVNVLLTNPIWVVVTRMQTHRKANKQQRPQGLNCALDKPLEAATAENAPYKTIDVFQELYKESGVLGFWKGVIPALIMVSNPAIQFMLYETLLKKLKKRRASNFKGADGLTALEIFLLGAVAKLGATVVTYPLLVVKARLQAKHMINDDKRHRYKGTLDAFTKMVRYEGLSGMYKGMGTKIVQSVFASALLFMIKEELVKGARLLVTGNTSLVKKLPSKSSR

SEQ ID NO: 41094 - protein, 277 aa, Zea mays subsp. mays
  peptide (1)..(277): Ceres Seq. ID no. 12364565
  misc_feature (1)..(277): NCBI GI NO: 34901996 NR Description: unknown protein
  misc_feature (1)..(267): NCBI GI NO: 21593883 NR Description: putative peroxisomal membrane carrier protein
  misc_feature (1)..(266): NCBI GI NO: 15225602 NR Description: 36kDa-peroxisomal membrane protein
  misc_feature (102)..(254): NCBI GI NO: 28828484 NR Description: hypothetical protein [Dictyostelium discoideum]
  misc_feature (1)..(73): NCBI GI NO: 28828484 NR Description: hypothetical protein [Dictyostelium discoideum]
  misc_feature (1)..(253): NCBI GI NO: 38105196 NR Description: hypothetical protein MG03247.4
  misc_feature (1)..(253): NCBI GI NO: 40739628 NR Description: hypothetical protein AN4280.2
  misc_feature (95)..(253): NCBI GI NO: 19921888 NR Description: CG8026-PB [Drosophila melanogaster]
  misc_feature (1)..(91): NCBI GI NO: 19921888 NR Description: CG8026-PB [Drosophila melanogaster]
  misc_feature (102)..(253): NCBI GI NO: 34222684 NR Description: Mitochondrial folate transporter/carrier
MPSLVGTAASQGVYYYFYQIFRNRAEARALERSRRGLGDGSVGMLQSLTVAALSGCVNVLLTNPIWVVVTRMQTHRKANKQQRPQGLNCALDKPLEAATAENAPYKTIDVFQELYKESGVLGFWKGVIPALIMVSNPAIQFMLYETLLKKLKKRRASNFKGADGLTALEIFLLGAVAKLGATVVTYPLLVVKARLQAKHMINDDKRHRYKGTLDAFTKMVRYEGLSGMYKGMGTKIVQSVFASALLFMIKEELVKGARLLVTGNTSLVKKLPSKSSR

SEQ ID NO: 41095 - protein, 234 aa, Zea mays subsp. mays
  peptide (1)..(234): Ceres Seq. ID no. 12364566
  misc_feature (1)..(234): NCBI GI NO: 34901996 NR Description: unknown protein
  misc_feature (1)..(224): NCBI GI NO: 21593883 NR Description: putative peroxisomal membrane carrier protein
  misc_feature (1)..(223): NCBI GI NO: 15225602 NR Description: 36kDa-peroxisomal membrane protein
  misc_feature (59)..(211): NCBI GI NO: 28828484 NR Description: hypothetical protein [Dictyostelium discoideum]
  misc_feature (1)..(30): NCBI GI NO: 28828484 NR Description: hypothetical protein [Dictyostelium discoideum]
  misc_feature (1)..(210): NCBI GI NO: 38105196 NR Description: hypothetical protein MG03247.4
  misc_feature (1)..(210): NCBI GI NO: 40739628 NR Description: hypothetical protein AN4280.2
  misc_feature (52)..(210): NCBI GI NO: 19921888 NR Description: CG8026-PB [Drosophila melanogaster]
  misc_feature (1)..(48): NCBI GI NO: 19921888 NR Description: CG8026-PB [Drosophila melanogaster]
  misc_feature (59)..(210): NCBI GI NO: 34222684 NR Description: Mitochondrial folate transporter/carrier
MLQSLTVAALSGCVNVLLTNPIWVVVTRMQTHRKANKQQRPQGLNCALDKPLEAATAENAPYKTIDVFQELYKESGVLGFWKGVIPALIMVSNPAIQFMLYETLLKKLKKRRASNFKGADGLTALEIFLLGAVAKLGATVVTYPLLVVKARLQAKHMINDDKRHRYKGTLDAFTKMVRYEGLSGMYKGMGTKIVQSVFASALLFMIKEELVKGARLLVTGNTSLVKKLPSKSSR

SEQ ID NO: 41096 - DNA, 1083 bp, Zea mays subsp. mays
  misc_feature (1)..(1083): Ceres Seq. ID no. 13492652
ccacacagcaaaaccacccgcgctccgccaatccagagagccagccagcccgaggtcacacagcagcgagctcggtcttctcgccaggacacgaacacgaccccagcaggcggcaggcaagccacgctctctcgacggacggacgttaatcgagacatggggcgctctccgtgctgcgagaagatggggctgaagaggggtccgtggacggccgaggaggacaggattctggtggcgcacgtcgagcgccacggccacagcaactggcgcgcgctgcccaagcaggcgggcctgctccgctgcggcaagagctgccgcctccgctggatcaactacctgcgccccgacatcaagcgcggcaacttcagccgggaggaggaggacgccatcatacagctccaccaaatgctcggcaacagatggtcgacaatcgctgccaggctgccggggaggacggacaacgagatcaagaacgtctggcacacccacctcaagaagcgcctggagccaaagccagccagccagcaggcgcccaagcgcaagcccacgaagaagcagcagccgcagccggagcccgtaacggcgctcgaggggccgaccggggccgtgccggtgtcgccggagcggtcactctccacgacgacgtcgaccaccaccagcaccgcggactactcggccgcctcgtcgctggagaacgcaggcgacagcttcacctcggaggaggactactaccagatcgacgacagcttctggtccgagacgctggcgatgacgacgacggtggacagcttcgagtccggggtgcagcaggcggagggaagcttcggcaagtcggcggcgccgccgtcgtcgaccaacgacgacatggacttctggctcaagctgttcatgcaggccagcgacatgcagaatttgccccagattatttaggcgggaaacggacctagacggttggttatctctcggctgatgatgatattcattggcgcgcgctcacgattctttgaatctttgttctgctccgttttcggtggatgcatatatcccactgaaaccttgtgaagcggaaagcaattgcttcgt

SEQ ID NO: 41097 - protein, 309 aa, Zea mays subsp. mays
  peptide (1)..(309): Ceres Seq. ID no. 15222886
  misc_feature (66)..(113): Pfam Name: Pfam Description:  Myb-like DNA-binding domain
  misc_feature (53)..(308): NCBI GI NO: 7438336 NR Description: myb protein homolog - rice
  misc_feature (53)..(308): NCBI GI NO: 33087073 NR Description: myb-related protein
  misc_feature (53)..(262): NCBI GI NO: 282963 NR Description: myb-related protein Ph2 - garden petunia
  misc_feature (53)..(307): NCBI GI NO: 7438333 NR Description: myb-related transcription factor THM18 - tomato
  misc_feature (53)..(307): NCBI GI NO: 5139814 NR Description: GmMYB29B2 [Glycine max]
  misc_feature (53)..(305): NCBI GI NO: 22266675 NR Description: myb-related transcription factor VlMYBB1-2
  misc_feature (53)..(292): NCBI GI NO: 15221419 NR Description: myb family transcription factor
  misc_feature (53)..(305): NCBI GI NO: 22266673 NR Description: myb-related transcription factor VlMYBB1-1
  misc_feature (53)..(292): NCBI GI NO: 2129646 NR Description: myb-related protein
  misc_feature (53)..(256): NCBI GI NO: 6552361 NR Description: myb-related transcription factor LBM2
PHSKTTRAPPIQRASQPEVTQQRARSSRQDTNTTPAGGRQATLSRRTDVNRDMGRSPCCEKMGLKRGPWTAEEDRILVAHVERHGHSNWRALPKQAGLLRCGKSCRLRWINYLRPDIKRGNFSREEEDAIIQLHQMLGNRWSTIAARLPGRTDNEIKNVWHTHLKKRLEPKPASQQAPKRKPTKKQQPQPEPVTALEGPTGAVPVSPERSLSTTTSTTTSTADYSAASSLENAGDSFTSEEDYYQIDDSFWSETLAMTTTVDSFESGVQQAEGSFGKSAAPPSSTNDDMDFWLKLFMQASDMQNLPQII

SEQ ID NO: 41098 - protein, 257 aa, Zea mays subsp. mays
  peptide (1)..(257): Ceres Seq. ID no. 15222887
  misc_feature (14)..(61): Pfam Name: Pfam Description:  Myb-like DNA-binding domain
  misc_feature (1)..(256): NCBI GI NO: 7438336 NR Description: myb protein homolog - rice
  misc_feature (1)..(256): NCBI GI NO: 33087073 NR Description: myb-related protein
  misc_feature (1)..(210): NCBI GI NO: 282963 NR Description: myb-related protein Ph2 - garden petunia
  misc_feature (1)..(255): NCBI GI NO: 7438333 NR Description: myb-related transcription factor THM18 - tomato
  misc_feature (1)..(255): NCBI GI NO: 5139814 NR Description: GmMYB29B2 [Glycine max]
  misc_feature (1)..(253): NCBI GI NO: 22266675 NR Description: myb-related transcription factor VlMYBB1-2
  misc_feature (1)..(240): NCBI GI NO: 15221419 NR Description: myb family transcription factor
  misc_feature (1)..(253): NCBI GI NO: 22266673 NR Description: myb-related transcription factor VlMYBB1-1
  misc_feature (1)..(240): NCBI GI NO: 2129646 NR Description: myb-related protein
  misc_feature (1)..(204): NCBI GI NO: 6552361 NR Description: myb-related transcription factor LBM2
MGRSPCCEKMGLKRGPWTAEEDRILVAHVERHGHSNWRALPKQAGLLRCGKSCRLRWINYLRPDIKRGNFSREEEDAIIQLHQMLGNRWSTIAARLPGRTDNEIKNVWHTHLKKRLEPKPASQQAPKRKPTKKQQPQPEPVTALEGPTGAVPVSPERSLSTTTSTTTSTADYSAASSLENAGDSFTSEEDYYQIDDSFWSETLAMTTTVDSFESGVQQAEGSFGKSAAPPSSTNDDMDFWLKLFMQASDMQNLPQII

SEQ ID NO: 41099 - protein, 248 aa, Zea mays subsp. mays
  peptide (1)..(248): Ceres Seq. ID no. 15222888
  misc_feature (5)..(52): Pfam Name: Pfam Description:  Myb-like DNA-binding domain
  misc_feature (1)..(247): NCBI GI NO: 7438336 NR Description: myb protein homolog - rice
  misc_feature (1)..(247): NCBI GI NO: 33087073 NR Description: myb-related protein
  misc_feature (1)..(201): NCBI GI NO: 282963 NR Description: myb-related protein Ph2 - garden petunia
  misc_feature (1)..(246): NCBI GI NO: 7438333 NR Description: myb-related transcription factor THM18 - tomato
  misc_feature (1)..(246): NCBI GI NO: 5139814 NR Description: GmMYB29B2 [Glycine max]
  misc_feature (1)..(244): NCBI GI NO: 22266675 NR Description: myb-related transcription factor VlMYBB1-2
  misc_feature (1)..(231): NCBI GI NO: 15221419 NR Description: myb family transcription factor
  misc_feature (1)..(244): NCBI GI NO: 22266673 NR Description: myb-related transcription factor VlMYBB1-1
  misc_feature (1)..(231): NCBI GI NO: 2129646 NR Description: myb-related protein
  misc_feature (1)..(195): NCBI GI NO: 6552361 NR Description: myb-related transcription factor LBM2
MGLKRGPWTAEEDRILVAHVERHGHSNWRALPKQAGLLRCGKSCRLRWINYLRPDIKRGNFSREEEDAIIQLHQMLGNRWSTIAARLPGRTDNEIKNVWHTHLKKRLEPKPASQQAPKRKPTKKQQPQPEPVTALEGPTGAVPVSPERSLSTTTSTTTSTADYSAASSLENAGDSFTSEEDYYQIDDSFWSETLAMTTTVDSFESGVQQAEGSFGKSAAPPSSTNDDMDFWLKLFMQASDMQNLPQII

SEQ ID NO: 41100 - DNA, 944 bp, Zea mays subsp. mays
  misc_feature (1)..(944): Ceres Seq. ID no. 12390522
  misc_feature (563)..(563): n is a, c, t, g, unknown, or other
atttttcccctcgtcctccctgcgatttcgcgacctccatccaatccctctgcacggagaatcgtctaatggcggaggagggctacagaggtgacgctgaacgtgtacgacctcagcaacggcctcagcaacggcaagcccattgaggccatctggcacacgggagtggtggtgtacgggaacgagtactacttcggcggcgggatccagtcgtcccccgcgggacgacgccgtacgggcggccgctgcgggtggtggagctgggcgtcacgcacatcccgcgggaggtgttcgaggactacctccgcgacatcgcgccccggtacacggccgagacctaccgcctgctcacccacaactgcaacaacttcagtcacgaggtggcgcagttcctcgtcggcactggcgccggcgtgcccgattacatcctcaacctccccgccgaggtcatgtccagccccatgggcccgctcatcatgcccatgatccagaacctcgagtccacgctcaggagcaacgtcgctccgcagaccacgcagttcgtgcccacgcccgcctccgtntccgcgccgaccgaggctcccgcctccgagcgaaaagcgccggcgccggcgccggcggagaaggcttcgaaggaagctcctgcgcctgcgaagaaggaagcccctactcctgcggctgaccctctcgggagcgccagggggaaggtgcaggaggaggtgatgaaggagttcgcggccatcatggccagcggtacgctacgggccagcgaggcggcggcgctggccatgcgccgggtcatggagcgccacggcgacggcgccacgatgcagcagggctagacgaatcaggctgtgaacgcgttccggttccatgggaattggaatttgtcatctgcatgctgatgccgccgccgtatggaaaaatttggagaagttattcct

SEQ ID NO: 41101 - protein, 130 aa, Zea mays subsp. mays
  peptide (1)..(130): Ceres Seq. ID no. 12390523
  misc_feature (1)..(122): NCBI GI NO: 15231383 NR Description: unknown protein; protein id: At3g07090
  misc_feature (1)..(77): NCBI GI NO: 37535296 NR Description: unknown protein
  misc_feature (1)..(23): NCBI GI NO: 28277916 NR Description: Similar to DNA segment
  misc_feature (1)..(16): NCBI GI NO: 37589651 NR Description: Unknown (protein for MGC:73066) [Danio rerio]
  misc_feature (1)..(17): NCBI GI NO: 14779199 NR Description: similar to LD11371p
  misc_feature (1)..(126): NCBI GI NO: 40738408 NR Description: hypothetical protein AN6915.2
  misc_feature (1)..(17): NCBI GI NO: 20162548 NR Description: D15Wsu75e protein [Mus musculus]
  misc_feature (51)..(122): NCBI GI NO: 37535296 NR Description: unknown protein
  misc_feature (1)..(17): NCBI GI NO: 34867307 NR Description: similar to D15Wsu75e protein [Rattus norvegicus]
  misc_feature (1)..(20): NCBI GI NO: 23479931 NR Description: hypothetical protein [Plasmodium yoelii yoelii]
  misc_feature (38)..(38): Xaa is any aa, unknown or other
MSSPMGPLIMPMIQNLESTLRSNVAPQTTQFVPTPASXSAPTEAPASERKAPAPAPAEKASKEAPAPAKKEAPTPAADPLGSARGKVQEEVMKEFAAIMASGTLRASEAAALAMRRVMERHGDGATMQQG

SEQ ID NO: 41102 - protein, 126 aa, Zea mays subsp. mays
  peptide (1)..(126): Ceres Seq. ID no. 12390524
  misc_feature (1)..(118): NCBI GI NO: 15231383 NR Description: unknown protein; protein id: At3g07090
  misc_feature (1)..(73): NCBI GI NO: 37535296 NR Description: unknown protein
  misc_feature (1)..(19): NCBI GI NO: 28277916 NR Description: Similar to DNA segment
  misc_feature (1)..(12): NCBI GI NO: 37589651 NR Description: Unknown (protein for MGC:73066) [Danio rerio]
  misc_feature (1)..(13): NCBI GI NO: 14779199 NR Description: similar to LD11371p
  misc_feature (1)..(122): NCBI GI NO: 40738408 NR Description: hypothetical protein AN6915.2
  misc_feature (1)..(13): NCBI GI NO: 20162548 NR Description: D15Wsu75e protein [Mus musculus]
  misc_feature (47)..(118): NCBI GI NO: 37535296 NR Description: unknown protein
  misc_feature (1)..(13): NCBI GI NO: 34867307 NR Description: similar to D15Wsu75e protein [Rattus norvegicus]
  misc_feature (1)..(16): NCBI GI NO: 23479931 NR Description: hypothetical protein [Plasmodium yoelii yoelii]
  misc_feature (34)..(34): Xaa is any aa, unknown or other
MGPLIMPMIQNLESTLRSNVAPQTTQFVPTPASXSAPTEAPASERKAPAPAPAEKASKEAPAPAKKEAPTPAADPLGSARGKVQEEVMKEFAAIMASGTLRASEAAALAMRRVMERHGDGATMQQG

SEQ ID NO: 41103 - protein, 121 aa, Zea mays subsp. mays
  peptide (1)..(121): Ceres Seq. ID no. 12390525
  misc_feature (1)..(113): NCBI GI NO: 15231383 NR Description: unknown protein; protein id: At3g07090
  misc_feature (1)..(68): NCBI GI NO: 37535296 NR Description: unknown protein
  misc_feature (1)..(14): NCBI GI NO: 28277916 NR Description: Similar to DNA segment
  misc_feature (1)..(117): NCBI GI NO: 40738408 NR Description: hypothetical protein AN6915.2
  misc_feature (42)..(113): NCBI GI NO: 37535296 NR Description: unknown protein
  misc_feature (1)..(11): NCBI GI NO: 23479931 NR Description: hypothetical protein [Plasmodium yoelii yoelii]
  misc_feature (1)..(26): NCBI GI NO: 29246854 NR Description: GLP_191_9337_10773 [Giardia lamblia ATCC 50803]
  misc_feature (1)..(11): NCBI GI NO: 23508869 NR Description: hypothetical protein [Plasmodium falciparum 3D7]
  misc_feature (29)..(29): Xaa is any aa, unknown or other
MPMIQNLESTLRSNVAPQTTQFVPTPASXSAPTEAPASERKAPAPAPAEKASKEAPAPAKKEAPTPAADPLGSARGKVQEEVMKEFAAIMASGTLRASEAAALAMRRVMERHGDGATMQQG

SEQ ID NO: 41104 - DNA, 1698 bp, Zea mays subsp. mays; identical to SEQ ID NO: 35446
  misc_feature (1)..(1698): Ceres Seq. ID no. 13494587

SEQ ID NO: 41105 - protein, 355 aa, Zea mays subsp. mays; identical to SEQ ID NO: 35447
  peptide (1)..(355): Ceres Seq. ID no. 13494588
  misc_feature (1)..(81): Pfam Name: Peptidase family S21 Pfam Description: Assemblin
  misc_feature (1)..(341): NCBI GI NO: 22773231 NR Description: Putative RNA-binding protein
  misc_feature (34)..(340): NCBI GI NO: 18087662 NR Description: putative RNA-binding protein [Oryza sativa]
  misc_feature (29)..(334): NCBI GI NO: 30682679 NR Description: expressed protein [Arabidopsis thaliana]
  misc_feature (29)..(334): NCBI GI NO: 25084169 NR Description: Unknown protein [Arabidopsis thaliana]
  misc_feature (29)..(334): NCBI GI NO: 30682683 NR Description: expressed protein [Arabidopsis thaliana]
  misc_feature (82)..(336): NCBI GI NO: 18405397 NR Description: expressed protein [Arabidopsis thaliana]
  misc_feature (29)..(204): NCBI GI NO: 25372787 NR Description: Rubisco subunit binding-protein beta subunit
  misc_feature (80)..(243): NCBI GI NO: 34395023 NR Description: high-glucose-regulated protein 8-like
  misc_feature (30)..(191): NCBI GI NO: 30682433 NR Description: expressed protein [Arabidopsis thaliana]
  misc_feature (30)..(191): NCBI GI NO: 30682438 NR Description: expressed protein [Arabidopsis thaliana]

SEQ ID NO: 41106 - protein, 263 aa, Zea mays subsp. mays; identical to SEQ ID NO: 35448
  peptide (1)..(263): Ceres Seq. ID no. 13494589
  misc_feature (1)..(249): NCBI GI NO: 22773231 NR Description: Putative RNA-binding protein
  misc_feature (1)..(248): NCBI GI NO: 18087662 NR Description: putative RNA-binding protein [Oryza sativa]
  misc_feature (1)..(242): NCBI GI NO: 30682679 NR Description: expressed protein [Arabidopsis thaliana]
  misc_feature (1)..(242): NCBI GI NO: 25084169 NR Description: Unknown protein [Arabidopsis thaliana]
  misc_feature (1)..(242): NCBI GI NO: 30682683 NR Description: expressed protein [Arabidopsis thaliana]
  misc_feature (1)..(244): NCBI GI NO: 18405397 NR Description: expressed protein [Arabidopsis thaliana]
  misc_feature (1)..(112): NCBI GI NO: 25372787 NR Description: Rubisco subunit binding-protein beta subunit
  misc_feature (1)..(151): NCBI GI NO: 34395023 NR Description: high-glucose-regulated protein 8-like
  misc_feature (1)..(99): NCBI GI NO: 30682433 NR Description: expressed protein [Arabidopsis thaliana]
  misc_feature (1)..(99): NCBI GI NO: 30682438 NR Description: expressed protein [Arabidopsis thaliana]

SEQ ID NO: 41107 - protein, 244 aa, Zea mays subsp. mays; identical to SEQ ID NO: 35449
  peptide (1)..(244): Ceres Seq. ID no. 13494590
  misc_feature (1)..(230): NCBI GI NO: 22773231 NR Description: Putative RNA-binding protein
  misc_feature (1)..(229): NCBI GI NO: 18087662 NR Description: putative RNA-binding protein [Oryza sativa]
  misc_feature (1)..(223): NCBI GI NO: 30682679 NR Description: expressed protein [Arabidopsis thaliana]
  misc_feature (1)..(223): NCBI GI NO: 25084169 NR Description: Unknown protein [Arabidopsis thaliana]
  misc_feature (1)..(223): NCBI GI NO: 30682683 NR Description: expressed protein [Arabidopsis thaliana]
  misc_feature (1)..(225): NCBI GI NO: 18405397 NR Description: expressed protein [Arabidopsis thaliana]
  misc_feature (1)..(93): NCBI GI NO: 25372787 NR Description: Rubisco subunit binding-protein beta subunit
  misc_feature (1)..(132): NCBI GI NO: 34395023 NR Description: high-glucose-regulated protein 8-like
  misc_feature (1)..(80): NCBI GI NO: 30682433 NR Description: expressed protein [Arabidopsis thaliana]
  misc_feature (1)..(80): NCBI GI NO: 30682438 NR Description: expressed protein [Arabidopsis thaliana]

SEQ ID NO: 41108 - DNA, 2064 bp, Zea mays subsp. mays
  misc_feature (1)..(2064): Ceres Seq. ID no. 12361230
gcacgagaccattacctagaacatcctaatcgaaaaagaaaggtccccgtagaaattcgaaaccacaccaccacctggaaacccagacaaagcacgagccacgcacggcccccgctgcctcccttccgccgccgccgccgccggcggcgcgccaccgtcgctgctctcccgccttcaccgcgcccaactccaatccttgcctcccccgcgcgcttcagcctcttcactccccatcgttttcgcctggccagatccaggtttccttgaccgagacctcgcctgccttacgcctccggtcggattcttcgccgtccttgtccccactgggcaccgctggggtggagcggagatcggatccgccgggagctgattccttctctcgcaggctggatgcccttactttcttcgatggactgctcgtgttattctgcaattctcagttttgctgtgaacgctgaatcgaatgtttctttcgttgcgttcagtctagtttgacgcggattcatttgctggtcggcatagcatgatcctacggtgattgcggatagcttgtgcaagctggtggcttgggtgttgtctttttaatctggcctaaagatatcctgagacggtagcgtcacatggatgctagtacagaggttactgatgctattggtgcggtgggctttgacaatgaggccgcggggaagttgccgcccagtgatagtgtagaggggcacgcagaagaacacgatgtgctggctgatggagcccattcgggcgagagcgaggtgatcaacccatctgaagaagtagaaatggaagccacctcgcagtcccaggacataaagcctcgagttcctgagggggttcaaggccattcaatgaaggttggtactaaatctcagcgacagagccctcgaggcggggataagagtcaaactaggaaaagctcttttagtccttcttatcctaaggcgcccattgcacgggtttctgatccagatctagttgattgctctttgagcaatggtgatgctggttccagtaagaaaaaggccgagaagagcagtttccgcccagttgccaaggagaccccatcacttgaggactcaaatgagaagaaaaaaactcagaaggcatcaaaccaacattctgtcaaaaaggatattgaagaagaatcaaatgaaagtgtgaaacctcaaagggttggcagcactccttcatatggatttagttttaagtgtgatgagagagctgaaaaacgaagagagttctactcaaagctcgaggagaagattcatgcacaggaactagagaaaagcaacttgcaggcaaaatcaaaggaaactgaagaagctgaactcaaaatgctgagaaagagtttaaatttcaaggcaacaccaatgcccagcttttataaggaaccacctccccccaaggttgagttgaagaagatacctacaacaagagctaggtcaccaaagcttggtcgctccaagaacacatcctcaggagggacagaagggaatccaaatcctccagctcgttcagctcgactgagtctcgatgaaagggtctcccaaaatggtgtcaagaaagcacctgctgcaaatgcagcgaagaagccccagcggaaatctctacctaaactgccttcagagcaaacaaccaaagttgacattgcaccatctgttccatctgcagaagagctagaaaacaagttgccgacgaagggtggtcttgatcgagagccgatccgcgctcaaattacacctgacgaacctggactcactgcataggaacctatcaagccgactcctatgaaaggagggagttgtgccccagcttcctttatcacattttgctatttctgcagtaaactgctggctggtattatgtattagaattagtctcagcaccaggagcttgaagagtggcaagtgacaccgtgtattctttatcttagtttctgttgacataccaggtatttgtagttggcagacaggcagaatttcatattattctccagggctaccagtcaattaagttgccgtccaagtaagatatgtacacgattttgcc

SEQ ID NO: 41109 - protein, 386 aa, Zea mays subsp. mays
  peptide (1)..(386): Ceres Seq. ID no. 12361231
  misc_feature (23)..(340): Pfam Name: Pfam Description:  AF-4 proto-oncoprotein
  misc_feature (45)..(371): NCBI GI NO: 18417986 NR Description: putative protein; protein id: At4g32330
  misc_feature (53)..(365): NCBI GI NO: 15224733 NR Description: unknown protein; protein id: At2g25480.1
  misc_feature (1)..(381): NCBI GI NO: 18403980 NR Description: expressed protein; protein id: At2g35880
  misc_feature (60)..(381): NCBI GI NO: 25408425 NR Description: hypothetical protein At2g35880
  misc_feature (154)..(272): NCBI GI NO: 7485356 NR Description: hypothetical protein F10M6
  misc_feature (154)..(272): NCBI GI NO: 7486636 NR Description: hypothetical protein F8B4
  misc_feature (18)..(329): NCBI GI NO: 34897180 NR Description: unknown protein
  misc_feature (133)..(292): NCBI GI NO: 32395575 NR Description: seed specific protein Bn15D14A [Brassica napus]
  misc_feature (1)..(337): NCBI GI NO: 34393229 NR Description: putative seed specific protein
  misc_feature (47)..(292): NCBI GI NO: 9294199 NR Description: gb|AAF04893
MDASTEVTDAIGAVGFDNEAAGKLPPSDSVEGHAEEHDVLADGAHSGESEVINPSEEVEMEATSQSQDIKPRVPEGVQGHSMKVGTKSQRQSPRGGDKSQTRKSSFSPSYPKAPIARVSDPDLVDCSLSNGDAGSSKKKAEKSSFRPVAKETPSLEDSNEKKKTQKASNQHSVKKDIEEESNESVKPQRVGSTPSYGFSFKCDERAEKRREFYSKLEEKIHAQELEKSNLQAKSKETEEAELKMLRKSLNFKATPMPSFYKEPPPPKVELKKIPTTRARSPKLGRSKNTSSGGTEGNPNPPARSARLSLDERVSQNGVKKAPAANAAKKPQRKSLPKLPSEQTTKVDIAPSVPSAEELENKLPTKGGLDREPIRAQITPDEPGLTA

SEQ ID NO: 41110 - protein, 327 aa, Zea mays subsp. mays
  peptide (1)..(327): Ceres Seq. ID no. 12361232
  misc_feature (1)..(281): Pfam Name: Pfam Description:  AF-4 proto-oncoprotein
  misc_feature (1)..(312): NCBI GI NO: 18417986 NR Description: putative protein; protein id: At4g32330
  misc_feature (1)..(306): NCBI GI NO: 15224733 NR Description: unknown protein; protein id: At2g25480.1
  misc_feature (1)..(322): NCBI GI NO: 18403980 NR Description: expressed protein; protein id: At2g35880
  misc_feature (1)..(322): NCBI GI NO: 25408425 NR Description: hypothetical protein At2g35880
  misc_feature (95)..(213): NCBI GI NO: 7485356 NR Description: hypothetical protein F10M6
  misc_feature (95)..(213): NCBI GI NO: 7486636 NR Description: hypothetical protein F8B4
  misc_feature (1)..(270): NCBI GI NO: 34897180 NR Description: unknown protein
  misc_feature (74)..(233): NCBI GI NO: 32395575 NR Description: seed specific protein Bn15D14A [Brassica napus]
  misc_feature (1)..(278): NCBI GI NO: 34393229 NR Description: putative seed specific protein
  misc_feature (1)..(233): NCBI GI NO: 9294199 NR Description: gb|AAF04893
MEATSQSQDIKPRVPEGVQGHSMKVGTKSQRQSPRGGDKSQTRKSSFSPSYPKAPIARVSDPDLVDCSLSNGDAGSSKKKAEKSSFRPVAKETPSLEDSNEKKKTQKASNQHSVKKDIEEESNESVKPQRVGSTPSYGFSFKCDERAEKRREFYSKLEEKIHAQELEKSNLQAKSKETEEAELKMLRKSLNFKATPMPSFYKEPPPPKVELKKIPTTRARSPKLGRSKNTSSGGTEGNPNPPARSARLSLDERVSQNGVKKAPAANAAKKPQRKSLPKLPSEQTTKVDIAPSVPSAEELENKLPTKGGLDREPIRAQITPDEPGLTA

SEQ ID NO: 41111 - protein, 305 aa, Zea mays subsp. mays
  peptide (1)..(305): Ceres Seq. ID no. 12361233
  misc_feature (1)..(259): Pfam Name: Pfam Description:  AF-4 proto-oncoprotein
  misc_feature (1)..(290): NCBI GI NO: 18417986 NR Description: putative protein; protein id: At4g32330
  misc_feature (1)..(284): NCBI GI NO: 15224733 NR Description: unknown protein; protein id: At2g25480.1
  misc_feature (1)..(300): NCBI GI NO: 18403980 NR Description: expressed protein; protein id: At2g35880
  misc_feature (1)..(300): NCBI GI NO: 25408425 NR Description: hypothetical protein At2g35880
  misc_feature (73)..(191): NCBI GI NO: 7485356 NR Description: hypothetical protein F10M6
  misc_feature (73)..(191): NCBI GI NO: 7486636 NR Description: hypothetical protein F8B4
  misc_feature (1)..(248): NCBI GI NO: 34897180 NR Description: unknown protein
  misc_feature (52)..(211): NCBI GI NO: 32395575 NR Description: seed specific protein Bn15D14A [Brassica napus]
  misc_feature (1)..(256): NCBI GI NO: 34393229 NR Description: putative seed specific protein
  misc_feature (1)..(211): NCBI GI NO: 9294199 NR Description: gb|AAF04893
MKVGTKSQRQSPRGGDKSQTRKSSFSPSYPKAPIARVSDPDLVDCSLSNGDAGSSKKKAEKSSFRPVAKETPSLEDSNEKKKTQKASNQHSVKKDIEEESNESVKPQRVGSTPSYGFSFKCDERAEKRREFYSKLEEKIHAQELEKSNLQAKSKETEEAELKMLRKSLNFKATPMPSFYKEPPPPKVELKKIPTTRARSPKLGRSKNTSSGGTEGNPNPPARSARLSLDERVSQNGVKKAPAANAAKKPQRKSLPKLPSEQTTKVDIAPSVPSAEELENKLPTKGGLDREPIRAQITPDEPGLTA

SEQ ID NO: 41112 - DNA, 1589 bp, Zea mays subsp. mays
  misc_feature (1)..(1589): Ceres Seq. ID no. 12364378
  misc_feature (1035)..(1035): n is a, c, t, g, unknown, or other
  misc_feature (1049)..(1049): n is a, c, t, g, unknown, or other
  misc_feature (1041)..(1041): n is a, c, t, g, unknown, or other
  misc_feature (1098)..(1098): n is a, c, t, g, unknown, or other
  misc_feature (1016)..(1016): n is a, c, t, g, unknown, or other
  misc_feature (944)..(944): n is a, c, t, g, unknown, or other
  misc_feature (945)..(945): n is a, c, t, g, unknown, or other
gcacgagaccattacctagaacatcctaatcaaaaaacttcacgcaccaccctagtacaagagataccacagtccacagcaaaacgtacgccagaacaagctaagcgcgcgcgagccgcagacatcctaacgatggccgtcgtcgaggtcgtcacctccgagctggtggcgccgagcgagcccacgccgcggcgcccgctctggctgtccaacctcgacctcgccgcgcggaacggctacaccccgacgatctacttcttccgccgtccccaggacagcagcgacggccggctgcgtgcggactcctgcttctcgacccacgcgctgcgtgcggcgctggccgccgcgctggtccggttctacccgtttgccggccggctccgcgccgccggccgcggcgggcgcgccgagatcgactgcaacgccgcgggcgcgctcttggtcgtcgcgcggtccgccgcggcgctcgaggacttcctccacgacttcgcgccgtccaaggccatgaacgacacgttcgtgcccacgtacgactccgctggccccgacgcaccgttgctactgcttcaggtcacctttttcaggtgcggcggcgtggcgctcggcacggcgatgcaccacttcgtcatcgacggccgcagcgccttccacttcatctgaacgtggtccagcatcgcccgtggagacaccgccgccgcgcccccgtcgcttgaccgcacggcactccgggcgcgcccactgctcactactgccgccgccctcttcgaccacacccacgagtacggcggccgcgcctccaggccagcagcagtaaccgccggcgccgccggaagcaaggcggagtacgccagcgcgatcctccgcgtgaccggcgcgcaggccgccgccctgcgcgcccgcgcgggcgcggtgtccacgttccgcgcgctggtggcgcacgtctnncggtgcgcgtgcgcggcacgcgcgctggctcacgacgcgagtcccgcctgtacacgatggtggacatgcgngcccgcctgtccccgccgntgccgnacgccttnttcggcaacgcggtggcgcgcacctccgtgtcggcccgcgtcggcgacntccctggccaacccgctgggtttcggcgcacgtcggctccgcgcggcgacggggcacggggacgagtatgtgcgctcgctgctggattacctggagacggcggacctggcgacggtaccgcgccagggcctgcgcggcacggacctgcgggtgatcagctggctggggatgccgtcgtacgacgccgacttcgggtggggcgagccggcgctgctggcgccggcgctcatgtattacccggggttcgtgtacctgttgaactgccccggcaagggtggcgatgttgccgtggccgccgcgctggagcccgagcgcatgcagcgttcaaggagctcttctacgaggagctggctatgctggagtgaacgtacgtgaggcaaaagattcacgcttaacgtgcactttgtgtgcaccagttaatctataatatgtctatgtataactatatttatcgttatatctataatctacatactatatagaaatattct

SEQ ID NO: 41113 - protein, 219 aa, Zea mays subsp. mays
  peptide (1)..(219): Ceres Seq. ID no. 12364379
  misc_feature (48)..(219): Pfam Name: Pfam Description:  Transferase family
  misc_feature (48)..(219): NCBI GI NO: 6469032 NR Description: N-hydroxycinnamoyl/benzoyltransferase
  misc_feature (45)..(219): NCBI GI NO: 40644899 NR Description: hydroxycinnamoyl CoA quinate transferase
  misc_feature (45)..(219): NCBI GI NO: 38345030 NR Description: OSJNBa0029H02.14
  misc_feature (48)..(219): NCBI GI NO: 15239747 NR Description: anthranilate N-benzoyltransferase
  misc_feature (48)..(219): NCBI GI NO: 21536883 NR Description: anthranilate N-benzoyltransferase
  misc_feature (48)..(219): NCBI GI NO: 27475616 NR Description: hydroxycinnamoyl transferase [Nicotiana tabacum]
  misc_feature (45)..(219): NCBI GI NO: 40644084 NR Description: hydroxycinnamoyl CoA quinate transferase
  misc_feature (48)..(219): NCBI GI NO: 40253398 NR Description: putative hydroxyanthranilatehydroxycinnamoyltransferase 2
  misc_feature (48)..(219): NCBI GI NO: 7484689 NR Description: anthranilate N-benzoyltransferase (EC 2
  misc_feature (49)..(219): NCBI GI NO: 7484690 NR Description: anthranilate N-benzoyltransferase (EC 2
ARDHYLEHPNQKTSRTTLVQEIPQSTAKRTPEQAKRARAADILTMAVVEVVTSELVAPSEPTPRRPLWLSNLDLAARNGYTPTIYFFRRPQDSSDGRLRADSCFSTHALRAALAAALVRFYPFAGRLRAAGRGGRAEIDCNAAGALLVVARSAAALEDFLHDFAPSKAMNDTFVPTYDSAGPDAPLLLLQVTFFRCGGVALGTAMHHFVIDGRSAFHFI

SEQ ID NO: 41114 - protein, 175 aa, Zea mays subsp. mays
  peptide (1)..(175): Ceres Seq. ID no. 12364380
  misc_feature (4)..(175): Pfam Name: Pfam Description:  Transferase family
  misc_feature (4)..(175): NCBI GI NO: 6469032 NR Description: N-hydroxycinnamoyl/benzoyltransferase
  misc_feature (1)..(175): NCBI GI NO: 40644899 NR Description: hydroxycinnamoyl CoA quinate transferase
  misc_feature (1)..(175): NCBI GI NO: 38345030 NR Description: OSJNBa0029H02.14
  misc_feature (4)..(175): NCBI GI NO: 15239747 NR Description: anthranilate N-benzoyltransferase
  misc_feature (4)..(175): NCBI GI NO: 21536883 NR Description: anthranilate N-benzoyltransferase
  misc_feature (4)..(175): NCBI GI NO: 27475616 NR Description: hydroxycinnamoyl transferase [Nicotiana tabacum]
  misc_feature (1)..(175): NCBI GI NO: 40644084 NR Description: hydroxycinnamoyl CoA quinate transferase
  misc_feature (4)..(175): NCBI GI NO: 40253398 NR Description: putative hydroxyanthranilatehydroxycinnamoyltransferase 2
  misc_feature (4)..(175): NCBI GI NO: 7484689 NR Description: anthranilate N-benzoyltransferase (EC 2
  misc_feature (5)..(175): NCBI GI NO: 7484690 NR Description: anthranilate N-benzoyltransferase (EC 2
MAVVEVVTSELVAPSEPTPRRPLWLSNLDLAARNGYTPTIYFFRRPQDSSDGRLRADSCFSTHALRAALAAALVRFYPFAGRLRAAGRGGRAEIDCNAAGALLVVARSAAALEDFLHDFAPSKAMNDTFVPTYDSAGPDAPLLLLQVTFFRCGGVALGTAMHHFVIDGRSAFHFI

SEQ ID NO: 41115 - protein, 153 aa, Zea mays subsp. mays
  peptide (1)..(153): Ceres Seq. ID no. 12364381
  misc_feature (1)..(122): NCBI GI NO: 29247944 NR Description: GLP_26_54603_52153 [Giardia lamblia ATCC 50803]
  misc_feature (5)..(5): Xaa is any aa, unknown or other
  misc_feature (12)..(12): Xaa is any aa, unknown or other
  misc_feature (14)..(14): Xaa is any aa, unknown or other
  misc_feature (16)..(16): Xaa is any aa, unknown or other
  misc_feature (33)..(33): Xaa is any aa, unknown or other
MVDMXARLSPPXPXAXFGNAVARTSVSARVGDXPGQPAGFRRTSAPRGDGARGRVCALAAGLPGDGGPGDGTAPGPARHGPAGDQLAGDAVVRRRLRVGRAGAAGAGAHVLPGVRVPVELPRQGWRCCRGRRAGARAHAAFKELFYEELAMLE

SEQ ID NO: 41116 - DNA, 2126 bp, Zea mays subsp. mays
  misc_feature (1)..(2126): Ceres Seq. ID no. 12436083
aaagagccgacgtcactcctcccgatctgggcgcggacgccaacgacgcgacggcccaagtcgcgacgccaccagctccccatcccctcggacgccatggaggaagctcgcgaccacaggctctcctccaccgccggccgccccttcctctctggcttctgcgccgcggcgctccgacgtaagcccctcggcgcccgcgcctccgccgccgccgccgccaccggcgagggccttgtgcggcagctcggcgtcctcgacctcgtgctgctcgggatcggtgcgtccatcggcgccggcatattcgtcgtcactggcaccgtcgcccgcgacgccggcccaggtgtcacgatcagttttgttcttgctggagctgcgtgcgtgctcaatgccctgtgctatgctgaactggcgtctcggttccctgctgtggttgggggagcatacttgtacacgtacgcagcgttcaatgagatcaccgccttcttggtcttcactcagttgatggtggattaccatatcggcgcagcaagcattgctcgcagcttagcaagctactttatcgagttcttggagctaatcccgctcttgaagggccaaattccaagctgggtaggccatggggaggagttttttggtggtgttgtatcaattaacatactggcccccgttcttctcatcatcttaactgcgattctctgctatggtgtcaaagaatcatcagcagtgaacacgtttatgacaacattgaagataatcattgttatagtcattgtatttgctggtgtgtttgaggtggatgtatcaaactggtctccgtttatgccaaatggtttcaaatctgtagtgactggagccacagtagtcttttttgcatatgttggatttgatgcggttgctaattctgctgaggaagccaaaaggccacagagagacctacccattggtatactaggaagccttatagcatgtgtgttgttatacgttgctgtatgcttggtcattactggaatggttccatatacattactcggtgaagatgctcctttggctgaggcttttgctgctaagggcctgaaatttattactgtattgattagtattggagctgttgctggacttacaacaacacttcttgttggcttgtatgttcagtcacgtttgtactttggacttggaagggatgggcttttaccttcagtatttgctgaagtacacccaacaaggcatactcctgtacagtctcagatttgggtcggttgtgttgcagcagtcatggcaggcctctttaatgtgcgtatgctctcacatattctttccgttggcactctgaccggttattcagttgtatcagcttgtgtgatcacactaagatggaatgacaaaggaactagtcgtcgctcccttggaagtatgtcaatttggcaagagggtgttcttagtcttgtcatagttgctctttgtggttttatagtgggactttgctatcgctttaactatgctatagcctttatggttgtagcttttctgatagctgttgctgccagtttcgctctccagtttcgtcaggtctatgtggatccacctggcttttcttgtcctggggtaccgttggttcccattatttctgttttcttcaacatggtcctgtttgctcagctacatgaagaagcgtggtatagatttgtcattcttagtctcatcgctgtgggagtttatgccggctatggtcagtacaatgctgttccttccagctcagaacactctactattggttaccatggcattccttctgaagccgcatgagctatgttcatccccggagttcttcgaacatactgtatggtaccaacatacaccatcgtcaccgaagtttgaacctgttgcttttttttttgatgttttgcacagtgcatactcttgtagttacgcttagtactcctatacctatatctagacagtgaatttcacagcctgtgttgtgcccaccacaccattcgtcaggaagcttgccaagtgcatagaccttgtaaaaatgcaaatgaaaataaagaactgcagctgcattgtttgtaggaactcattgtcatgcactatgtataattctgtgtatattgtgaagagttcat

SEQ ID NO: 41117 - protein, 600 aa, Zea mays subsp. mays
  peptide (1)..(600): Ceres Seq. ID no. 12436084
  misc_feature (222)..(391): Pfam Name: Pfam Description:  Spore germination protein
  misc_feature (34)..(380): NCBI GI NO: 14140148 NR Description: putative protein [Oryza sativa]
  misc_feature (383)..(599): NCBI GI NO: 14140148 NR Description: putative protein [Oryza sativa]
  misc_feature (38)..(587): NCBI GI NO: 18390592 NR Description: expressed protein; protein id: At1g05940
  misc_feature (107)..(587): NCBI GI NO: 25406885 NR Description: hypothetical protein
  misc_feature (59)..(457): NCBI GI NO: 30018492 NR Description: Amino acid permease [Bacillus cereus ATCC 14579]
  misc_feature (471)..(590): NCBI GI NO: 30018492 NR Description: Amino acid permease [Bacillus cereus ATCC 14579]
  misc_feature (77)..(465): NCBI GI NO: 37521235 NR Description: probable amino acid transporter
  misc_feature (507)..(580): NCBI GI NO: 37521235 NR Description: probable amino acid transporter
  misc_feature (59)..(484): NCBI GI NO: 20808968 NR Description: Amino acid transporters
  misc_feature (505)..(581): NCBI GI NO: 20808968 NR Description: Amino acid transporters
KEPTSLLPIWARTPTTRRPKSRRHQLPIPSDAMEEARDHRLSSTAGRPFLSGFCAAALRRKPLGARASAAAAATGEGLVRQLGVLDLVLLGIGASIGAGIFVVTGTVARDAGPGVTISFVLAGAACVLNALCYAELASRFPAVVGGAYLYTYAAFNEITAFLVFTQLMVDYHIGAASIARSLASYFIEFLELIPLLKGQIPSWVGHGEEFFGGVVSINILAPVLLIILTAILCYGVKESSAVNTFMTTLKIIIVIVIVFAGVFEVDVSNWSPFMPNGFKSVVTGATVVFFAYVGFDAVANSAEEAKRPQRDLPIGILGSLIACVLLYVAVCLVITGMVPYTLLGEDAPLAEAFAAKGLKFITVLISIGAVAGLTTTLLVGLYVQSRLYFGLGRDGLLPSVFAEVHPTRHTPVQSQIWVGCVAAVMAGLFNVRMLSHILSVGTLTGYSVVSACVITLRWNDKGTSRRSLGSMSIWQEGVLSLVIVALCGFIVGLCYRFNYAIAFMVVAFLIAVAASFALQFRQVYVDPPGFSCPGVPLVPIISVFFNMVLFAQLHEEAWYRFVILSLIAVGVYAGYGQYNAVPSSSEHSTIGYHGIPSEAA

SEQ ID NO: 41118 - protein, 568 aa, Zea mays subsp. mays
  peptide (1)..(568): Ceres Seq. ID no. 12436085
  misc_feature (190)..(359): Pfam Name: Pfam Description:  Spore germination protein
  misc_feature (2)..(348): NCBI GI NO: 14140148 NR Description: putative protein [Oryza sativa]
  misc_feature (351)..(567): NCBI GI NO: 14140148 NR Description: putative protein [Oryza sativa]
  misc_feature (6)..(555): NCBI GI NO: 18390592 NR Description: expressed protein; protein id: At1g05940
  misc_feature (75)..(555): NCBI GI NO: 25406885 NR Description: hypothetical protein
  misc_feature (27)..(425): NCBI GI NO: 30018492 NR Description: Amino acid permease [Bacillus cereus ATCC 14579]
  misc_feature (439)..(558): NCBI GI NO: 30018492 NR Description: Amino acid permease [Bacillus cereus ATCC 14579]
  misc_feature (45)..(433): NCBI GI NO: 37521235 NR Description: probable amino acid transporter
  misc_feature (475)..(548): NCBI GI NO: 37521235 NR Description: probable amino acid transporter
  misc_feature (27)..(452): NCBI GI NO: 20808968 NR Description: Amino acid transporters
  misc_feature (473)..(549): NCBI GI NO: 20808968 NR Description: Amino acid transporters
MEEARDHRLSSTAGRPFLSGFCAAALRRKPLGARASAAAAATGEGLVRQLGVLDLVLLGIGASIGAGIFVVTGTVARDAGPGVTISFVLAGAACVLNALCYAELASRFPAVVGGAYLYTYAAFNEITAFLVFTQLMVDYHIGAASIARSLASYFIEFLELIPLLKGQIPSWVGHGEEFFGGVVSINILAPVLLIILTAILCYGVKESSAVNTFMTTLKIIIVIVIVFAGVFEVDVSNWSPFMPNGFKSVVTGATVVFFAYVGFDAVANSAEEAKRPQRDLPIGILGSLIACVLLYVAVCLVITGMVPYTLLGEDAPLAEAFAAKGLKFITVLISIGAVAGLTTTLLVGLYVQSRLYFGLGRDGLLPSVFAEVHPTRHTPVQSQIWVGCVAAVMAGLFNVRMLSHILSVGTLTGYSVVSACVITLRWNDKGTSRRSLGSMSIWQEGVLSLVIVALCGFIVGLCYRFNYAIAFMVVAFLIAVAASFALQFRQVYVDPPGFSCPGVPLVPIISVFFNMVLFAQLHEEAWYRFVILSLIAVGVYAGYGQYNAVPSSSEHSTIGYHGIPSEAA

SEQ ID NO: 41119 - protein, 433 aa, Zea mays subsp. mays
  peptide (1)..(433): Ceres Seq. ID no. 12436086
  misc_feature (55)..(224): Pfam Name: Pfam Description:  Spore germination protein
  misc_feature (1)..(213): NCBI GI NO: 14140148 NR Description: putative protein [Oryza sativa]
  misc_feature (216)..(432): NCBI GI NO: 14140148 NR Description: putative protein [Oryza sativa]
  misc_feature (1)..(420): NCBI GI NO: 18390592 NR Description: expressed protein; protein id: At1g05940
  misc_feature (1)..(420): NCBI GI NO: 25406885 NR Description: hypothetical protein
  misc_feature (1)..(290): NCBI GI NO: 30018492 NR Description: Amino acid permease [Bacillus cereus ATCC 14579]
  misc_feature (304)..(423): NCBI GI NO: 30018492 NR Description: Amino acid permease [Bacillus cereus ATCC 14579]
  misc_feature (1)..(298): NCBI GI NO: 37521235 NR Description: probable amino acid transporter
  misc_feature (340)..(413): NCBI GI NO: 37521235 NR Description: probable amino acid transporter
  misc_feature (1)..(317): NCBI GI NO: 20808968 NR Description: Amino acid transporters
  misc_feature (338)..(414): NCBI GI NO: 20808968 NR Description: Amino acid transporters
MVDYHIGAASIARSLASYFIEFLELIPLLKGQIPSWVGHGEEFFGGVVSINILAPVLLIILTAILCYGVKESSAVNTFMTTLKIIIVIVIVFAGVFEVDVSNWSPFMPNGFKSVVTGATVVFFAYVGFDAVANSAEEAKRPQRDLPIGILGSLIACVLLYVAVCLVITGMVPYTLLGEDAPLAEAFAAKGLKFITVLISIGAVAGLTTTLLVGLYVQSRLYFGLGRDGLLPSVFAEVHPTRHTPVQSQIWVGCVAAVMAGLFNVRMLSHILSVGTLTGYSVVSACVITLRWNDKGTSRRSLGSMSIWQEGVLSLVIVALCGFIVGLCYRFNYAIAFMVVAFLIAVAASFALQFRQVYVDPPGFSCPGVPLVPIISVFFNMVLFAQLHEEAWYRFVILSLIAVGVYAGYGQYNAVPSSSEHSTIGYHGIPSEAA
